United States Patent Application Publication US 2011/0189663 A1 - sequence listing, part 3

SEQ ID NO: 5621 - DNA, 691835 bp, Homo sapiens
  CSMD2 gene - 33648702 - 34300536 of chr1; NCBI Entrez Gene ID: 114784; Build 35; sequence includes 20,000 bases upstream of initiation codon and 20,000 bases downstream of termination codon of the gene
agagacccctgaaaaccaggcccaaggggccagaggacaaggcgagccatgagagatgtctgagcagtgctgttgacctgcttcagaagatgaaattggtgaagggtggagggcatcctggagggaaaggcacccaatgcagtgagaagagatgtggtgagggtggcagaggagagacgagcagggaggcaaggcaccaaaggccatcatgaagggggactgccaggacgtgtggcaggctggaggagggaagagccagtgtctgccagcactagctcacttgacaaacaagaacaggggtgcatcagtgtcaatgggactggggtgctgagacccagcattgggaagctcaagagagggaaaggctgggtgcaagggctcacgcctataatcccagcactttgagaggccaagccaggtggatcacctgagatcaggagtccgagaccagactgactaatatggtgaaaccctgtctctactaaaaatacaaaaattagccaggcatggaggtgcatgcctgtaatctcagctacttgggaggctgaggcaggagaattgcttgaacccgggaggtggaggttgcagtgagccaagatcgcgccactgcactccagcctgggtgacagagcgagactccatctaaaaaataaaaataaatttaaaaataaagtaaaataaagagagagggagacacttgcttaagggttgggtctcagagcaaagggttccaacttgtggcccacggggtctctgaaatcattcccaaatactgagagatgtgaggatgtgtttcagacaaaagctgcacagaagctttttctcagattttcaaagaggtattgacccctccaagaggagaaaacactagttgagattagactccaaagatcttcagagctggcttctagtctgagacatcagcctgagtttccgtatctgagtcttgtctttatcactcccatcaccaggtttcaagctttttaaagaataatgctaaaaaaaaaaccaaaaaaaacaaaagaggctatgtattccaagcaacttttccagagaagtcgggttcacctaattgtttaaataacagtagcacaaagagatgtttgttgggagagccattcaagcaaggaagccgagtggattcccaaatatcacttgctcaccagtgtggagaactggccaatggaagccaacagtgaaagtttaccaaaataagtgcaaaaaagccttcttccttcttgcaacaaatagcctcagaaagctgccaatcaataaaccacttctgtttttcaaaaaatgcttaaacagatttcttttatttcagtagatttatctccctacctgagtctggcttggaataatgctcaccaaagcctttccactctgcagaccaagtttgttatgacaggtaaatgggaaagtcttgggtgctgacagagggcctggaagcatccagggaagccaaccacacccagcaagctcgagccaccttctcccggtcactaacacatgctacacttcactcccatgtaacttctcatctttccctgcgcctgctgctgggctctttccataggctgttctttctctcttctcaagacctagctgggggacataactatggaaacctttgcagttattaatcatgacatccctgctacctgcggactacacccgcatctttcatcacacagtgcaggggtctcatctgttgctgcttcagattgcttccctcagaggaagacttccctaagtaccaagcccagtccagtagtcaagtacaatgttcagtcatgtgtcccctcagtgcgcttccatggcactggcacttcatcaccagaacacttactatagtgtgttgtgatctgccttttgcaagatgttgaaagttcataaaggaggtcagagactgtccccagcttttccaccattgtatttttttcagacatttcagtaataggtgcatactaatttttttttttttttgagacggagttttgctcttgttacccagactggagtgcaatggcacaatctcggctcactgcaacctctgcctcctgggttcaatcaattcttctgcctcagcctcctgagtagctgggattataggcacctgccaccacgctcagctgatttttgtatttttagtagagacagggttttaccatgttagccaggctgatctcaaaactcctgacctcaagtgatccacccacctcggcctcccaaagtgctgggattataggcataagccaccgcacctggcaatatttgttgaatgtcattgttgtcagatgtatctgtgttcatgccacccactagactgggagctctttgaggaaaggcttctgttctgcttatctctgtgtccctgggacccatcatacagcctggtactgcgaaggcaattgtgtttgttgaatgaattcatgaatgaagaaatgaacaaatgtcattctgtagttagggcaacggagtcaacagcaaatccaaagacctcattctgaggctttgaagttttagagattaggggaatgaatgaataagtaatccttgaataagtggcttgccacaattctctaagcccaaacttaagactaactaaaagataactgaaccagattttggagttaaatcagcactagacagaactattgatttctcccccaaaacccattgctccccatttcttccccacctttgtaaatggcacaccgtccaaccaggggctcaagcttggaatacatagcctcttttattatcattattattttgaaagcttgaaacttggtgatgggagtgataaagacaagactcagacatggaactcaggctgatgtcttagactagaaaccagctctggagatctttggagtctaatgctcttggctagtgttttctcctcttggaggggtcaacacctctttgaaaatctgaggaaagcttctctacacccttttgccggaaagacatcctcccagctctcagcatttggggaattacttcagagaccccatgggccacaggttggaatcctttgctctgaggccctacactccccaccttgagtttgccagtgttcggtctcaacaccccagtcacattgatagtgatgcatgcccccatccttgtttgtcaagtgaactcgtgcgtgaagcagagcatgagcctcaatgtgtctgtttgtgtacccaaatcatgagtaggtccattggctcatcttaaaacacacagttgaatcctccactttttccatccctactgcagtcactcctacccagccactgccaccattaggcctcccctggactctgacagtatcttcccagaggcctcccacttcctctcccacacacttacaaaccatctccacacagaagctggacagagattcaaacattagtgaatctgttcatgtcacaccccttcctaaaaacctgcaaaagtgttccataacatgtggaataaaatctgaactccccgcagtgatcctccaggcctcctgaggccttgcctgcctgtctctgttatacttataccatggccatgtccccatccctcctgactctcccgtctcgctgtccctctcaaagctcactcccacctcacagtctttgcatttgcttttccttttggttttgttttgagacagggtctcactctgtcgcccaggctggagtgcagtagtgcaatcttggctcattgcagcctcgactttcctgagctcaagtgttcctttcgcttcaccctcccgagtagctagaactacaggtgtgtgccaccatgcccagctaatttttgtattttttgtagagatgaggtcttgccatgttgcccaggctggtcttgaactcctgggctcaagcgttctgcccacctcagcctcccaaagtgttgggattgcaggctttagccaccatgcctggcccttgctctccattttgcccaaatgttctttccagaacttcccttgactggctccttcttagaacccaggtctcagcccagataatcacatctcctcagagaagccttccttgacacccagactaaaggagctcttcctatcacttccctctgctctatttccattatcacagttgtcactgaaattatcttgtttatttttgtgtgtttcttatgggtctcctccactgggaataccattcttttcacattctgaagatatcatagcttttgtatttacttgcttcttttttctcctatactagaatgtgagctctaggaaggcagggattaatggagttcacagctccatccccctagtttctcacacagttctagcatatagtagatgtttaataaatatctgttgaatgaataattgaatgaatgaattaagagattgaaaatgtgtccacagagtgaaagtcgacttggggaaaaaagtgagtgtagtattggttgtcattaacaggaaacagaatgcagacagggaggatcaaatctgcatggattggatcacccctggattattgtacttggctttcaaagttacactgccacaaggaccaacagtgtggacaggaaactaaccaaattggcacatggggagaaacttagaaaaccagaggtggttagcttatagagacaaaaacattctgggaggaatattgttgctgtcttgctgtctttcactatccaaaggggtatcgaaagaaaaaagacatagatttggcttggagtactaagggcagaatccagatcaatgggaattagtttgatagagacatatttcagtgatagaaagcaaaaggtattttgagggggttcatagcaagggaaggggcagcaaagggaagtggtaagctccccatctgataaactgtaccaagtggtacaagtgcaccacttggcagggacagtaaggaggggattcgagcagcggaagatggcttcaaaaatctctttcaaatttgaaatgtctaggttcctatgataaataggtgcagagtcaagaaaaacaaattctggccaaaaagaattgtagaatgcacttacctatctaccacaatacaagaaaacaccaccaaaaccaggtctacaaattaagcagcagaaagaccagctgagagatatcttgtgcacctgaaggcattctagaaatagtaagaacagctccctggcttttcactctgtgtgtgatcattcagtatatgggactcccaactattttgactattcaaagatgccccagattctaagacaggacagccgacattattgcctcagggccaaggcggtcttgggtttcatttctgaaactctactacttcctaactgtaggagcttgggcaaagaaattaacccctccaaacctcagccacgttatctgtaaaagtaatttcacttataaatggaggggtggaggtagcaattgaaaccagaatggcacaatgtgataattattgaaactcagtgatagacacatagatattcaccatattattattctatgtgtttgaaaatttgcataataaaaagtaaaaagagatggaaagtttaaaagagtacctacctcatgcaataattgtagagcttaaagaaatgatcacatctgaattgcaaggaatttttacaaatctgaattattaccataaatgtttaaatatcccatttaatcattccaacaaccctacaaaatgtatagtattaatctccatttggcagatgaggaaaccaaagtttagataaattaaagagtaacaaattcttcaaatggcatggggctgaaatggaatctgaaaccagagttatctgactccaccagcacaccgcctttattttaagaatagctcattgtgttctatttggttgacaattaggatgtcgtttattcgtctaagtcattggtttcctatctcttttctcaatagcagaaacatgtttttcaaattcagccctactcagaactctagtaagtaaaactgataaaagctaaacagctctggctgaaatggattttggggcccagcaaccagcccacttgactccacagtgacccctgaagcaccttgaggtatatggagcatagtgtgaaccccagattgaagccaacaacaacaaaaacaacaacaacaacaacaaatcccaacctgaagaagtacatgttaagagcagcctgatttgtataatgcatctttcatttccctgtctcccatcacattggatcctcattatcaactctgaggtagacaaggcagcacatatcaccctcaatttgcaaatgaggaagtaaaggccaaatggagttaagcagctggccaaaggtgcaccagttcaattttcagccaagtgcagactggaagtcgagtctgtctccattaactctgtgtgacctggcaaagaggatgccatctactggaaattgctactgacccttggtccacaaagtggacaatcagcttcttggccattgagagcagagcacagccccatgggccctcctgccaaggccctgtcccagagcagatggcaatgagcaggggagaagggctcagtgccactgaagggcctgacagcaggattttagctgtagatgggccattcctgtctgagccttgtcatgctgagcacagggcagggaggcaggactagccaaagtgccttccaccttcatctgcagtaagtaaatgagcccacagagggacagcaggtagtgtagagctgggtgtcatttacactttgcttttcttcttagctcttgcttaggcatccctgaaacccgaggcagctgataaatgcctgaatggctccccaactccagagcatctctgaactgagctgtagcatgtgttggagcaggcaacacttaattatcggttagtctttaattagctcttaattattaacacttaatccatctgtaaaatggggacactaatacctgcctcacagggactctgggaacattaattaagtttacagtccactttgaagatgcaaaacgtgaaataagtaagtgctcaacggcggtattaataaccacagcagatttactttcttttcctaatttccctttttcctctctgctccttcctttcctttcgaatatccatcctcaacaatatctgcccaactttgccctgatggagaaacacttagctctgtgtttcccagacacaggatttcccatcccggaaacgggctatttacagccatcttcccgcactttaattttctattatgtcctctgaatatgtcagtgccttcccagtaaatattttgatgtgtgctcttgcagcagcttctgtggaggctgaatgggacagctgctccctgtattagggaattccagatgtgatttaaaaccatcagactcatccatgtgaatgcctagcctttaggtgggagaggggaaggatcttctagttgcttctggggaaagccacaagccatataacccttagccttagctagggtggtttttcaaggacctcagattcacatgcgtttaggatgagaaatgtctgcttaacgggctggtgaagaggcagcctggaatatagccctaatctgactcttcacccacaaaacttcagaactttggtcagctcttctataaagcttggacaaaggaccatggagggggcaatatacagcctttagggtttcaccagcctcaacagtgggccagaacattcccccagaaggtcagacttcatctcctccctcctcccttgctgccaatggagtaggggggtacttactcttcttgaaagctgagctcattgcctcttagagttccaaccacagggacagagagctgctccatggaggtccagggctgtgaggcctcaggcaggccttgaactctcttccagatttcatggcaagtcttgtctaggctgtcttggggtgtgtcctggtggatccagatgtatctggggaatgggcccagggcgcaggggcccttggccaccagggccgaggatgaaggaagcccattcccgctggccatcctcctcctctctttctggaagcccctctgtccacccagggctagaacacaaccaccaccacccctcattcaccagaaagggagatgaggatggggcttggcagaagtgggtcagttctgtctggctttcgctccagcaaggtggttaggttcagaggccttctatttgtgtgggaggggtgggtggaggacagctttcttttggggaggggagggcttattttgatttgtttttatttgctctttcctgacttttgcctccctccccctctcccttagaagaaaatatttaaaagtcaacaaaaaccagtagcttaggaacagtggaatgctgcggagctcaggaaccaggcgcctgggcgggcagaatgacatctgggaacagctggaaggggagggctggctctccccacagtccctggcactgcccccttgcgacgccgccgtgacaactttcggcgcctgggctcagcccatgctgtcccgctaagccacgcggaggactgggtgcgggcctggcaccattgtaggcactcggggggcggggccccgcaggaggcgctcgcctgggcgttcccagggagcccctcgcagagcgagcgtcaacggcccgactcccacccccggcccaggtcctgcttttctctcgccctacccctcctgctcccggtctcccgctgctgctctgctgcccccggaaagaagggatgaggcgtgtgtggatgggcccacagcccttagtccccggcccccagcagacccctgccccagccgcgccgcgctgccaggcgggcaccgggaagggcccagcggctcaagagcgcgctgactcggcaaggcaggctgggccgggcggctcccaccaatttgcctgccagtagctcccacaccctcgccgtcgtcgagcgggggaattctttctgtgggtttcaaacgcaacggctcggtgcgcggggcgccctgggttcggagcccaagacccgccggtggggtgggtgggggtggggcccaaaggaccccagagcgcttcgggggatcagaagtcaaagccaaacgcgccgccgccccacttcgccgctccacacaaatctcagctcctgcctgggggtcccccggcaacctcgattttaatcctaactgccattttatggggcgcttgccctgtgccaagcgctgggctcacattcaatcctattaaagctcgtgaaattagtaccactttttattatcgttctacacgggaggaaagcgaatctcaaagtcataagggattgcgtccaaggccccctgagaaaagggaagctgagactcagaccccagcactctaggcctgatctagcccttgaccactgagacagcttcagtaggtgggtaggagcaggagtaggaggtccgaggtgcagggagaagggctaagttagctgtttgctgatcaacaggcccctaccctcactgaagcggcttcattcaattgggcactgacacagtacctctgctgagggagactttctggttccgagagtcagggggttgcttctctagcaattcccctgaaaaggaaaagcaagagggtggagacggaagaaagaagaatggacacaaatagaggaagatggcagtctataaatgcagggctgggttgaatcctgacactcatttccgagctgtgtgaccttaagaactttctgaacttctcccatccccattcataattcccccagtactgatgcaacccctcctctgtgcccgatgagttgctgggcactgaagaagcataagggtgggcaaaaatggcatggtccctgctctcctggagcctgtatactagcgaggagagatcgatgcaaaccagccaagcgagtaaagcagcaataattacagatgcaatgggactctgatggaaaataactattaggttggtgcaaaagtaattgcggtttttgccatcacttgcaatggcaaaaaccacaattacttttgtaccaacctagtaacaaagtgaggcactggggagaagaggggaggcaatattccatggtggtccaggccgacttctttgaggagaaaaatttgagaaggatgagaggaattccttttctgtaaaatggtgttaataaattatgaggatcatgtttctggcacatagtaggcactcaaaaaatatgtgttggatgaattaatggtatactgtatgtaaagtgcctggtatacagtaggtgcccaatacgcaaccttgctctttacagaggggctgagttcctggaaatgtttactctaaattttgaaatctgagcttcattctcctttgattttcattacaaaattgaagatgtgttcctttggggaaaattctgagggcctagactgaataaaattatagttaagaatgtagaaaaccttttaaaatagtgtatttaaaggaaaagtgatcatttctgatgaaatattaatagttctgaaaatgtcactcagtgtttgtgctgcttggcatttggttggctaacaccttaagcttagagcagaacgccaacgaccctgcactgcccaggccccaggattctggaagttagccagctcactcactcttcctgttccctctccccctcagcaggagaccaggcaacgggggctaaatcagaaaggactgcaaaaaaaaaaaaaaaaaaaatcaaatacagcagggatacggaacaaagatagagcatgtttttagagtgcacagacgagatttctagaaaattctgcaaaaatcttaagtgatgtacttagaaatagtataaagctatgtccatatggtagccactagccacatggggttgttttaattttaactttatttttatataaattaaatgaaaaattcagctcctcatttgcattagccacatattatgtgctcagtagccacatatggctagtggctaccatattggacagcacagagaacatttcttatcattaaatacatattctcgggaaccagagtccctgggttcagattctgagttcacgttttctggcaatgtaagcttaggcaagttactctgtgccttggtgtattagtttggtagggctaccataacgaagtccacagactgtgtggcttaaacaacagaattttatttccttgccattctagaggttagaaggccaagaccaagatgttggcattgttagtttcactctgaagtctctctcgctggcttgcacttggctgtgttctccctatgtcctcacatggtcttccctgtatatgtgtccctgtcctaatcactcctttaaaggacaccagtcatattagattaggacacaccctaatggcttttttcttttttttaatcttagctacctctttaaaggactcatctccaaatacagtcacatctgaggtatttggtttaggattgcagcatataattcagcccacaacatttgatttcttagtctgtaaaatgggatgataatgaagaatacttgctttgtagaattactacagatgttctattactaaccaattgcttaacacatggaaagtcccttgaacaacaactgacagataaacgtgttatacagttgtttgcttgttgattacactgaaatgcatgcctttggagtttctgaatagcagcttttgtgttttgtgtagagagggagaattgtgttgtactggggaagttgttctgtgatggagaaacgaattcacataatcacttacgcctttccaggctttgttcatttttgagcatccatcatgggtcaaaattgtgaaagacacagggattagagatgatgaaaaagatgtctaccctagacagaatcacctagtgacagaggcggggcaaagcattccataagtgcctggtgcagagcagtgtgatataaactgacttattccagtttccatccaacatggagttatgttcctccaacacatgtatctatgcccagcactgtttgaggtgctgaagatagagtagtgaagaagaggagtttggtctctgtcttttttagagtttaaagtgaagcatttaatggtcatggacaccatttaatctgtaaattatttttagcttggaaaacttcttgaattccccctgactacttacattaccctgggcaggttggtttaacctcaatgtctccatttgctcatctatgaaacagagacaataaaatactgacctcatagacttgttttacgataatgaaataatacatgtaaagtgcttataatagcttggctaatgtatgtatccagtgaatgttggctatcattatttagaattctgggattcttagcttttctctgtggaaccaggaaggcctaaggaggaggcaattctccttacctcccatccagtcaaagcctcttctcatctggctttcatctctgacacaaacatggctaggctggaaaactcagaaacgtgggaatggcctaggctcttttacaatcatcatatagcccctaaggctgcttactcttgtaggtccttttaggttcctcatctaacatattttaaacacacccacctctcaccataaaaataactttttggctatagaggaaaattgaaaggatttttgccattttgcttttgaaagtttttggccatgagtaatttatttaatttgtgatgggctgtgatttctcaccaatcttagtgcctactcgagaaatcttgtgcagtgagaaaactccaacctacaaattgttaccaaatgcaatgaaatttttatgactactaaatccaacagttaatgaagttgacataatgttatactctgcatttaattaaatatttactgatttccatgtggcagttttcttctttgtattgtgggactaatcataaaatatttaggactcaaacgcttttgtaggtccctaaaacccagagggacccccattcccatgcgaataatgctcaatgggtcaaactgcccagaggcaggatccatgcataggagtatcccaggcaaatatcttggggaattaaccatcacagctaaaggaagaggaggttgcagccatgtttcatgggaatgggcctccccctcatgttgtctcagcaacaggacagggctgcagagcagccagccatttctaggactttgaaaaggaaccttgaatattctgcaagcaaagctgtgactctgtggcttctctctcctggcaacaccatcggtgatctctgccatttcttgggggtttttcccttactattgccttgttccttgcccacatgagaggaggcagttaagagctcgggtggtggcagctgacacacttgaattggaattcctactctactacttgataaaggtggctttgtatatacttaacttctctgacatttcttcatctgcaaagttgtaaaaacaataggtttggggtaggaagaaggtttaaatatggaaatgcacgtgaacttctcaacacagtgcctggcttatggtaaactctcaataaaaagaaatgtgtaattatgattatcactagctattgttattgagagcctagcaatgtaaaaatggcagcctatgagatctccacttaaagttagggaaaaggaaggtcctagatgacagaataaaagaatatggtggtggcagtagtggtccagtgaggtagaaacaaagtcagaattcagctggctttcctcctgctttggtttttctgccagaccccagtagtgataggtatgccaaggattcctggcgaggccctttatgggaaacccttcagctagaagctttatattttgcccttccttccatagcttccatgccgggacattggtcactaaaatgcattcacttaagacttcttctaccttactgctgagatgatttgaggcagctttcagattaaaaagtacaaactacagcatcaaagaataaaggaagaactgactctaaggaaaacagaaacagttgctactttccagcacccgaactggtcaggcctcatggaggtaataaggcaataaaactgggtatccttatttgtcagctaaagcaaaaatggaaacacgtcgggtggcagagtttttgttttctgacagcagaaaatacacatcttcatctgcagagacaaaatgtttccaggaaataaccccaagcatgaatttatcatgagtccttgtataaaggacactgagtgacatagtgggcaatatatgcaattctgttttcataaaagacagagatgctgttaggttcgtcagtttctcgcatcagggttctctgaagacagcataacattaaatcataactcagtggaggcatttctttaaggaactcaaataatgaagtctagaagagatacctttgggtccattccacaaacagtactgagcacctacttaaccatccattcatccatccatccatccatctgtttatccattcatccagcaaaaattccctgaatgttcaccatgtaccaggcactctgaatggcactgacaaatactgcttgtaagaactgtcacctggactgaattttgaagggcaaataggagaaggctagtcacagaaggagaagggaagctttctaggcagagagaacaaaacacagaaggatccaggggaaaggggagagaaagcatggctcattgcaagagtgcaagggtgtcagaatggcttagagctgagggatttgggaatagggagatctgaggctagaggggctggcagggacagatgatgggggctcttgtagggagggtctagcagggagcttggattttactctgtaggccataggggaaagtccggggaagacagaggagctgtgaaatcaggtgagtgttttaaaaagatagctggtggcagagaggaagatgcattgaatagggcaagagcagagatgggcacttgttactcagttgttgtaagtaacctgaaacatagccattgtggactctggttagaatctgggaggtgtctaggaggcagaatctggagggctcagtgatggcttgatgtggggactgggcaagatgggagtccaggataaataggtttctggctcaggatctgggtggatgtggaaactgttccctgaattggggagctgagcagagaggcaggctggggtggagaactagaagtggataagcccaggtctgagcaggctgtggtggaaggggtggggtggggctcctatgagacatctgaggagagagaatgccagatacaatacagaccctgggacttgggagaaaagaggtttccatcctagagttgcccatccaccagcagggacaaataagaaagccagcaattatggagagactgttgagtcagaagagaggtctatttccaccccacacccttccttggtaccctgtgagtgctgcagatttacacactgtgtcctccctccctgagctggcccactctgtgctttcttcctagaaagtgctggttctcacctgccctttcccataggctgagctaggagcccttcttatttccatcacatgctatatctcttctggagtaatcaatcatgctttgctgtttaacgctgttctcaataaactctcaaccccctgaggacaggggccatgggaatgtcttattcttctttatatttgtttcctcaacacctagcacagactctgacatgcagctcagtgtggcatgaacaaatgaatgaaagagtaagtgaagagtaagtgaatgactacacaagatactatgcaaaaaatgagcaagcctgcataaaagtattgctagctgctgtaacaaactccaatatttcaatggcttaacaccctgttttgtcactggcatgaactctttttccttatacacaaatgaagaattttcaccaagaatgtcagaatttggtgaccacagcatgtggtagcactagaggaatggcctaggctgtgggccccttctcacttctccctcctggtttcagaagcccacagcctcaccttggtgtggtctgggctttttcctcatgaagcccctctgtcgccactccttgggcagcagatcactgccacctctatggtgatagcctcgcccttgggagatactcgctttggcctgatcatgctcatgattttaaaattgtgccccatttgggatcctaagcttttcctctgagcccatctttgtcctgtagcccttctctgcagccctgcctgccccttggcctctatttctgccctcgcattgctagaatctcccatttgctcactctctctctctctctctctctctctctctctctctctcagcttcagaaggctttttgatcttttcctgggtcagaatgaaaatttcagggcatcaagtctacagctcctccttgaatgaggcagagttctccagagcatcaggccttgtattctttctaaatcaaactctgattttatctggatattaggcttatcttggctagtcactagactgcattgggcttttttgcaatgtgatattgtaaagacacctcaacccacgactgcctgttgctcacagggagaatgagaggggcaggcagggagccagcacttggggctgggctgagacccacactctcctaggctagatgcgggtaggctgttatgtctttgactcctgcctctccattgccctgcagatgtttccagggtccccatctctgcctttgcccccatgtttcctggctcagactattgcagtagtcttctaagtggtaccctttcctttcttaccctttcctcacagagaagttagagtatatgtcaggccacatcacttggcgtctctttcccagaaatgaaaacctacctttcatattcagagctgtctacttttcactaaaggagccatgctatacacagaaaataaatgtaaacagatatctctttacatatattttctgactgtcaagcatctctctcctccctccatctgaaaagtcatctcctcctgttatagaatgaattgtgtgcccccccacccaaattcataggttgaagtccgaacccctagtacttcaggatgtgaccttatttggaggtagagtctttaaaaagtcagttaagtcaaaatgaggtcattgggttgggccttaatccagtatgactggtgtcctgattagaagtttggacacagatatgtaccatgggaacacatgtgaggacacagggagaagaaggcagccatctacaagccagagagagaagcctcagagggaaccaactgtgtcgacctcttgatcttggacttccagcctccagaattgtgaggcaatacatttctgttttttaagccacagggtctatggtactttgttgtggcagcagtcctagcaaattaatacaccttctatttctcactggctaagaataaaatgcaaactcctcgccatcccctaatagaccctatgtgatctgccccactccctatctcccattgcttacctggatccagccccatcctcctcctcctggccccctttcctttttacagccttgcctgtgctcactataccaaaagctctttccccaactttgcatggctgccttgcttaattctattattatattaattaattaattaattaattcatagacagatagtctggctctgtcacccaggctggagtgcagtggtgtgatcatggctcactgcagccttgaacagctgggctcaaatgatcctctggctttagcctcctgagcatcttgcttaattttagatcccatcttccaccgttgccatctcagagaggccttctcagaccatctccttaaagcacatccccatattgtttctcctagcaccataaactttccttttgtagcatccttaattagtaactttatgtgtatttgtatacatattttctgccttcatcaagtcagggactgtgcactaggtgtatattcattgtctagcacagcacccaggcacataatgatgctcaataaatatttgttgagtaaatgaatcttcatcttttcaaggtctttatccatgtctcaggttccagaccaaatcctactttccttcttaaattagccttctgatcccccaagtccaggaaaagctcactgtcttgacatgcctctcggtagcatgccggttcttcagtcatggtgattatcgctgtctgacggtatcagttacgtgtgggtttccacctctggcctgcatcctcccaaagcaggaccacacactgtgcatctctgcagggcccagagcacagcctcgctcagggcccccgagcacaggaggcgctcagtgaaagcacgtggacccaaatagatcagagagcaggaatggcggaggatgtgagtaactgggccttttgcagggataaaataggtgccctgccctccacagcccccagggagaaggatgacaaacgctccttttgcccgggaaagttctgggggtaaatctcatctgcccgttgcagccacagagcaaagttctggagctgagaagagggtaagagaaagcccattggcctgcagccccagaattacagagcagcccagactctcttctgcccagctgtgggctgcacaggaggcctgggcatctctgccagttcctttctctggaggagaaccccgcctccaagagaggggtaaagtcggagcttagaagccaggagcccacccccaggcaagcccagctaacagcccccaaggccaccaccaccactcactgctggcgtagtcagtcccttcctcctctccagggctggtgggaaggctgagccctctctttcgggggctgagtctggacaatgggaagggagaagccccctcctcactgccccgggaacataaagcaggcctttcactgaggagttctggctgcttcggttggttcttggcacccagcaaggcggcgtcgggaggggcgggcatacaagcgtgttgggggtggggaccaggcccgcgattctgaggagattcgcccgcccagggccaccgggctggctccccagctgtgggatgagctcatgcagggaaaccggaacaacttggggtggggggagggaggaagagtggcatctaggaggctgcgaaagcgtggctctggggaggaagtttttcatggggagtagggacaagcctccactcctccagccctgcccccgccccccaattcatatcgtcaactccacagcccctcttcacacccttccttggatggaaattcctggccacgctgacagccggccaacctgggtcgccagccacccccagcctggctcgccatccctacagtccctctccacacccttccccggaaattctcaggccccaccgcccgccggccactgcccccttggccacacagatgccaacgctccgttttggccaaatcaggctgccctaagcccggagcacagcttctctggggtgtgtcggcaaagggggcgggggtgcccatcgcaggtgcctttccactgcacgcgccagcagaagcctcctctctggaccttgcccctcccagtttcctccagcctccccccatgaagcgtctcttccctctcgccgagagtttggcgtagacagcgaaggagccatcgtgactggcggagaagcctggagtagacgagacagagacggcgaccgagtcgggtgggggatggggtggggaccgacactaagcccttggggcctagaggcagccgctactggggagaggtggggagcagctcacgtccttgggaagaactctcttggtttggggccttggctgggaggaggaaggggagaagaagaagtaggatccgattatttaaatttggggataaattgtactagtaactcttgcaccgtccttccaccaacctcactccccacccccaactcgcgtgcacacagggaccgcctctgccaccctgagatttttgtcttagggtaggagtgggaccgcactgggtcaaatgaaccggttcccccccctccccaccccacacacaacccccctccaccgccctccaattcttaaccctgcctctgtctacgcacacacgcccctctcctgggatggggtaggaggctattgtgaatgaggctcataagcatcgcccccggccctagatggcaagttcaaagccaccacccaagatcagctggtaagagccaagacttggggaacgcgtccttctttggttaccttttcccagacaggattccaatttccaaacgtggaagaggtgtgcgtgtatgtgcctgtgtgtgtgagtgcgtgtgtctctgtcactgtgtgtgtgtgtgtgtgtttgtgtgtgtgtgtgtggagaggggggtgtattaatgggtgatgttataaatgaaaacaggaggactgaacttaaaagaaactggtcaattgcaaaacagacacggataaacaaccctttagatgtaatttgtggtttatctggaggtggaggtggcgctgaagaggaacccccgccccccaatattttatccttagctgcgcctccacccccagcatttggagcggcggagaagcggctccggagtgattaatccggggataattcaccccctcccgccccccggcgcgaaccccgcgaagcgggattggagcgagtcatttccgagagcgcagcgcgcctctccccggccgggcggacacttggttcattccagccgcagaagctcagggctcccgcgtaccgggattttttccgagcagaaaaaagctccagagctctcctgacctcctttctcctcggcggcgagcggagcctctccctcggcgctgccggccgcgccatgccgcgctcgcggggacgggagctggggcgctgcggctgccccgcggggagggctcgcggcgaaaccgggatttcggcgcttgtgccgggcgccgggagccgctggggccgcccgccgccgccaacgccgccgcctctgctgctgttgctgggctgtgggttgctcagcgtctcggccgccgcgggtgagtccagccgcgccgaggagccagcggccgccgcgcgccccacccgagccccgagcccacccatcctcgacccggtcccagtccctccccccgcctctatccctgcctgaatctcccaccctcccagttgcctactctcattctcatccctgcctccgtctcccaccccaccctcagccacgtcctcacctccaccctcaccctcactgctgccccaaccccagccgcaacttggacggatgcggccggtgtgggggcctgggagacagacatccccgcccggggttgcggggcacctggtctgtggcttcagtttctccagcctcccagcccccacggtgctaggctttttcccgataaactttccgggagccctactcccccggctcctgattctgccaggcacgctggtcctgggggctggagaggaaccgtgcgccccctccccatttctgcgtctgcaaggtctgcccttccctgcccccgcccattttctccaattgaaaccggtgccccctctggaaccgactgcagactgcggccgccatccccctcctcaaatgctacccctccctcggcgctcggagctaggagggggttcaggtggacgcgtgcccacggtgggggtcccgcgcattccttgcaggagggtgcaggtgggggctggagggtgttgagggatgggaaggagggggtgggggttgtagcccgaggcgggggagggagtgccgccgccaggcttcgcgctgccacattcccctcggtgctcactccgcgccaaagtgccctttcccgcgccctgctgcagccgagcgcctcggctgcggcagcggcagcggcggcgcgggcggcgggaccagctcccgacgaccgagtccgggaaggggcagatctagcgggtgcggagagtcccggaacttcgcgggtgtctggctgcagcttgcagcgcgcgggggaggtacgcgaaccttcgagggaacccggtcccctgtggaggctactggccgcgactggtgccctcccgctttacccacagcacccctccgaagctcagttctagctacaagctagaaagttccgtgtgcccgggtggagacgggtccaaaccgggatgcctggaaccgcattttcatttagcccgcgaggctgacacccactgggggagaaaccgaaacacctgctggccaggcctagacctagggcaccttcgacctggagccgtgttttcttttttgtttttgtttttgttttgttttgttttgttttgaaaccaccgattgaacctctgaaggcttggcctggaccaccccagttccccttcttgggaaagtgcgcctctcctctggcaggtcagtgagtggcgagctctctggcccactctggccttcagcgtcttgtgagtctgtcctcgcagaccgtgtcgcccaccgcttaaccgcggcatgttggggttcttggtcagggagggcgccccgagccagctctggctctctcattcctagctgacgggactttcttaggttctgctaagagtcatagccaccgacacccagagaggggcgcccgcggtgcgcgcgcctgggagctctggcctctcgcacacccacacccactgggaggctgtgcataccgacgctgctggtcacccagacttgccacatgggcggtgggggaatcgctgctacctcccgccaggcctcccggacgtacgttgaggcgaggccggtctctggcttagctgattggagaatgtctcggcatcggactgaattgtttttctggctagatttgtccctgccccttgggcatatcctgcccctaggggagagaaaaaggccgactcaccggcgcttgcaccgctcagcggtgctggaatcctgccctatagagatccatttgctcgcagctccttgctcagtagagaagttgcggggagggggccttgtgttcatggcttggggtagttcctctccggcaggccctgctctggcttgcaagcttccagtacatttcttttcttttcttctctttctttttaaattttttttaagacggagttttgctcttctcgcccaggctggagtgcaatggcgcggtctcagctcactgcaacctccgcctcctgggttcaagcgattctcctgcctcagtcttccgagtagctgggattacaggcgaccgtcaccacgcccggttaatttttgtatttttaggagagatggggtttcaccatgttggccaggctggtctcgagctcctgacttcaggtgatccgcctgcctctgcctcccaaagtgctgggcttacagatgtgagccaccgcgcccagcccagtacatttctttttaagcctttcccgcctttagatgggctgtttggccttgcaggcagcagagatttggaaatggacttggtgacagaagatcggcaggatttggtacattagaaggggaaacacattcattttgtgttcagttcacactgttgaatttaaaagatgctcaggactgaaccgtctcccttcctcggctcagtgatcactggataaatgaataaaatagtttgaaaaaggggagtctcctcacccacccataccttctcccctcaacccctttagtccttgtcctgccttgcactccccctccccctccccaccccagcctccctggagacttcccaccaattacctgctgtccctatcaatcatcctcccttttttttttttttttttttgagagggagtttcactcttttgttgtccaggctggagtgcaatggcgcaatctcggcttgctgcaacctctgcctcccgggttcaagtgattctcctgcctcagcctcctgagtagctgtgattacaggcgcatgccaccatgcccagctaattttgtatttttaatagagaaggggggtttctccatgttggtcaggctggtctcgaactcctgacctcatgatctgcccaccttgccctcccaaagtgctgggattacaggcgtgatccaccgcacctggccaccctcccttcttaaaacacatttccctttgacctgtgaacaggctcatctttaccacaaaacaagccaagaagccttcttggccctattgacctatctaagccactgccccatctctttttgtcttttagtcacttctcttcaaaggggtcttcatgtcagttttctctactacccgtcactccttacttcaacctctgtctccaggatgacactggaacactctagaagagagcaccaatgaccacctcaattgccaaatacattgtactttatctttattttcttttatctctctgtggctgtggccactttggatgaatttctcttccttgggcttctgggacactatgttttactgatttttctcctatctcttgcgtgttccttctcagtctctaatactaacacttattcccctccctgaagtatagtgtcctgcagcatttaattctttgtactttttcccattccttttcaccactctctgggtgagctcatccttgcccaaccctttcactaccacactctgaagcttccagacagatctcttctgccaagacatctctcctgaaattcatctattggcttcctggtccatgggaattctgggtctaggtaacccatgtatccagctgatccttggacatcttcacttagatatttcccttccagagcaatcttattagcttctttcttaagcctcccgtatttcctttgtgagctggtggttcctgtagcctcccagttatggagcccagaaacctttggattatcctcaactccttccttatcatatggtcatcaaattctgtcagtttcatatcctcaattattctcgaacctagctactttccttgaggagctctgagcattgaaaaagctatcatgccttccactcccttactaactaatttttaaaaagcaatattaaactataagtagatagtttaagtagatggaattctgacaaagttctgatttttcccgtgccaattacatcatggctttaaaaaaatcaaatgccaaattaaaaaaatttcccctgctttgtatgttgtctgagtgcttgcttttagtcagcctcttgtagactagagcactgactgtactcaatgttctactgtagtacaaactgaattgtattaaaaagcatttatttgtctgccttatatattaaaatgtgagcttactgaaggcagggatggtgctttatttctcttggtatccccatatccagctcaggttctggcatagaattggtgcttgatgtatggctgtttgatcagatgatttttacagttttctttttcttggagagttttccaaggactgataagactaaatcgggggtcaaggaagccagctggtttgcagaggtaataagatgacaaagacatctggtcccctgttcctttccccacaactaagtatcaccgtttggttacagttccctaggttctagaaccaatgcaacaataagcccttggcataccactctcctccaaccctgagccaaggaaaggcgtttcactactcagtcaccagtgtgtgtatgaatttgaatttccatttgcaatcaagctgagggtttatggtttttaaaaaatgagctgactgcagcggagagtgcccaccatatctagggctggtgagtgtgtggctttgttgaaggtgagattagaatcatgcaccagggactggaggaccaaattgcagggtcttggacactgcctggtttgggtttctccggcagagcccagcaggcagcttcagcagcacccccttcaccctcattcatgtgcctgacctgcctgtttcaccctcatcatcacgccagcaggattaagggaacctgattgctccgcagagccttgctggagacccagctgatcttcaggcctctctagggctcagtctccctgctgtaaaaaggacaagtaattcctgagtttttggaaggattagaaaccagagatgcaacgagtccagtgccatacctcatcgaatgtgcctattaaatagaagctggggccaaaggaatcagccaggaagtctatgtgccctcaccatgtccttccccacctaccatgctcagagagctgttctggacacccaggggagttataataacagctcatattcactgagtactcaccggcactgtcttaagcacttggatgtattaactcaatcctctcagcaacccagtgaagcctgcagtattattattcccatttcatagatgaagaaacaggttcagagaggacacataacttatccacgcactaagtaaatagccgagccacagtttggatgcaggcctggctgacgccatatcttttactcataaccttgttgccattcaacttcttggggacccagctggtaccacgtccctggaagcgtctgcccaggctgccttctttggccttgctcttcccactgggctgtcctcatcagttatactgtgctgcttttgaggcctgaatcccacacttctaatcctcaagcagctattgtccattcctttccaccacaagctcctgggtggggggggggcaggctgtaaagtcattcttggtttctagccccaaacacccatctagatggaactctactgtgggttcttacaactcctcacatttcctttgttgtcagagtcatcaggacatattggaatttcttgcttagtgaggtggttatctgtctcatttccctaaaggactgtgaactgaggcagggcagtgtagagcacatagtggacactcagtaagtgtgctgatgagacagtcagagctgatgagacaatcagaggcaggttgtttggagcccagggctccctttcctttagaccaccctgttgggcattcccaagggcagctgggggctgggaagactggaaacgggttaaggggcatcttcaagtaggaggcagccccaggcccatctgcacaataataatagctctcctttaccgagtgctggttaaatgctttgtagacattaccatttaattatcactgtaatattgtatttgaagatactgaggctcagaaagtaagcagctgggccaaggctgtagagcaggtaggtaaagaaggcgggattaaacctcaagtctacctgaccctagggcccatctttttggaaagcccttgttacagtgctgggcccattgttaccattcaatacatgttagatactattactattactacaactacggtctacttgctttcagcaccagcctcttagaaatataagagaaacaattcatacactctgccactctctggcaccactatacccagtggggggagtcttttctctttgctcctctggctgaaagcacacaccttagaacctggtcccctcactcaacccatcaacccagctcagtgcccttcatccaggagggtagggagggagaaccctctacctcgagaatgcactgcattgccctccctggatttatctccttgggtggcatatggccttgcacccctcctctccatctgctgcagtgtcgtgagagcttccccaacaacaggggaacatcggggtgaacctgcaaatagaggattatttcagagtctttatgcttacaaagactctgtctcagggttcactcgctttgagaagggcttggttttcccttggacccacagaaagcaaagagtgggctatgcaacgtgggagtttctctacttgaaaatgatggcgtggctctcagagctcttttcttactcttgtaagttaagagaaacaaaggaaactcatatttatttttcccctggactctagagagctcaatctcctggactgtcttttcatactcctcttctaaaaatgagattctttatcttcttttcttctctcccacccaaacacacacttagttcttagagctttgggagaaggtgagacccctttggccttctcaggtagcttaatgtcacatgaaagatagtcatgacccactatacatccacaaatgtgaactttagccaaacagcagatgagagggaaggagatggagtggaacatgatggggtgggattggagaaacagcctaatttgaggtagactgagctcaagtaggaaggtgtaagttgggtaggatcaaaggtgggttgggatgtgttggcacaggatagatagagtgagacaggtgatggaatggaatgggataggattgagtgagatgtgatgtcggggatgggatcgagagggtggggtgtgcagtattcaggggattgactgggatggggggtgaggtggggagggaatgtgttagaagacactggggtgggatgggataagatggggtgggtggagttggggtcgagtagaatggaacaattgggatatgatggaggggaggtgagatgtattgtggtagaatggcatgagatagaggtgagtcagatttattgggatggtttgggttggttgagttggaacaagagactgggagataagatggggttattatataaccaattgaataggcaccaactgagtggacatgaggaaatgggaagtgagggagggcactggaaataccttgacccgcctcacattgttgtagcatcttcatcttcctgaccaggactttgtgaacgttggtcagtttctttctcacctgaattgtgaaatttccagcagacataaagtctccattagcctttggtcccataaagcatgaatcctaaaatgctggaggctcccttttcctgccataagggatcattcttcagggagaccctgggagtcccatgtggccaccaccaggaaaccatccgaaaaatatgcctggcacaaaccaggaaccccagggcagctcctatcaagtccaccatcagagaaagacattgtgcctaccctagagctagcacagtggctccactcacagaaaggaaagccgaggatggagtaggggtttacctccatggccccctctgctgggcgagtctctctcctagagactctcttactttccacctgtttgtgtttgtattgttggaaaattttaaactgaatttgtctttcaagggatgtcagtcccacccttgaaaaatcattattataaggaacttttatgatgctaaaaataatgtatgtatagttaaattactgagagcaccaaattactctgagaaatttacttgagaatctcctgtgccatctagaacagaaaataagggcttatattgcaacacaaatagccttcctacctgctaatgtctaatttataccaattaagtgcaattataatccataaacctcaaaaaattatgtgtccatcttcaaggttttcaaatagaaaacagaataagttctattattaagtaggtacatctatttattgattgaaagtaagtgagtgtgacggatgtaactgtaaagggaaaaagcagagactttgaaatttgagatacaagtatattatgagagaatgtgcagacattttgtgcagaatgattgatggccctttctgagatgagcaagtgtggtagagtcgactcaggcctcgggaggtttgtcttcaggttgctgcctgaccccaaccctttccctaccccagcctcaatctgtctacctaccaaccttcattgcttcctccattgccatttcaggaatggagagagttcagtgattgggtgggacttggtgatggtgtgtggacttggcagtaagaaagagatgacagtttaatggtttattttcaattaatgctaaaatgttcctagcacgaaaacagacatctcaatgttggcatcccctcctgccagggacctatgtggccctatcctcctggccttatcatatgtgcattcctagaagggctgactcatagcagatcctcagccaggagaaaggccttgtttggcctaggagtcaggaattcagccttccaggcttggctatgcccctaaccacctatgtgaacagaagccaatcgtttcatcttcctaggcctctattttcacacctataaaatggggataataatacacagtgtgtctatgcaatgatggacttggaagctctttaaaaaagaagcgtccaaagagaagccagagctattagaataagaccaaaaaagtttctagtttaagcccatccagtgggagatcctgcccagggctcgggctgcttggctttccagggatggggagctcacgacctctgcagacagcttgccaggctatttttcaggtctcaggggtgagaaggagggtgggcttgctgagcttcttggccttgatccattcttaccctccagtggcctgtgggactgctcctgaaaactcaaaagggaagaaacaagccatctccatccagagcccatcagacatcctggtcacagccttttccccaaccaccacccacccctgggcagcagcactgtgagttcagtctcggagagttgactgcttgggcttcactctcactaacacattcgtccagggtaccagatctgaatgaggcctttaactatagcaagaggaaaattccctgcattcgagaacctctgggactcacatctcctacgatattttgttctaaggaacatggaaagaagacagtgttacagggacagttttcctgagttacgtggaaggcacagttgacgttttctgttttctgcaccccaccaagtctcaggtgggtaacatttgaattaatcctaccctcagtccattagcactttatgatcacctctctgtgcaaaacttctctcttatttacaaagtttgcctcccttcatccccaatcctgaagctaagctatcccaatcccaataagtactcattctgatgtgtttgatatatgtcttcaaatatgcatggatccaggcagggcgcggtggctcacgcctgtaatcccagcgctttgggaggctgaggcaggcagatcacgaggtcaggagtttgagaccagcctgatcaaaatggcaaaaccccgtctctactaaaaatacaaaaattagccaggcgtggtggtgtgcacctgtaatcccagcttcttaggaggctgaggcaggagaatcgcttgaacctgggaggtggagtttgcagtgagccgagattgcatcactgcactccagcctgggtgatagaacaagactccatctcaaaaaaaaaaaaaaaaaagcctggatccttataaaatgtgtagggttgtttgtatgtatatgtattttttatttctataaatgatattgaagtctaaatttcatctggtttcttactttatttactcaactccatattttgcatatctcaccatgctcattgagtgtacctagtcagtggtttctaactgcttcattgcattatgagttatacatccatcacgttttacgtatctgttcccctgaggatagccatctagcttatcagcaactcccccttactccaccactaaaagttctgaagaacatccttgtacattcccatttgggaccctgtgtgagaatagttctggactatatgatggaagatttggtccctgggttagtgtgttaatttttcatgttctgccatgatgtttttcagagcaccatggaaatggtgtgccaggtcacatttccactaagagtgcccaagagtttctgtcttcccacgtcctcatgagtacctaatattagccacctgtccaattttgccatttttaggagtgtaaagtgccatctcgttgtattaatttacacttctctgattactagcaagtctgttaagtctagtaagcttgttagctgtttgaacttcttttcttctgaattacctatttatattctttgcccatttaaaaattggatctcttgccttagaaatcttccggttgatttgtagaagttttgtttatagtctaggtgttgccctttgttaattttagaagttgcagatagcttcttctagtctttaatccatctatttggcatatggcagctttcgttggacagaaatgcttccttttgatatagtcagatccatcagtgtttttggggaggtagaaattgagataggagggcactgatgagctagagagcatggtggggtcccatgggcccactcccttgcagggctggctctctgtatagagggctctgaggagttctagaaccttcctgtccatccatcctgggcccccacatcctacaggaggtttctggctcaaggccctgtgtttcccgaaggccccagttaaagtacaatttaatggatggatgctatacctagagaatgggcaggattactccttcagcaggcagttattgagtgcctctgtgcgcctgagctctcagcagcactggggacatgggcaagtttcagtgctgagtgtacataagagaggcagctacacacaggctcagagcagcattattcacaacagccaaatggcggaagcaacccatgtgtccatgtgcagatgagtggataaacaaaatgtggtatatccatatgataatctttcagctttaaaaagcaaggaaattctgacacctgctacagcatggctgaaccttgaggacatcatgctaagtgaaagaaaccagttacaggccaggtgcgctggctcacacctataatcccagcactttgggaggcctaggcaggtggatcgcctcaggccaggagttcaagaccagcctggccaacatggtgtaactctgtctctactaaaaatacaaaaatcagccgggcacgttggtgcgcacctgtagtcccagctactcgggaggctgggtcacaagaatcacttgaacccaggaggtggaggctgcagtgagccgagatcgcgccactgcattccacctggggtgacagagcgagagtctgtctccaaaaaaaaattaaaaagaaaggagccagttacaaaagggcaaataaatacctaccatatgctttcactgatgtgtgaggtatttagcacaggcaaattcatagagacagaaaatagaatggtggttgccaggggctggggagggagagatggggagttaatcatttaatgggcactgactttcagttttgcaagatggagagagatctgtggatggatggtgggtgatgttagctcaacagtgtgaatggacttaatgccactacattatatacttctaagtggttcagattgcacacttatgttatatgtattttaccacaatttttataaaagaagagggacaactctttagacacaagggatcaaggaaagctcccagagaaggatgttcaagccgagacctgcaggatcaacaggagtgagcaggtgaagaggggagcaggaaatggcttgcgacagtgcaggttcatctgcatgggctcctggttgagtgagagtgggttgttccaggtctggaagaaggtttgctcaccaaagaagggcattgaggaggctggaggatttggagaagggggatggctggctggcttggccggcagccacaggtctctgaaaaaacacaatgagggtagggtgctactggcaaaggcaggccttggtgagggtgcctggagccccacatcagcaaattggggctgaggggatcctttttcttccacaagtcctctacctggtgccctggcctcccagggagggtaaacagctgagtgaacagtcaaaagtacatgaaacccattccatgaatcatggatcataagttatggttctgttcatcatgcctccatgagaacatcacaaaacttccatctagaaaggaaataggccaagtgtggtggcttgtgcctctcatcccagcagtttggaaggccgaggtgggaggattgcttgaggccaggagtttgagaccagcctaagtgacaaaaagtgaggcctcttctgtataaaaataaataaataaataattagctgggtatagtggcatgtgcctgtagtcctagctactcgagaggctgaggccgggggatggcttgagcccaggacttggaggctgcagtgagctatgattgtgccactacactccagcctgggtgacagaattagaagaccctgtttctcttaaaaatgtgactgaaagaaaggaagagagaaggggggggagggagggagggaggaaggaagcaagggagtgagggaggaaagaagaaataaaagaaaaatagaaagtctacctacttgggctgagtcagcaagtcctttccaggtgctgtctgtggggagacctgctatcttctaccttgtccaggccatgtgtgcctgtcaaccttttgttccttccgcctctctcctttcctctcccttctctgccaatctcctccacttatgtcttttcctttcttttcctgtccatccccttccctagtcctgctacttcccaagaaaccaggattccctctcattgtaagtcatcctcctccccatcctcagccttgccatctgtgagagcctcttcctgacctttcaccttgctgcctccaccctcaccccagccaggaccctcccctccgtggccttttctttaaccaggcttcaaccccatacctctgtcatcaaggtggctttttaaggcctttagctgctcccgtctgcctaggagcattgggactggctcatggaacactcactgagtacctagtgcagtggccctgggttgggggtcatggacacaaataccttttaaaaccaagttccttcccccagggacagttataagctactaaaggccaaaggagctccaagcacagcagagggggagaggggaagaaggaagacttcattcagaaggtgccagcaggctcttcaaaagtgagcagggattcggttgaaggagagcaatttgcaggtagaatatcttcgagggagcagctagacaaagacttaaagcagcaggctgtgcttgggagatgtcaagtttgcatcccccgccccccctttatcagcatcatagtcttccttgtggaagctgtcccttagtttttatttttatcttttttataggcagagtcttgatctgtcacccaggctggagtgcagtggtatgatcatgtctcaatgtaacctcgacctcatgggctcaagtgatcctcctgcttcagcctcctgagtagctggggctataggcacatgccaccacccttggctatttttttttctaaacttttttgtagaaatgggggtcttgctatgttgcccgggctagtcttgcactcctgacctcaagtaatcttcccccttcagcctcccaaagggccaggattacaagcgtgagctgcagtccctggttggctgtcccttgttgaacactcaggccctatgcttagtgagagctgctcattcctcccttaccccttacaaaactcctaagaattctgtcattttgcagttgaggaaactgaggtttaaggaaattaaattacttgctaagaccacacaagtagggagggggagagcctggatttaaacctagtctaattctagagcccataggcttaaccactgtacaggtttcccagttaaaaatgtagattctggccaggtgcagtggctcacgtctgtaatcccagcactctgagagactaaggtgggagacttgcttgaggccagtagttcaagaccaacctgggcagcatagtaataccctgtctctacaaaaaataaaaatattagctgggtgtggtggcggcacacgcctgtagtcccagcaagtcaggaggctgaggcaagaggattgcttgagcccaggaggtcaaggctgcagtgagccatgattgcaccactgcactctagcctgggtcacagagcaagaccctgtctcaaaaaaaaacaaaaaaaaaagaaagaagaaaaatgtagatttccaggtcttcctctgattttctgaatcagaggatctgagagcagggtgcagggatctgcgtctttaatgagttcttcctgcttaccttctgatgaccctggtcttaaccccactcaggaatgactagaagaagggctcaggtcctgggtgtctttgagcaaaggctctgcctccacaagtcagcccacacctgggctacctttgcagcaccgccttcccctccctctgtccctcctttacaattagccctggtgctggtgccataaggacatgttcccagggagtgcagcagcccagaggttgtcaccaggctgaccagatttgtgttgatgagattaggcagccccctggaagagcctgggaaggcaccagccccaaaggcacgcattagcattcctaaactgcttaatacacttcacaaaagggctgttggtgagggttggcctgacagcttggagctcctgaatcactaagtctttcctccagccctggatttgttaggtgagaaatcaggacactcaggggagtcttatcctcaacttcttccgtgtactaattcccattattctggatttaatactctctgaagggcagacacacagcactgaaatgccgttttcttcgggcctgttggtggggggcagctggcatttcaggatgaggcattgcaggcaggctgaggtgaggccagccagccgggagatgaggaagctacagagggtggggctgaggaggccagggtccagccttcactttctccctggctggaacaggacctcggacccagggcggggagcaggcagggtagaaggaccctagctcagtgaaggggtatttagagagtctgtggtcccagtgaggacccaaggggctcagcagggaaactgaggcaaatggccagttatgcaaatagggctgtgaaggtaggaagcacagtaacactgggaggcccagagatggcattcattcatttattcagccattcctggggtttcattcattccttgggtttgaggaagtaaagtagggactagtaaataaatgctcggggagggcaaaggtttcatgaccagatgagtgtgggaaacactagacccttggcttctgaggtgtggttcaaggccttgccaggaagcttgttagaaatggagcctcttggaccccatccgccacctactgcacctaaattttaacaagatccccaggtcaattcctgtgcctgtgagagtctgagaagcactaggcggtgcattctctgagcacagactttagaataaggccgaccccagcaaaccttcgtcctagttcattcttggcctcagttttcacattagtaaaatggggcaaaaatcctgacttcaaagtcatgcttgtaaaggtccatgcttgcagagtgcctggctcagagcatgcagctctcctgcccctttgtcctgatgagtctgtgccccactgaaggagggggtttggcccttttgttcactgctgtgtccgcagatgtagcacagtacctgcagcatggtggatgctcaataaatattgtgaatgaatgaatgaatgaatgaattacacgtcaagtggttgtcagatcaaactgaacatgctggagactgctttcgggagcagcaaagatgcaattttccttttgttttctgttgctgcaccaaattacggcagatttttcagagtgaaggattgctgagagactgggcaaggggccggtggaggtttttgatgcggagcaatgagatagttgctctgtgtctgcctgtgtttcaggaaaattctgttattactgaaatctttggtttgaaagccactgttagaactaaatattttgggaaatgttagccattaacaccttagtaagaatgagccgattagtccagaaagtaggatcaggtaggtggcaagggggtagacttctatggatctggaccctcccagtgtccctgggcctcaacgagattttgaacctagaagttcatcttacccaatgctgtgcctctctttactcttgctccagcccttgtgggcccctccctctcaactcagtccctagagtgtcctgcctctggctttcgaccactctggaccacaggctctgtcctggggccattctcatctctgtggcagcctcacccgctcactctcttgaacaaccttgtgtcctacttcatagaaaagttgacactaaaggaaacagctgcgtgagccttgctgctgaatttgtgcagggaagcgctgaggacaccataccctgtgttacgcagggacgtcactgccataattggcatccctgtgccccatttctctaactcctccctcccctctgtttccctcccattagcccatgcacacactttctttgtgtcttaataatacactaaaaaacagcccctccctgactgcacccacttttggctgtcaccccgtctctctcctttcctccccagccatacttcctgagatggtgtctgccaattcatttctcagcacctgttacctggcttacaccctcctcactccgggggaggtgctccagcctagggcaccacatgacttcctgtttactaaatccaagcatctctgccggctcctagaccttccacagtctggccacagccaagcttcctgaccttctgaccatcctcctccctcccctccccctcttcagcgtctgacactgcccatcactccttcccacttaacatttgctttaatattggagcttccagcatttgccttgaccttctctttttattctttatttctttatttttttatttttttattttttgagatggagtgtcgctctgtcacccaggctggagtgcagtggcacgatctcggctcactgcaagctctgcctcccgggttcatgccattctcctgcctcagcctcccgagtagctgggactacacgcgcctgccaccatgcccagctaatttttttgtatttttagtagagatggggtttcaccatgttagccaggatggtcttgatctcttgatctcatgatccgcccgcctcggcctcccaaagtggtgggattacaggcatgagccaccgcgccaggccttatcctttatttcattcgctcctatggctttcatgccactgtccaaatgctgagactctccatacttaggtctctaatgaagaccttgctcctgaactccagaaccgcataactccccactccacacactgaagtcttcattcctgctgtcacctatatgactctctcccacccccagaaactttactctcccaaacttttgtggcccacctctatgaattgcttcatgcatcttcacagtcatgcatcttcctaagccagaaacctgggactcatcctggaattccacccctctctgctccctttcactaaccacatcttatggattttacttctcaaatcattctcaagcatttttctgcatctttgcttggcttggaactcaccccttttctcctgaacagttggaacatagcactcttacaactgcagtggcagggctatggcctcccacatctgtcctagcttcttccaataggtggttcctgcttcagtcagacaaagggagtgactttactctttagaatggaagaggagggacaagacaaaggtcaatgagaagttggtacctcttgaagaactggcaaagagtttgaagcttttgggttaagactggctttggaaggtgcttaaactgatatgccactaacacctgctccctgctggggctctgatgagtagggtaaagacctagaataatggtcaaagggaaaagtactgattcatttattaatagccaggcgtgtgcctgatacccctcagggcacaggtcctgagctgggctctggtggtacattcctgtaatcctggtgactcgggaggctgaggtgggagattcacttgagcccaggagtgatcatgccatcgcactccagcctgggtgacagagtgagaccctgactctaaacaaacacaaattactggtctttggtgtatcatgttgaagaacatggcttggcctgttgaggctgaatggagctttccacctcctttcaccatgaatctaaatcttgagaatggagcactcaggacatctgcagagttagggctaggattgtgcctctcgagaagcctcagtgtccactttcccagccagctcttggcacgagaatgatggggggcttgttctactcatcagtttcaggtagaacaggcgtctggtcccttggaagccctccctagcctgggcagaaaggaggtccccctctcctctgtgtgctgagactgccatggggaggggaaaagactcctaaatgcctccccgttcctcgacacaacctaactttgttatggcgcgggatgttctcccgttctctgagttcctcccaagagtcttgtgtttcaaggcactgtttctaccaggctgcactcattaagaaggacatggattcatttccccatttctatttctgtgttttcaggtctgctggtacagatcagctctccccagatcccacctaccctacaaaaattacactgggagatgctgccaaggggcagggaggaggttcattagcattctcagctgcattcagagccacccctccaggcagcaagagggcaaagccatggccgagtgaggaggtgccactcaaagaagcaggcatgcagccctcctgcctttctgctgtcctggtacagaacctcagcccctcccaacttcttatggcctcgactttcctttatcccccatatgtggtctgagttgaggccatgagctatacactttcctaacttgggtggttctgttctttggccctgggaaaaggcatcttcttaggacctcattcttattcactttgtctaagattgaggctaccctcattcatcccccaaatgcacctcatttcactttcctctttcaaagaagcaggcagccttgccaaggggctaaagtttctcatgcagtcaagcggaggggttggggaaccaccatcccttaattggcaagcctctggtgtcccccaagggccacagctcggtctcaccgatcagagtggacaaagggcagtgtgacctcactgattgggaatagttccagcccaaagcagacacttggcatttatttggcctgtgcattttgatcgcggttaaatgcagtttctgttaggctctttgaaatattgaaaatagctcacaaactctcattactgcctttgaagagccacaggggtctgggaaccccaggcagggaatgccgttcttgtccaatttctcctctacaccctcaacaccccctcccttacttcccctctcaagtttggaatgaactgcctaaaaaacacaagaggagtcacatggagagatcaaaatgtcagcttcattaccttaccgataacgctgattggaagacatggctttggatatgtggcaaaattgtcttgttaatacatcactcttgaattgaagaagttacccactcattcaccagcaaaggaaacagcctcaggcttccctcacaggagcaaggcttgctgggtaagttaagggggtgcaaggtgggttggggctgagctaagtatgccaagttatttccccacaaatgccctttggacaagtcactcttcctccaaggtagggagagagttaagggtcagagagagactggaaaaatgtgtgccactggtacttggtcctctggagcatggactgggaattcattcccctctgtggagacaagagtaggatgaacatgttctctcctaacactgcatggtgaatctggacctgagctggttggcaccgcctgcagctggaggtaactgggacaggcaggacctgtcccaccccatcaagaggaatggtaggagccccacccaccttggactcagctgtagataccagacagccttggaggtttctcaaagctgttatccagactgagaggagatgttgactaagacattgatcatctggcccgcttatctctgtggcatatttaaataagaaaataaattgttaatttttctctacccttcattgtcccctggaagagtaaatggagaatatatttcaactaggtggattgttaggaaatgggacaatggtttaaaatgcatcagctctggagtcagacctgattctccttggttaactccttgatagaaactgatgtcagattagggccgggcatcacacatttgctttgcagacaaggggccaaaattgacttgaataatagacccaaggcaagaggagcaggctggagatgacagagacagttactagtataaagcagtagcaacaccaagacttttcccctccttccttccttctttttttctcccatctgtgtatatgtttaaccaagttgtgttgagctaccaccttgtgccagataccatgctgggttctgggatatagagtttgatgacatgcatgggatctgtcctttggcccacatccccctaagctttcagtctttctaatatatcacctgcagagtggacagataattacacagataatttaaaagcaatgtggtgagcatcacaataaagtttaacacggggcaaggagaggggttatgggagcacacaggaaggtcaggagtctagccagcgcctatcagggatgacttcctgaaggaggcaatgttaaactgagacctggaggtctagggggcagttagtgtagaaaagactgagaagagtcaatcgcaagtttttcacctggtaaagctattattgttaatggcctgggaggctgctgctctgggtggacaggcactgggacccgtgaggtgccagtctcattctgactctgattatgttgaacacgttgctgtacccaggcactgtgctagatttttatatgattatcatattcagtgggctccagaccccactgaaggtaggtagtataatgattctcattttatagacatagtctgagatttggtggaataagatgacttgcccaaagatcacacagcaggtaaaggatggagctgggactgttgttaccacataacagcatccacatgcggtttcttaatcatgtttttacagctgtttccacacagcacacaatgtcgcagccctagatagagtccagcagtggcacaaatcacaaaccatttcaataataatagcactgataatatcatcttcatgtatggagtccctaccatgagcctctgtgccaagcattttgtatacaccatctaatataaaccttaaaacaggtccgtaagagagatggcattattatccccatcttgcagaggggcagatcgaggttcaatcatgttaagtaatgtcacaaaaagtcacacatggttggtaaatgttggagttacatccagggctgcatgactccaaagcccatgctgctgagtggaacactatttcattcctgatacaatttcatgcaagaagatggagagagggggccattctcttcttccatcaccccctgccactttccaggccttcgttttctcatctctataaaggagacagccttctgcctgccttgaacagagatggtgacgggatcaccagggttttgcaaaggccaattccgctgggcttgtaaggtgcttgcagctgaatttcaggacttgcgtctcctggggcaccaggtggcttctgaaaggagactgagggggcagagaagagccgatcttgggccttggctccaaggacaagttgtctgatttgatcctgcagaccgttcatctctggatgagtgtacccccatttgctcgtagttattagatgtgtaaagataacctatttggagactgagggggccgccaggacaggatgacccatctcttccccaaaggccgtggcagcaaaagaatggctcagagaagctgcttagggacacttcatgactcacacatgcagcaaacatgtatggggtgggccctgtacagtgtcacaaagagggaagacagcatccctgccttaaggagctcacatttctatgagggaggcacatcagagcagtcaccgtgcaacgtggtgcccagaaacctggtggtcacccttgatacctctttctccctttccttctctccccacatcaagccatgagcaaatcctgttggctccaccttcaaaataaatccaggatcccagcccctggtgccacccacatcacacccaagggtccgagccatcttcttcttttgcctggacccttccctggtttccctccttgcattctcgcctatttccattttcctccaacctggcagctggagagctttgaacatggttaggcagatcattcattcccctggcatcattcagaaataagtcaaggtcctttccatgtgctcacccctcattttcttcctgacctcatccccctaagacttgctcctgcttactctgctccggccagtggcttctctgctgttcctcagacacactgggtgttggggcatgcatgcaaatagatttggggctctccatcccctgggtagccacaaggcccagccatcacttcaataaattcttgttccaacgtcacctccttggagaggtttcctcaaccccctcatccacagtaatcccttccttcgcttaccctgctctggcttccttcatagttcttagaaccacccaacataggatgtatgcattttgaaacatttactgacttctcaagcaaatcccatgagatcaaggagcttgtctatcttgttctctgtggtatgcccaactcctagaacagtgtcttccacatagtaggggcttgatgaatatttatgggatgttgaatgaatgaatacagagggagaaccaagacatgaaaacccagtagatggagttaataactccagtgtatgggggtgggtggggggtatgggtaggttcactgttgggtgatgtgacatttgagatgggacttaaaaggtggagcaggtagttttcaggggaggaaaggagtgggatgtatcccaggaagagcctccaaacctcaaaaggccctatattcacaggaggaaatgagaagttctgtgtgttcgagtgttccttgtgtgtgtgtggtggctggggctgcaggaagtgaggctggagggggacaggttgtagaggaggggaaaggctgttcagtgggaagtgattatgagcctggtctctggagctagcccagctgggttcaaatcccagccccacgtgaaaaacttataagtcaccctgggaggagggtatgaaatctttgcttaggacctcagagaaaagtgttgttctctgttctatattctcagaggcatagattggagattgggagagacccaggcttaaatcctgtccctgcttggtactagcctgtgtaaggggcatagtaatctctttaggcctcagttccccatctctaaaacaggaacagtagtgcctcattcacaaaacctttgtaacaatgcagtgagatgatatacatgatgcatttacctaggcctggcctggtactccctcgtggttgccaaggtgatgggacctgctaaacacagtgggatccgaggcattgggagaacacttgccttgaagctcttggtgaggctgcaggtgttctctagacatttgccaggccttgcttgcaagtggcggtgcctttgctcggagagccagaatttcagcctgctgtccccttcaagctcacagggccatgctttcttctgccgctgggtttttttttgtttgtttgtttgtttgtttttttgcatatgccgattcctctgtctggagtattatcttcccctttcactgcattaaccatggctcaagtttcacttcctcagagaaggccccctgcccccgcagtctaaatcattctcatagaattgtgtgtcttgcccttggataacttatctcagttgatcatgatacattgatcaaagccattaatttattattatcaagcttgctgtctagactggaagcttcaggaggtcagggactttgcctggctttgcttattatcctacctctggaccatggatggtccctggcaaatagtaggccattagttaatatgaagaatgatttagggaccatggaaatgacatgcacaactctagtaaaacattgcctttgcctgttccttcccacacaagactggcaggacaggggagccactttacccatgaatctcacagctttaggagggatgccagtttgtctttttaatttataacaacaacaacaatgaataagatgtactcagtgctccagccgctgtgctaagtactctgtagacattattccttcacttaatggaaacatcattattactgagagaaaagaaagatgctgagaagtttgtataatgtggtacaattttaaggaaacaaacaatggcaaacccctactgtatatgtaaatgtgtatatgtgggtatgtcagtttatgtttgtgactctgtctgctttctgtagcttataacataattaccacaaaaatctgaagcctataacaaaattgccacaaactttctgttgcttataatagaataaccacaaaattctaaagaacaaaattacctgaagacggataatttataaagaaaaggaatttatctcttacaattctggaggctgagaagtccaaggtcgaggggctgcatctggtgagggccttcttgctagtggggactctctgcagagtcccatggtggcacagggcatcacatggtgaggggggctgagtgtgccagtccaggaggtctctcttcttcttcttacaaagccaccacttccactcccatgataacccattaatccattaacccattaccccgttaatctatgaatggattaatcacccctgagagcagaggccctcaccttttaaaggccctgcctctcaatactgccactttggggattaagtttcagcacaagttttggatgggacaaacattcaaatggtagtagtatgcatgtggttttataagaaaacatagagatttgggaaaataaaaactagacttcaatatgggttgcctaggagtgagtgttggttagtgggtcatggggttaggtgaggatggggggtgatggagaggaagtcgaatatgaaaaggaaaaataaaaataaaatttcactgaaatcccaatatgatacacaagaagatcatatttatgcattcatgcaaggttatatatgaatgtgtatgtaaaaatatataaaaattgtttcaaaaaaaggagtatatgctggcaagggtgcagtgtgatgggcacttcaataaactgcctgtaggggtgtaaattgttacaaacttgctggaaagcaacttggcactatattatcaacagcctttaaaatattcatatatttggactcgatatttcatttcaaagaatttaccctaaagaaataatcagacatgtagtcaaccatttatgtagaagatgcatagcattacttacaaaagagggaaaaagtgaaaatgaaataagtggccaaccgtaagagagaagttaagctgttacatcagaatcttaattgaagtctcttgacagtcctgtagatatggttactcttaccacctccgttttacagatggagaaaacagaggctcagggaggtgaaggaggttggctgcagtaacacagcaagtggtgtagcaggatttgaacttctacatatttgcaaacatatgagattccttaccttagtgacaagcttgtgatcaaggtaaacatctgtcattcaaatccctctcctggaggaaatcgtacagttccaaagtacaatgtacatgcctcaaacccttaaaaccttgatctgggacctgcttaaccatagtatgtggagggaccccccagaaggatcataaaagggacttcactttcttttaaataaatagaaagcttgtttagccagcacctgacatagacttaccacttagtaaatactacaacttatgattcacatgattgtgttttcttggttagagaatcagttcagaaaatgggatgttttcttgcttatcattctggtttcccctacttggtttagcttggaaattgtcctcttaatagcagcttgttggagtggcaaggctgaagctttagagtcagactggggtttgaattctgatactgcttctcagcagctgtgtgattttagacaaattacttaacctctgtgaacgcagtttctcctctgagcccctttacctaactcagagaattgcagggaagatgaaattaggtgtcaaatagaaagcacttgacaagtccctgtcttgtattaggtgtctattacatgttaggttccttgccttcccaattggaaagcacagtcttcagtcgaagcactggattgtgagttgctttagccaggttgggccaggttgggccaggctggaacaggctatacactgggccaggagcgctggtgtcatggctagggcttcaccccaggctagagttcaaaggcagaagggtgaaggagggaagggagcatagttagctgggcccagaatggacactggaggttacagggtagttttgagcctgatgtgtttactcttactggtagctagaagtcccagctggtcagagaccagcgggggaatctgggcatgagaggaagagaagggatataagtgtggaaaaagacttgctgttaagagtgctcaaagatgttctggtgaaaagagcttagtgggccttgttgaaaaagtaataaggtttcagtcactttttttttcttatactcactgggccttgcttgccgcagtctctttgcctccagagagataagtaagtctaggctatggggtgggatgaagaggtgcaattgctgaatggatgggtggacggatggatgggatggatagagatagtgggtgatggaagaatggataggtggatgggatggattgctagagagcattgatgggtatttgggatcaatgaataagtggatggggtattagatggggggatggataaatgcatggatgactaggatggaaggatgtgtttgattgatgagtgggtaaagtggaagaatagatgggctagatgggatcaatggatggaatggatgagtgaatggaaagatgagtggaagggtgaatgcatggatggcaggattggcttgatagagattatagccatgaaatgagatggctgaatgaaacaaatgatggaatggacagcaagtagattcatgggatgagtagacatatagacagatgaatgtacaagaggaaagacccatggttggtagatggaaggatgattgaataatagatggatcggagttttcataatttattgtttaagcaaactcatttggggattggctggacaaaaaatggtaataaaggctgaactggataattttattaaaggcatcatgggaattgacaagcgaatgatgcagagaggagtccaggctcctatcccaaggaagtttctctaacaagtgccgttaatgaaaaatcatgatatgtcaggcctgtaaccccagcacagaccatgttcacatagctctgtgaaagactgtgtctgttctcatgcacaaacactgtcttcatgatctctgatctgcaaatatgggatacgtccacactggcgttcacactcacatgtaatatttaatagataacacttgttcacactttttttggaaccaaaagaaactcaatggctaacatccacagcacattcaactgagtgggctgaacccacaggaaggaaaatcaagtggcttaggggttgccttgtttaatggatgtgaggttttttcttagttaaataagtaatttattttgaaagtcaccagttcagtgaaatagtttttaagttttctttactagagcaacctgtgtgactgaagataaagtatagaccagatctctgagtttctcaggcagggcctggatagtcttcaggatgcagttacccaaatgacctaatttttctccccttccagccatgcctctctctcctgcttgctccttctcttccctttaagtttaattagttataactactttttaattactatagaagtaatacatgctcagggcaaaaattcgaatggcatagaagagcatatggtgaaaaaagcccttctccccactgcagagcccagtcccacttatcaacagtttcttctgaattacttcagaaattttcaaaacatgtaagaaaatgtaaatggaacacaaattatatttcacaaaaatgggatcattgtagatatatcatatacattactctgtaacatgcttttttctcttagaaatgtctcttatacctctttctgggtaggtgtacatagatttatctcattcctcttagtggctacatgatatttcataagttactgtaaattagtcaatcagttctttttttttttttttttttttttttttgagatggagtcttgctttgttgccaggctggagtgcagtggcgtgatctctgctcacggcaacctccgcctcccgggtttaagcgattctcctgccttagcctcccgagtagctgggactacaggcaagtgccaccacaccagctagtttttgtatttttagtagagatggggtttcaccatgttggtcaagatggtctcgatctgttgacctcatgatccacccgcctcggcctcccaaagtgctgggattacaggagtcaatcagttctttattatttaggctttttctagttttgggctaccccaaacaatatcacaacaaaataattgtgtgtgtgtgtgtgtgtgtgtgtgtgtgtgtgtgtgtgtgtgatttcaacatgagggcagatgtctatagaatggatttgttgcctcaaaggatatatgcatttgataaacttgccaatttgcattaatttaaacactgccaatagtatttgaaagttctttgtaacgctacattttcgagtacatcagaatcacctggagatcttgttaaaatacagattgcttggcccaggagtttctgattcagtgaatctgtgatcaaataggtctgcagtagagtagatttgggatgagatctgagtatttgaatttctaacaagttctccggtgatgctgatgtgctggtcaaggaaccactgctccatcctttcccaacaactttttaaaaacttgcgaatctgatggaaatcagaaaagtagctcattattgcgttcctttaattataactgaaactaagcatcttttcatgtttcccagttgtctgtatctcttctcctgaaaactatctgtttatgcaccttgcttgttttctatggcattgtttctatttttcttactgatttataagaactctttgcatataaaagacactggctctttaatctgtagtagcatggcaaatcttttttgcagtttggacctgtgtttacactctgtggtatctttattttattttttgcatagagagattctacatatttatgcacttaaatttgtcagtgttttggcttctggttttgtgtcatacttagagaaagacctttttccctttaagattatatacaatttaacaatgaatgtgtcttgatgctttcttttataataatttctaatctaaaatagggcagcaaatgttactatggtaatgtagtgactacttatttggaaatgaaaatatgaagttttcacatttctgaattaacctaaagggatatttgcggcctctttatcccctaggcctgtcagagagaaaagaaactcccatttcatggctttcccctctccagactattactataatgggttgagatttaaagaagagtttgaagatctagggcaaagagtgttggctgttgtcaggcaaacagatgtttctaatgtgatggaggcaccaagagaaccatggagaccacaagcatgaggcatcacagcacacaaatgctccctcctatttctgcctgtttggctgccagagctgctcagtattttttttttttttttttttttttttgagacagagtctcactctgtcacccaggctggagtgtagtggtgcaatctctgcctccccggttcaagcgattctcctgcctcagcctcctgagtagctgggactattggcacacactaccacacccggctaatttttgtatttttagtagagacgggatttcaccatgttggccaggatggtctcaatctcctgacctcgtgatccgcccacctcggcctcccaaagtgctgggattacaggtgtgagtcaccatacccagcctgcccgagttttatattcacactccctacccttgggcatgctctctttgactaagtagcaagatgtactatgggaaaggaacacaagggatgggaaagtgtgaaacatagccttttgcacaacctgtaactatgggctaactgattttttttttcttttggacagagtcttgctctatcacccaagctggagtgcagtggtgcaatattggctcactgcaacctccacctcctgagttcaaatgattctcctgcctcagactccagagtagcaggaattactggcacccaccaccacgcctggctaatttttgtatttttagtagagacagggttttgccatgttgaccaggctggtctcgaactcctgacctcaggtgacccacccacctgagcctcccagagtgctgggattacaggcgtgagctactacacccggcctgggctgactgaattaatggaaccatcattattttgcaaggcttgcttttctattattcagacaacttcaagtgcagagttcagtgctagatactgggatgatatcattcacaagccactgtactggcttgggaggaactggcagtctagtggacagctagatacagaaacaagtggtattgcaaaagagggagagaggtggtaatagaaggtgctagactttacaaggacaggaactatgccttatctgtcattctgtcctaggacgaagcatgaggcctgacactgaggtgcccaaccaatgtttggtgattgaatgaattaatttgaaagctgtattagtcaaggttcaccagagaaatagaaccaaaaaaaaaaaaaaggtgtgtgtgtgtgtttgtgtgtgtgtataaaatttattatgagaattggctcatgcaattatgaaggctgaaaagccccacaatctgccacctgtaagctgcagacccaggaaaactgatggtgtaattcagtctgagtctgaaggcctgaggaaagggatgtgggatagtgggggtgaaccctggtgtaagtcccagagtgtgaaagccttaaaattaggagctctgatatcttatggcaggggaatatcccagctcaaggagagagaatttgcctcttctctgtctatttcttctttcggggacctcaatgaattggatgaggcccacccacattggtgagggttgatctgttttatttagtctcctgattccaatgctaatattttcctgaacaccttcacaaacacatccagaaataatgttttcccagctatctgggcatcctttagcccagtcaagttgacacataaagttaactatcacaggaacagaggggagggagcaagtaactacacctgggggaggtcccagaggaggggatatttgggtcttaatcagaagaagaggggtgatagagaagtgggtaacaagcaagatggttctcggtgggtgccacctgttacccaccagggcctgggatgaattccacaatgtcacatggtaagagtgaatcggggctttattaggggaagggaaagctgactaagggtcagcaggacgaggtgccacaggtctcccattctcccttatgtccatggaggggtgtgctggggccatgatattctgcctgacatccatcccgagtctgttccagaggcgagtcctccctctctcttgctcttcctccttacaggtcaagtgtgtgagtcacctcatcagtgaagggacatgcaagctgcttgggtgtgtgctgtttttaggaattgtctataaggttagctgtcccatacttgggggaatttgtggcccatgagaggttggaatccctcttgtctcttgggaagctgaatttggatgcccctggccccagctagctcatgatttaggcaaccccgagtgagcgctcagaagtattttcaggggatcctgacccttgcattgcagtgggaaagggtgtgtgggctgagaggtgagcttgtgcaaagacagagctgtgccactggatgggaggcagaagaaccccctgactggagactctggcctgggctcatttgaaaacaagaaggaaattttatgcctgatcaggaatgagtaacttggtgatggtggcctcagggatccccactctgtgctgcctcagagagaggcctgggcctggaggctgtggatgggtgtcagcatgagtctgtggcttcaacctgatctccacttcctgcagttcctgatggtgagtaagcccccctcaagctaggtccctggagtggagttggggaagaaggtgcaggatgccaagattgatatgacaccagggccaagtcagcaggcagggtctggtctacacactctcctagagagtgcaagacagggacatccccaggcaggctggcctgtgtaagtaacttgcaagatatatttccctgtttgcttattgaaaagaaaaattaagacccccccctctcctgcacctcccaatagagcagacagaactttgactttgggtcaggtataattcattcttgtctagtactttcactattggctggctctgccaacctctcttcacctcagtgtcctcatctgtaaagtggggttataatagcccctgcctcatgggatagtcaggaaggagaaatgagagcatgcacttgcagggacctagtgcatggcaggtacttaataatgtttaacaaaaatgaagcattgcttggtgaggtgggaggtggagaaacaagagcagggaagggtacggaatgctaggcagaaaggaacaggtaccacattgaatgcaagcatttattgaacacctactatatgctctatctggtggggagatacataaaggagaatcagatgccatatttttttcttgattcctggataggatggtctcggtttgtcctttaaaccaggaagcaagctgtggatgtgcggagatggggacctgggacgggtttctgggaaggaggcccttgaaaacgggctccaagagttggaaaatggatgctatagtcaggagtcatcagagaagaaagacatcctgagagaggagcctaaggatgggtggagggcagggaaggcattgagcgcagggctgagcagggtgagtctttaaagccttctctgtctctccctgggacaatcgatccctggctggtccacctgcttcccctgttctcacctgtggttccttcttcacacagcagctggagaaatcctaaaacatgcagatctgattcggtcacccctcccactgcatacacacagttgaaaccatcccgatttgatctggccttgactgccagtctacccacgcttcccctcccaccactcctgcatgcttctccataccccaggtgtacttgcctttttgctcttactggaaaacaacaaactttttttttttttttttttttgcctccagacatttcttcctgctgtttttttctgcctggaatgctctctctcccatcttcaaacagttcgctcttaccctgcagatacctgctcagggatggcactgtcagaggtgaccacagtagatgaaggactacatcaccttcttcatagctctgatcatgctcattatatgatctactgttgtttacttgtttactgtctgtctcccccactagacaacaagctgcatgaggatgactacagggactctgtacccccagtgccacacacagcacttgataaatatttatcagttgcatgaatgaaaggcacagggtggagtggaagggagagaatgagtggtaattaatgtttcttgagctccccagggcctggagtctcatgttcataatcttatttaattttcccagcatgcctgtgagggaggtattattaatattatgctttccttatagatgagggagctgagactcagagagggtgagcagggcgccccaggtcacacagccagcaagtggcagaagggactgtgaattcagttttgtctgactctgcaggccaggcttgttccttcctgcagtgctgccggatgctctgtgtgtgcagggagcactgagccagtcagagcggcggaggccctggcacatgtgcatgtctgcagtagagggcagtggtgaggatgcaatcccagctatcgtgggctattttattttattttatttatttatttttttgagacagagtcttgctctatcgcctaggctggagtacagtggcgcaatctcggctcactgcaagctccgcctcccgggttcatgccattctcctgcctcagcctcctgagtagctgggactacaggcgcccgccaccatgcccggctaatttttttttatttttagtagagatggggtttcaccgtgttagccaggatggtcacgatctcctgacctcgtgatctgcctgcctcagcctcccaaagtgctgggattacaggcgtgagccactgcgcccagcctatcatgggctcttttaaattcctccctatttacacatatccttccatgtattgtaactgatacatgtaagcacatgtgcacacacacacgcttctacacacaacatgtgttcacatacacagtttcacaagacaggtacactgctttaccactcacaaacacaacatcaggtggaagggacacccagacctttacacagattcttccagaagggcactgataccctagtggagggagggggtggcagcgggacccatggagcctccatccaggatgggagggtgggcatgcagccacgtactaaagagctgtatgcatgagaaccgtgtgtgcaaaatgtatatgtgtgtgtgtgtgggggggggtacacatgtatgtagtggacgtggacgtctgtttctgtagctgttgatgtgtgtgtgcacaggtgtgaattctgcatgccaggacttgggcagttgtgagcatcttgcttagcctgggttccagctcccagctctccagccccaagggtgggtcaggctttgaccttgaacctcccccatccctagtcactgtccttctgagctggcagagtttagggacgacgcccctcctgactacacttcaggctctgtgtggagtggctttcctgggaacaaaagccggtctactcactccccgatgacccaggatatgagtctgcacttgacaaccatgcctggtaacagccagggctcaacaaggccgacagctgcacagagcctgccaggctgtgtgggtccttcagggaggcgggggcctggtgctctgtgctcagcaagacaggtctatgcctctgcctgaacttcaggcttctttgaacacccaggtcttctcttttggtggagctgccaccacttcgacaacgtgctggcttggagccctcactgtctgtctgtgctttctcagggaggaggaaggttaggagacacaccctcagacccgagcgcagcatcccttcctgcgggtacagtctttgaaggacatgggattcccacaaattctaccaagagtcaccactgagttgagccggagaggttttccgcctcagtctctgcactcagtccttcaggtgctctggggaggagcctcagaagcttccagtgctgggggctaagtggagcaggcaggggtcagctgcctgggttttgcttggagagaagccctcaaaaaggtccagattgagctcagagtccagagggaatgtgggaggaaggacacccctggtcttgggtgtggagcagaactgaggtcagggcgtcggtgaggccgattgctgagaaggtggaggaagaggccacttcccacaaggaagaaatcaagaactgcagccaaggggcaaatggaggtcttgctggcctgagaagagggtgggacgatgggtgtggtggtgcccagccatgcaaggtcccttcaaatgctggagaccccgagactctcaacaactcctctcagagcagcccctttccttggttaccaaggccggccagtctccactgtgcatcccttgaaccactgtcccactaggaccctcagtctctacacgctccagccctgggtcagtcctgcaactcagctctgggcctgccacctggactatgaatcctgctgccactgcgaactcacatctctaacctacgcccagcaccccttaactatctttctatcggccacctggtcagcttcctgtcctaatcctaagagtggccattccaaggcacaaatccctggttccatcacaggatgactaccctggtacctcactgagaacaggcagaccatcagaatggacttccacatcctcctcctacctgtggttacctgcttctgcagccactcctcctcccctcactcctggaggaagaggtggggtctctcccacagtccccagttcccagagcccaggacccctttcttccatctgtcttctttgtgatatgccccttctctcccctctaccctcccattttatttttcttctccactgacttcactccttgaatttaaaacaggttcaaaatagaaggtagaagctttttgggccctgaactcctctctggctgccgccctgttctttgccatttaaagctaagttcctcaaatagtccatactcagtctctggttcttccacttagctcccatggggacctggggggtcggatgccgctgacggagcctttgttgtgaagctgtgcgtggcttcttggtgtctcactctgggtcatgccctcgttgccttccgctatccctatctggtctctctgttcctgtctgcctcttgcctgtgtctctgtcacttttccgtctctctgtttctttttctgtcctcttgcatctccctggcttgcggtctcactctctatctgccgttgtgtctctttttctatctgcccatctctcttactgcctgttcttttctttgagtccctgattttctctgctctgtctttctttctacctggctgtctctgtgggtcctgtctctgtgtccctattccctcccctgcccgtctctctccccatctatgtctctctctctcccctatgtctctctctctccccgagtctctccttgcctccgtttccttcctcctggccacaaggacagcctgccttgctagctgtgatgcccctgacagcgagaatcagtgttctttcccactccactccctcctgcagtgtctcccagccctccccatctccctcgtctgggtgtctaactgctgctacaagggagcgagggcacaggactcttagaaatcccaaagggtgtagattttgaagcaaaatgggagcacagcaccttttgtgtcccacacataatacttgggggatgggcagtggctgcaggctgggccccccatgaaatgcttcagctgtgccacctcccataaccgtggccttagaggatcacagagcctgtgctcatgggcaaggatccttgggttctgcctagccccattacagggaggtagtttagttcaggtctcaaccagcagcaggaggtatgtgctaggtgggctcagccagagtccagggctgtggggaagagctcggctttattttctagggaatggattgggagctgccggaagtgccttaggttgagctccccggaggcagacctgagacaaggattaagtgtaagtagtttaaattggaggtggtccaagaaataccagttgaggaatggtaagggagagtcatcagtaaagggtttgtctccaacccagctactgctgtgggcaactggagtgggtctggatgagggcatgggtggaacggactcttggccttcccatgccctgcagtgatgtctgttggattttctttggagctgaagaagtgaggctggggcttcacaaccctctcccttctgaatatcactaggatgtcaggtcatggatggtgtcactgaacagacccccactgggtcctggagatctccccctcaaaagccctcccggggcctgaactggagcagcatgtctggctcttctggggcctggcatgatggcctcacctaaagaaattccttccagaagacagtggggctgggggagagtccacctctgtgtggatctgtggagcacctccagttagtgtaattacattcttcctgctgacagttcccaccatggtctcaattggatgtgacattcttattaaataacttcagtaactagtaataataacacagtccttacttcctgacctaaattgcttgatgctattttggtgagcaaccacggtgctgcagggcttctgcagaacggcctgccaaattgctgccaacacacacacacacacacacacacacacacacacacacacacacagccaaggttgatgggaagtgtgcttgcaccatctgtgcatggcctacctgtgtgtgccctggagcacatgtgagcgccatacctgccgtccaaatgaaggagccccatatgcctgatggcagggcaagtttccctggccaagggctaaccttcccagcctggttgttgcacaaaatggagatttgacttccaaagtacctcttatgccatgtccttccctctctacctgcctcagcttctgtgcatttatatctgtcttcccctgtctctgaagtttccttccctcccttttccacttgtgaaattttattcatcttttaagacccaatgcagatgttacctctgccaggaagccatccctgattccactatagagggatttgtcactccctgagttggccttctttatttggtctggcctggctctattctaattacgttagctggatatatgatggtcaagggcagggactgggtcataatcatttctgatgattgacacactcattcccattgtaagactccctgagtgtttactgaatcgaagtcatggaagtagacatagatttatggggagggggcattgatggaaactgagattttctggtggtgggtttctccacagagatgaaatgcttgcaatgcccctagttggtctttgtttttattttccatctttacaaaaaaatgtgagatgttcactcttgcagaacaaatagaactgtgacttttgtttcacaatttatgtggctgattttgtctgcttttgacagttctgttgtgttcctgacagttacaatttggtttctctctgggaccttggaatgataagttgggatgccaacctcgcattgatccactgggggagcacagaccccttcttgtttctccccatgctgtgcttatgaatgggaagttctgagcaagccaatgagaagacaaatggggagaaaacaaggcaacatgaaagtgtgcaagtgtgcaccaggaggcagggtgtcacctggatcatctgacccaggtgactagccgatggcatgagcagtggacccttgggtttctccagaccctatccccatatctgtccagtctcccagaagacaagtgtaaatggactcctctgcactcctatgcccttccctttctcctagtccacccaccagcctgtggcatgtcccccaaattttatgtgagttccaagcagacataaattcaaaatggttgaattttctctggatcctcagctcacagaacaagcctcactggcaggaagcatcaatatatgtgtgctgagtgcatgatggatggatgaatgaatgaatgaatgaatggataaatggtgccatcttctaaagcttataatttccttccttggcctaagcatggaatttctgttttggatttgaatcccaggaccatgacttactagctgagtgattttggaagattattttgcctttgaggaactggattccatcttcaaaaccaacagcagaatccaagcctgcctgggttattgtcaatgtcaagcacataagggactgtacagtgtagtggttaaacccatgggttctggacctaagctgcctgtgttcacaaccttactctactacttcctagttgtatgaccttggacaacttacttggtctcttactgtttagggaaaagctctcttaagccatgttgttgtttttttttcctgctctcacacagccaccaccaacacaacaacaatcatcaatacagaggaagacttctgtgaccaaaagtgtgggttttttttctccacacattaagcagtggacaccagccaggcatcctccaattcaactcctaccctatctacctgatgatagagtcacatcccatgggttgggggctcagttcccgagactcccccccgcttcagacaccagtcacatgtccaaacctccagaacttctgaccaattggcttcaagttggggttcccacaaccccccccctttaagtttgattaattggctggagtagctcacagaagtcagggaaacacatacgtttaccagtttgttataaaggatatacaaaggatacagatgaacgttagatgaagaggtgtgtagggcaaggtgtagggggaggggcttggagcttccatgccctccctgggcacacaaacctccaggaatctccacgtgttccgctctctggaagctctctggaccccgtcctcttgggtttttagggaagcttcattacgtaggcatgattaattaagccattggccattggtgatcaacttaaccttcagcccctgtccctttcccggaggttcaggagtggagctgttaagtcccaaccctctaatcctgccttattctttccagtgatcagccccactttgaacctatcacacaaaagaaagacagcacttgggagatcccaaggattttaggagttaggaactacaggaactacagacaaaaatagcaccacttaacctcaggctgctcattacatatggggatgaccttagcacctacctgccaggactcttgggagaatttcatgaggcaaagcacttaaagcagggccttcacctagcaagtgcccaggacatatatgacagggtgtcttgcccgagttgccattgagatgggattaggaaggcatttggggatcaggctatcctccctctagtgggcctctctgtcccctggtaagatgcccttcacctctcaaagaactttcaggatgactggccccagccctgatttgcatgggtgtaggaatttcatgagaaagaacttgaatcctgagcacagatggggtatggaaataggtggacctgtgtaataggtgggaggaggctctatgaaaattaaaactctgggggagataaagtaacaccagagaggaaataggtagacctttataatgggtgggaggaggttctatgaaaattaaaacactgagggagataaattagcaccagagaggaaattcacccactttgcatgaggaagaggattagtggagtgggctggacagggagggccctgctgcttgagggtaagaaaagacagaggttctggatacagcaggaggctactcttggacgcagcccatcccattttgtcccctgcagatcccggacctcggtgcctggaggagagggtagcttggtaaagatgaaaaaggtgccccaaaggctcagctgtgggtctcccttctcctgcacggtttctcagccttgggcattttgggctggacactgttctggagcactgtcctgtgcatcatgggaagtttagcagcctcttcagaatccacccaccagctgccagtagcggccccctactctgagttgtgataattaaaaatgtctccagacgttgccagatatccccgggaacaaaatcgcccccaaatttagaaccgttgttctgctagactggaagaggatattttcctaccagctggaaagagagatgaaaagtggaagtcaggaggtagaaaaaaaaaaaaaaaccagaaaaattccttccagctgcctgagagtgttaactaaccctattgtatatccaagatcaaggcgtgcctgtgttcacctatggctctcagcagacgctcagcagcaatagtgaagtctcagcagtcctgaggttgtggagaaaggggacaacagctggaaagaaggcctacagggtccaaaacaatggcttccattagagttagcgaccttggaagagcccctggagtgctggttctcaacctcggccataccatagccagggtcccactcccagagggctaattttaattaatttaatttaattgggacactgtgattttacaaagcttcccaggtgccacatggttgagaaccagccactataagcaagaatttatatcagtatcacctggaagcttattagaaatgcaggttttcaagccccacccagacctactaaatgccaaggtgatttgtatgcacattaaagtttgagaagcactgacccactgacctaggatataaaaagtgggaacaatgaagactttttattctaacaggtagagtctcttgattcagtaacagctacaccaaactggcaagacctagtggtcatagcctccatcttttgcttaagcagaagagacccgggacagggactgtatagtagatggatcttcctcatccttcgtacttctcaagctgatctggctgcccccacaagcccaatgaaaagacatctgtccttcctagtctgttacatgtcttcctccctctcctcttttctatcttccccaagtagatggaagaacataggagaaaaccccagacttcagctgccctttggctctcctaacctccacattcgctcattcattcaacaactattcattgtgcacctcatgtaggcacacactcttcttgattctgaggattcagtaatacacaagaaagaaagaaattcctgtcttctgggagtctgcatgtctggttattcaaagaaaataaacaaatacgttagtaaatatgtaatatgttgggtggtaagagctcctaaaaaaaataaagcagagaatgggtggttggaaatgcctcgctgggcatatggcaggagggggaccatgttttattttcttctaatggaaagatatgaaactaaagttaccaggccaggtgtggtgcctcacgcctgtaatcccagcactttgggaggctgaggtgggcagatcgcctgagatcaggagtttgaaaccagcctggccaacatggtgaaacaccgtctcttctaaaaatacaaaaattagccgggcatggtggcaggcacctgtaatcccagctacttgggaggctgaggcaggagaatcgcttgaacctgggaggcggagagtgcagtgagccgagattgcgccattgtactccagcctgggcaacaagagcaaaactcaatctcaaaaaaagaaattacagttaccaattaattgttgtcctactatacacctcatattgctctgtataaatcttacacaaactcccatgcccctcgtttcttcactgtagtaaggaacacataatataaaatttactgtcttaaccactaactatacagcacagtagtgttaactatatgtgccttattgtgcacatagaactctagaactttttcattctgcaaaactgcaacaacgctacacccattgagcaacaactctcctttcccccagcccatgacaatcaccatcttaatttctgtttctgagagtctattttaaatatctcatataaatggaatcatgcagtaatatctttttgtgacttatttataggtttaatgacttatttattgttggtttattgcacttcatataatgtcttcaaggttcattcatgttgtagcatatgaaaagatttccttccttttttaaaggtggagtaatattcaattgtatgtatgtaccacatactctttatccattcatccatgtaggtacatttaggttgtttctacctcttgtccattgtgaataattgctgcaatgaacattggtatacaaatatctcttagagatcctgttttcaatttcttttggatatagacccagaaataggttgttgaatcagatggtaattctatttttatatttttgaggatcttccatgctgttttttatagcagctgtaccattttacactcccaccaacaatgcacaaggattccagtttctgcacatcctcaccaacacttgccattttctgttttgtggatggtggctattgtaacaggtgtgaggtgatatctcatggtggcttaaatttcatttccctaatggttagtaatgttgaacataatttcatatgtttgtcagccatttgtctatcttctttggggaaatgtctattaaagtcctttgctcattttaaaatcagattattcattcagttattgttgagttagaggagttctctgtatattctgtatagccactcaccagataatatggtttgcaaatattttctcccatttcttaggttgcctttccattctgttgactatttcctttgctgcacagaagttcttaagtttgatgtagtttcgtttgtctatttttgcttttgttgcctgtgcttgtgttgtcatatccaagaaatctttgccaaatccaatgtcataaagctttccttttatgttttcttctaggaattttatagtttcaggtcttgcttttagatcttattccattttgagttaatttttatatatggtatatggtaagggtccaactttattcttctgcatgtagatatccagttttcccaacaacatttgttaaagaggccattctttccccattttgtaggtttgacacccttgtcaaagaccatttgacaatatatttatttctgaggtttctattctgtttcactggtctatttgtctttctttagtccaatgctatactgttttgattactgtagctttgcaatgtgttttgaaattaggaagtgtggggccttcagctttgtttttctttctcagatttgttttggctatttggggtcctttaagattccatataaatattagaatggctttttctatttctgcaaaatgtgccattggggttttgatagggattgcatcgaacctgaagatcactttgggaaaatatgagcattttaacaacattaagtcttccaactcatggacatggaatgtctttccatttatttgtgttttctttaatatctgtaagcaatgttctatagttttcagttcacaagtcttttgcctcctcagtaaagcgtatttctaagtattttattccttttgatgccattgtaaatgaaagacaagatgaggagaaagataaaaaacaaaacaaatctcctttttagattgttcattgttcatgtatagaaatgcaacttatttttgtgtgttgattttatatccagcaactttgctgaaattgtttattagttctaacagttttgtatgtacgtgtggaatccttagggttttccacatacaagatcaggttgtctgcaaacagaaataatgttagtttggatgacttttgtttctttcccttgtcctctggcaaggacttccagtattataccgaatagactggtgagagagagcatgcataccttgttcctgatcttagagggaaagctttcagtttttcaccattcagcataatgttagctatgggccttttatatatggtctttactatattgaggtaatttctttctattcctagtttgttgagtgtttcttcttttttattttgagacagagtctcactctgtcgactgggctaaagtgcaatggcatgatcttggctcactgcaaccttcgcctcctgggttcaagtgattctcttgcctcagcctcccaagtagctgggattacaggtgcctgccaccatgcccagctaatttatttttatttttagtagagatggggtttcaccaagttgattaggctggtcttgaactcctgacctcaggtgatccacctgcctcagcttcccaaagtgctggaatttcaggcatgagccaccaccacgcctggctgagtgttttttcttttaatcatgaaagggtgctgaatttttcaaatgctttttctgcattgagatgatcatgtggttaacatgggatattatattgatggattttcatatgctgaacaaaatttttgcatttcaaacataaattccatttggtcttgctgtacaatccttttaatatattgttgaatttcatttgctagtattttgttgaggatttttgcacctgtattcatcaggtatattggtctgtagtttttgtttgtttgttttcttttttttttgtagtatctttgattttggtattagggtaatgctaggctcataaaattattttggaagtgttctgtcctcttcaattttgggggaaagtttaaaaagcattgatgttagttctcctttaaatgtttagtagaattatccagtgaatccatgtggtcctgggcttttctttgtagataggttttttattactgattcaatctcctcactagctctaattctgtttagagtttttatttcttcatgattcagtcttggtaggttatatgtttctagaaatgtatcaatttcttctaggttatccaatttgttggcatacaattgttcattgtagtcttttataatcctttttacttatgtgtcatcaattgtaggtcttgtctttcatttctgatttttatttgagcttctctatttttctaagctagtctaactaagaaaaaaatcaactcttaattttgtttatttttccccattttaaaaattatttatttcctttgtttttgctctaatctttatgattttgttccttttgataactctaggtttagtttgttctttctctagttcttttacatgtaaagttaggttattgatttgagatcattcttttttttaatgcatgtgcaatgtgctgctgtaaacttctgtcttagtaacacttgctgcatcctgtaagtttttggcatgctttatctttattttcattcgtctcaagatattttctaattcccctgtgattttttctttgacccattggttcttcaagagtatggtgtttaattttcatatatttatgaatttccagttttccttttgctgctgctttttagttctattcctttatagttggaaaatgtaactggtatgattttaatcttcttgaatttgttaagacttattttatggcctagcatgtgatctgtcttgaagaatgtttcatacgcacttgagaagaatgtatattctgttgttgggtagggtattctagatatgtctatttggtccaattggtctatagtcttgttcaggttttctgtttccttactgattttctgtttgattaattatccattattgaaagtggggtatggaaatctctcttccttatcatgttactgtctatttttctctttaattctgtcaatgtttgcttcatatatctgggtgctcttctgttaggtacatatatgtttataattgttatatcttccttgttgaattgacccttttttcattatacaatgtcttctttgtctcttgtgacagtttttgatttaatgtatattttttctaatataattatataatcaccttgctgtctttggttaccatttgcatgaaaaatctttttctattctatcacttttagcctattgcatggaatatctttgtccgttcttttacttttcatttatgtatgtccttatgtctaaaacgagtctcttgtagacagcatatagttagatcttgtttttataagtcagtttaactactttatgtcttttgattgctgagtttaatccatttacatcgaaagtaattactgatagaggacttactattaccattttcttattgttttctgtgtgccttatagttactttgttccttttttcctctcttgctacattcctttgtgttttgttgattgtttttgtagtgacattctttgatttcttatattctttggtgcatcttctatagttatttgctttgtggctacaatggggattacataaaatattttataattataataatatgtcttagactgataataagcctcagttgcatataaaaacttcacgctattacaccttctttctccctacacactttgtattagcaatatcacgaatttcaccttttacaattttgtattcattatacttatatttttatactttcatcttttaagttttatactagaattaaaatgatttaggcatcactattatagtattacaagattctatttgtctatatatttatttttactagagagttatatatttttgtatgctttcatgttgctgtctggtgtgtcctttaattataattttcataaggcagatctaatggcgatgaactccctcaccttgtttacctgggaaggtctttatttctccttcattttgaaggacaatcttgctagataaaggattcttggttggcatggtttctttttcctttcagtactttgaatatatcacctctttggcctctgggcttgtaatgtttatgctgagaaatctgctgataatcttatgagaactcttttgtaggtgatgagtcatgtttccttgctgctttcaagattctttccttccttgtctttaactttttcttgtctcaatattgacttctttggggtcattgtagttggagtcttttaagcttctttactttggattttgattttcttctttagatttaggaagttttcagccgttatttttttcaaataagctttctgttcctttttttctcttttctccttctaagactttcataacacacatattggtctattttatggggtcctctaagttccttaggctttattcacttttgttcattcttttttctatttgttcctctgacttaataatttcaaatgacctgtttttgagttcactgattcttttttctgcttaagtctgttattgaacccctccagtaaaattttaaattcagttattatagtcttcagctctagaatttctgtttgatcttgtattatagtttctaactttttgttgatattgtcattttgttcatgcatcattttcctgattttatttagtttgtctatttgtgtcctcttgtagcacattgagcttcttaaagacaatgattttgaattctttgtcaaataattaatagatctccatttctttagaattggtttctgaagatttattatgtacaccacccttcctttttttttgagacagggtctcatcctgtttcccaggctggaatggagtggtgtgataatagctcattgtaacctcaacttctgggcctaagtgatcctcctgcttcagcctcctgagtagctaggactataggtgtaccactatgcccagctaattaaaaaaaattgtttttagagatgggggtcttgctatcttgcccaggttggtctggaacacctggcctcaaattatccttctgcttcggcctcccaaagcactgggatgacaggtatgaaccactgtgctcagcctattttcttcctttagttgagccatgttgccttgtttttcgttttttttttttaagtgtgctttgttatttttttagtgatttctgcatttgaaaaacaacaacaacaacaacaacaacaaaggagttctcccagtctttacagagtagttttacacaagggaaagtcttcagcagctagaggttctgggggctttccttgggatatatattctctgagcttgcatgtgtactttcttaattaaagaggtttactgggtcttgtttgtttttccttcaagggtttgtaatttcttgctccctctggtgtctgattatggtactcaggttctctggtgttgcaaaaagccagtgaactgtcttttgttctccatggcccccaggcattgaaagtatgctggttccccatcagcactctggtttctgtcaggtgagacagaaaccggtccctctgcagcccactgaaaagtgggaacactgaatgtatgctatgctcttctctttcctttccaagggggaagctgcaagttgaactttttccttcagtctcactgaactgtgacagttgggagaagggtttttatggttgacatgaaacaatttttcttatgcatttcaatatggtggcttttcactttgagcttgcctggggtactgtaacttcttaactggtttctagagttctcataaaggcttttttggactgtgtattgttgttaagtcagtgtttctgtggggcagaatgtctggggcttcctattctgccatctagctgatgtcactcccaagcccctggcacctcctccaggcacctttcccccactgcccctcagcagaagccacaggactgtaagggccatgagggggcgccagggatttacaattataaaggtcttgttgggccataataaagtctctcccagctaacaagtgaccatggggcatgtgatggtcttgctttgttcacccatgtgcgtcttgcatattattcatgctatggatgaacatgtgctcctagccatttcaaggttagacatgttttgagaggatgttgcatctgtgacaactgtcaggagtcacaggtcctgggtcgctgctctgccacccatgtgtgacacctctggctctctcaactcatgcgttttaagacccacactttctcttggagggcatggggagataaatacctcttgatcctaagaattcagttgggaagtgtcacaaggagggtatgaggaagctcagagacacaaccatttccaaacccaagttaagaagtctgagccatgagtgactcagccaggagtagagcttagctcacaatggtggggttgaagctgggtcctaccttcccatccatgtccttctttttctcctttctcccgtccaagtactaacaaggcctgaacctgcttagcttccgagatcagacaagatcaggcacgttcagggtggtatggccgtagatctctttttctcctttctataaattccttgctttcctatattacacacccacacaccagctgcccctcagccatgagcattgtcagggaagggtcagactgtcttttaggaggccctagtaaaaatccattgaattggcttgaatccttttctttctatatccccatgctactcccaagcctgtgaatttcttgccagaaatctctagcattggactaactagattctagaggcctatatagattttactctttatagattatcttattggaaggcacattcattcattcattcaacatatacttttgatttttctcaaggctgcccatatgacccagaaattcatgccccagtctctggcatggtgacaaagcatagtatgcccacaggagaagaaggctagtattggaagtatttctggaggctttgaagggtctccaggacattcattcacataactctgcagagcagtccactgggaaaccctttgagttacctcatggctggagtgcctatagatagagctgtctgctgcagtgtggaggcggttggacagcaggtagttatataggctggggctgcagctgacaagactggggaagcccagggtgagcaaaggccattaagggcagaactgggcatctggggaaatggccatggcaatgtcttctaaacagaagtctgaggtcactgggctgggttctgaacccagtgtctccacatgcccagcctgatcatgtttttcaccttggtttgcatgtgtatgggcaaggggcaacaataagcttgttagggtttccttttatagagactgtaagaggaagtacatttctctactactccctgacacaatttttagattatctgtccacccactcagatatatttttccctcagttcattcaaactgcgagagagaaagagagagaaagagagagagagagagagagagagagagagagagagaatttgaaagaatttattgaaataaggttcctttcagccaagactgccacctctgtccttcctctgggggcagggagacagagacagggctgtaatggagtcgtgtctagttgagaaaagcttcttagctctggtcagctcttttaggccttcatgctgtgtctggcatatgaccagcccaaatctttttctctctccctcccttcctgtttcataccagtgaggtggtagagcctatattttaagatctcagtctcaggagtcagagaatcctgtgtttgaaccccagctttgccagatgttattgtatgtgtgagcttgggcaagctacttaccctgatccccatttgttaaatgggatgaagaataatacctgcttctttgggatattggaaggtttaacagaaataacgcaaggaccaaagtcatgattgtgtggggcacacacagtcagtgcctgataaatgatggctgaaattccttcaacttcctgcttactgacacatgcatcctgtggcagccctgtgctggatcctcaatgatatagtggtaaaaaaggcagaccatgctctgtgtccccaaggaactcagtctggtggggagatggttatggaagtcatgggcaagtggcattcaggatccttccttcccagattttcattgtgggctgggtttctgggtctgtgtgctaccagacagagccacaccaactggtttggtttcctaggcctttagggagttgggtccatatgaattgtacttttgtaaaagcactggattgtagtttgttcattcattcaaccaatattaactgagtgctgactatgtgccagttactgttctaggcacttgggacgcatcagtgagtaaaacaaaggcctttctcttgtgaagtaaatattctagcaggaggaaataaacaataaacagtaagtacaatatataagtaaattacatagggtgctacagagtgatacatgctattgaaataagaaaacatagagcaggtaagggagattggaggtgccagcgatggaagtagggggttagttaatattttatttcattttattttattttttaacttttattttagattcaggggtacatgtgcaagtttgttatatagtcaacccatgtcatgggggtttgttgtacagattattttgtcacctagatattaagcctagtacctaatagttattttttggatcctctccctcctcccgttctccaccctcaggtagtccctcgtgtatgttgctcgcctctttgtgtccatgtgtttgcctctttgtgtccatgtgttcttatcacttagctcccacttataagtaagaatatgtggtatttggttttctattcctgtgttggtttgctaaggataatgacttctagcttaagatggagatcttaatatatatgcttcattcatgttcctgcaagagacatgatcttggttttttttttatggctggatagcattccatggtgtatatgtaccatattttctttatccagcctactatcgatggacatttaggttgattccatgtttttgctcttgtgaatagtgcttcaatgaacataaaaacgtgtgtctttatggtagaatgatttatgttcctttgtgtatatacccagtaatgggattgctgggttgaatgatagttctgtttctaggtttttgaggaatcaccaaactgctttctacaatggttgaactaatttacactctcaccaacagtgtataagcattctcttttctccaccaccttgccagcatctgttatttttttactttttaatagtagccattctgggtgctgtaagatggtatctcattgtgattttgatttgcatttctctaatgatcaatgatattgagctttttttatatgcttgttagtctcatatatgtctttttttttttttttttttttgagacagagtctcgttctgtcacccaggctggagtgcagtggcgccatctcggttcactgcaacctccgcctcctgggttcacccgattctcctgcctcagcctcccgagtagctgggattacaggcgcacaccaccacgcccggctaattttttgtgtatttttagtagagacggggtttcactatgttggccagactggtcttgaactcctgacctcgtgatccgcccgccttggcctcccaaagtgctgagattacaggcatgagccaccgtgcctggctcatatatgtcttcttttggaaagtgtctgttcatgtcctttgcccactttttaatggagttgtttatttttttcttgtaaatttgtttaagttccttacagatgctgaatattagacctttgtcagatgcatagtttgcagatattttctccccttctttaggttgtctgtttactctgttgatagtttcttttgctgtgcagaagctctaaaagacttaaatgtaaaaccaaaaactgtaaaaactctgggggacaacgtaggcaataccattctggattggcaaaagtttcatgatgaagatgccaaatgtccattgaatgatgagcccctgctggcatctagactggtctgagctgagccagggccatactgaccccatcactaatttgcttgagcagagggagctgatttgagctctcccttttgataggaacaactttcaaatcaccatcagtgctcatacaattcaaacgtgtagttgggggcatcaaaacacaaaaccctttcctttatatgtaaaatgagcaacacgtctgctgaagattgggaaagcaaagtgaaattgcagatgacctttgaatgccttaatttaaagaatgatctggattgatcttgccctggatctgctgccactgtcttcatgagtgaaccttctggattcccagtagatgtccagtctgaagctgtcagaggaatgagggggttgggctgctatggagaaacaagaggatgcatccaacagctggtgaccacatgtcatgccctccttgatgctggccctcatgctttctgatttcaagtcttaccacccctcatctctagagagttagcctcccacctgtcctcctctgtgtcattggctactgaagaataagtgccaggaacatctcgggagtacaccttgcaaggattgccctccctatcccaggactcctgtgtcaaatcacctctactgtggttccgtctggcccaaggcaggaagacagagtctcgggcactcaggattctgaatggagctgcagtgctctctcttctaccttcacccctttccctcttcagcctctttccctctttctatcccttcattcctttatctcaccaattctctttgttactttcttatcattgtagttcctttttcttctggtgcagaaattatgggagaggttggacaggcatccccattggcttaggagcagaagaaacagcctcccctgaggacatttacggttccggaccatggacagggctactcttgctccagtcaggcaccaacaactcacttgggctagctgcatcagagcatctctgtgaatgtggtcttgagaacctcattccatagatagaggggcaggggccataagtgactaagggacttgaccataccccttgctagcaagtggcaaggcagagttaagaacccaggctttctgattccatggcactatgttagggttttgggtttttttttctctctctctcattagggttttgttttctttttctctctctcatttttaaaattaattttcaaatatgtctcacataagggcacagggcttgaagttgcctattttctttagggatgaggccagttccaccagataaaacaggagccatgtgtttttaatggataaagaaacaaatgaaaagaaaaaagaaagacaccgttgacaagcagacaaattaatccatttacttgacaaatattaatggagtgtctatgaaatgccaagccttgtgttgggatttaacagtgagtcaggcgtggtcctgccctcatgagattctcatggtgagagaaacagcagcataggcttggtttcacatattttgacaattcactcctatttcccgagttattatgattctttttcttctgggaagttcaatgtgctcaggcgtccccatgtggtcccctttctgccactgtgctgaacctcaccatagtggactcattccccaaatgtcaggcaatgggacagaagcctaggagttctaactgacatgactgacacttgaggaaagggctacctaaggtgaagttctttgctgtatgagagtgctgtagaaaggagtttagcttactacattggccatccttcatccatccacccacccacctatccatccatcatctatgatagagtagtggttaagaagacaggatgtggcaccagattgcctggggttgattcctatttccatttttatcagctgtctgaccttgggcagattacttaaccttcctagacctcagtttccttacctatgaaatggggagagtaatagtacctatctcatatggttgtgaggatggaatgaattattatatgtacagtgcgtaggacagtacttggcacagaaaaaatgtttaataatatattattattattataccgtaagctccatgagggcaggaagcactcactgggacacagtgggtgcttaatactattttcaaaataagtaaatgaatgaatcaagcatttgctaagccctcaactttcatgagtctgttcctgtgcttagccattgtcccgtggaccaaagccatagctcaggcatcttctcagctggggagaactcaatggtagttccttgttttcactctgaaagacccagacaggagtagaatcagcctggcagaggcccctggccccagagatacctggccctttctcttgctgctgatccagggctgtggcataataagaatcagtaaagcagagatgcttctgctagtccaggattccctgtcaaaataataaacaacccttgactagtgttggcttaggatgatggaaaatgaactgcatctgtatcaccatgcagggaaaatcatgtttggtccgcaatggtggcttctgtgttaaacatgtccaggagaatcagaaagcctggagttagaattaggaagctgagtggcatgggattattcccacgaagcaattgaatatggtacagggacaggcttgctgcttcaccccacctgccatgcattgttttgtgcctttgttgcatgcatccccagcttgagaggaaaaaggagacccgttttgtatccaggtccctgaggcacagcaactgtgctaagctcttttcaataaatcccaggctctgacccctggtgctgggtgcagagtggaaccagaactatagctttgagagtatgtcctgagatgatgtgtgtgaaatatttgcagcctggcagagggaagggtggtagggttgagagcctgggttttgcttttgtacagatctgggtttgaatctcagcttttccattgctacttgtttgaccttgaacatgttttaaaccttgaagagccttagtttctttacctgtaatatgatgagggtggggctgtaacagccatttcaaaagggtcattgcaaatgttagagagataatgttagtgaaccacagaaatgttggccccttctcagacttgcatgaaagcaccagtccttctaggtttgtctgtgctcctttctgttcccctaagattgaacagcatggtttccctgaaccacttgtcacgtggagatggctagtaagatgggccatgtctgtctcctacaatccactgtgaactccttgagggcatggaccatattatatgcaatctgcccctcccatctcccccaactccctactgcccattaacacccccacctataaaccctggaactaagccatccattccccagatttgctgactgaaagactgaatttgtcttggacctctggggttcttgatagaatccatggggtccctaacttggatgaggacaattgcattattttcactaatctcctactgaaacagcatttctaccaatcatgaagataggcaacaaacacggaagtggtattagcagtacctgtgaatttgtcactggtaagatcacagatatttccatagaacattacagttgttacaattatcttgaagtagcatttatgcttcaaactacaatatgtatcaggcccactgctagatcttattaataatgcattaataaaggagcacttattagtgtatgatcgattttcagtatattttaaaaactatatttcaatctagctgatttcctttgcaattctatgtattttgttttacatattttaagacaccatttgaggtggtgtcacgaggctccaaggagggcatggcacgacaaagatggaggacttcaggtcatggaggtccagggataggcttttttggcctgctaatcccctgaaatgaatgaaaacggcagaaggttagcttcctatgtatgtgattctagaaaaagtatttctgactttcattaggaactccaatatggctaagaattagaccagtcgttctcaactagaggtgattttccccctaggggacatttggcaatatctggagaaattttggttgtcacattgggaggtgctactggcattcagtgggtagaggtcagggacgctgctaaacatcctatatgtacaggacagcctcccacagtgaagaattatcccacccaaaatgttgatagtgttgaggttgagaaaccctggattagactactgcacattcacagaaatctctccgattgttaagatctgtagtaaaaaaaaatagtgcacatcttcattaaaaacatctgtgataattgtgtcacccagcacttaatgcacgaaatagggagatgggggtagcggagagcgaagagtaactgcctgcagactagaggaggctccttagaggagatgaactgagcctgggaccgtgagttagatttgctaggttgagaaggttgcagtggaagggcgtatgaggcaaagggccaagcactgcaggtgacaaattagtggtgtgactgaggcacatgctgtgcaggggagaggggctaaaatgaggctcagtgccagcatccctaatgacctagttcttggtcctttcctaaaggatcattgtagagagccaaagatactgtttgacccctgcctctctcatcagcggacaaggtgcccctgccagaaggcatgcatagtgatgggccagaggctgattgtagacttgaggtgtccagctggtgctccgtgtggcaggtgagacaccttcagcgggcgtgatgatttatccagcatctgcagctccccgctgtgtttcctcttagggcagtttcattaattgcgtggcttcaacaaatccatatccccagtccagattgcactcccaaacaccagtctacagccctaactgccttctggccatctccgtctggatgtcccactggcatctccaactaaatttgtccaaaattgaccttatcagtcaataaatatttgcagaattgaattgaattttcctgccaaacttctcaagagagttatctccttaaaattatcattatttgtagacaacatgattgtgtacctaaaacacccaagggaaccaactgagaaatttttagaattaataagtgttcagaaacctggctggatgtgagatgaatgtataaaaatcaataggttttctgtatatcataaaaaccagttagaaaaaaataatgagaaaaatgacattcactagtgcggcaaaaagtgcataaaatgtctgtgaataaccttaacaagatgtgactgggacttaaagaaaagcatctaatctttactgaaagattaggtggtgtttgctgtgccaggttctgtactgaacatttagcaactcagcagatatcacattaatctgtacaaccatcctagaagtgggtgttaattttaaagatgtcaaaactaaggcttaaagagtttaaataagttgcccacacacaatattaagtggcaaatctgaaatttgaacccaaagcttttgtttccaaaacctatgcttttaacctttccactaagccacttccaaaataaaccataaatacacagataaatgaagttggtgagtattttctgaatattagattagtgcaaaagtaattgtgtgtgtgtgtgtttgccatcattgttaacggcaataaccggaattacctttgcaccaacctaatacaaaagattaattcatttcactcactcattcatttaaaaatgtgtactgagtgtctactatgggcaagtactgggctaggtgatggaaataaaattgaagaaaagctcaaggagggtcggacgcagtggctcacacctgtaatcccagcactttgggaggccgaggtgggcgaatcgcaaggtcagatcaagaccatcctggctaacacggtgaaaccccgtctctactaaaaacgtgaaaaattagctgggcgtggtggcgggtgccggtagtcccagctactcaggaggctgaggcaggagaatggcgtgaacccgggaggcggagatagcagtgagccgagatcgcaccactgcactccagcctggttgacagagcgagaatctggctcagaaagaaaaaaaaaaaaaaaaaaaaagctcaaggagtttgctggtagagacagccacataaacatatcattatatcaccattgatgaaggcaatgacattcatcatgaatgataaacaaggagtggacgaatacttgatggtgtcttgagggttcccagaaggctttctggagaaggtaatgagtttgaaaatgcctggagttagccgagtgaaggaacaatccaagcacagaatgctaggtgggcaattaatattcatttattcattcattcaaccaacaactattctgtgagcatctattatgtaccaggttcaggtctgcgagctagagatagagcagagaaaaaaatggtgccccactctcatggagattgtattttactggggagggtgcatcagaaaattaacaagaggaaaatatatggcagaggtgctaagtgctatcaacaaataaagcaggcaccaggaacacctggcttgagaagcaggtctgaattgtacttagggtagtctccaaggaggttatatttgactagacaccggaaataagtaagggtcccatggctactggggaaacattttctgggctgaagtcttggcaaatgcaaaggtccagcatggccggattacagggatatggccggattacagggatatggttggattacagggatatggccggattacagggatatggttggatcacagggatatggccggattacagggatatggctggatcacagggatatggttggatcacagggatgaggggacaagagataggagaagaggtggacaggcatctgggtacccattcatttaaagctttgaggactatggtgaggactttggcttttatgttgagtgagatgagaagccaaccaatctttagttgagagaagtctttctcagtgtgaacaagggaaaaatattaccaagaaaaaagagataaatgtgactgcctatagaaagtgaacattttggccaggtgcggtggctcacgcctgtaatcccagcactttgggaggccgaggcgggtggatcatgaggtcaggaaatcgagaccatcttggctaacacagtgaaaccccgtctctactaaaagtaaaaaaaattagccgggcgtggtggcgggcacctgtagtcccagctaatcgggaggctgaggcaggagaatggcattaacctgggaagcggagcttgcagtgagctgagatggggccactgcactccagtctgggtgacagagcaagactctgtctcaaaaaaaaaaaagtgaacattttaatctacatgggaaatctaaacaaaacaaaaagcacacaaccaggtagaaaacaatatttgcaacaaatatgacaaaagattaaaattctgactctataaagagttagtacaaattaacaagaaaaatagtaagacctaatagaagatttaagtatataacatttagaaacttcagtatgtcaaacatgataaaattaaaaggccaaacaactacaaaacacatatatagcacatgcgatgcataaaggattaatatattacacatatataaaatagataagtaggtaagaaatgagggaaaaaaataccacaatgaaaaatgagctgaggatttgatcagctagttccaaaaagaagaaattaaaattattagaaaaagtgaaaaagatgttgaatctgagtcataaaacatcactaagtaaaatgagatcacattttttgcacctaataagcaggcaaaaagtttccaaataagacaatacacaaggttggcaaaggtgctgtgagataggtattcctagacataactattgagagtttaatgggtgcacatttcctagaaaggatattgttaacccagagccaaagcctcagaaatgttcataccatttgacccagtcatctgctatttggaagtctgtcctggggaaatcatccaaatcatccaaaacaaatgaatgagcaatgacttgaggagtctagttctctgagattgttctggagcctgatgggggtagctgcattgaccagaaactcaaagcatgggtgaaagaaggcagaccatcctggctagagagaaatgcaaggtgccgtcaaaatggaggtcagtagcagcattcccatctacagggcagaacatcagtcactagaagtgaagaacgggtagactttttcttgaaagaaattcaacgtttcatgggcatgaaaggacaaagccattctggcatgagctcccattccattcacatttcaatctggagtggctgctctgggttataacttcttcaacttactaacatacattggtttcagggaggtttccaaatgagtcaggcttctaaccctttctagccatccctgagagaggtcagccagcctaatgtggacagtaccttacccgaccccacctgaaaccaaagctggaggcagttactgtataggggaacatttattctgggactctggccgtggaaaggcattttccactgcattgaccagcatcctatcaccagatctaactaagggtccaggtcttatttacaatggaacaaaaaatccagaagcaatttaaatgtttgacaataggagaatggctaactaaattctagtataaccatacactgaaacgttgtgcatccatttaaaatgctgtttatgaacagattcagtatcttagggaatgctcacgttataatgtttactgaattgttacaaaagaaaaccgagaaatgacctgaatggccatcaacaggggagtggttgaataaattgagatacatccatggcatggaatattacacattcatataaaaaataagttagatctgtatctactgacctggaacgtgtccccggtgtattgttaagtgagaaagcaagttgcagaaaaatgagctaaactacagttttattttttaaatgaaataatcaaaattctcccagaatgtgtctgtgtggtttgcatgagagagaagaaggtgagggagggacacatacctggctgttaacttcggtaattttggattgggtggggaggagggagactgcatatatatttttttatacttgcattgcgtatgtgcatatctatgcatattacaagtccacattgcctttttaaattgaagattgaagaataacttacagaaaaagtagcacacaaaattatacatatggtgttatctcaccagtgtgaaatatgcatggaaaaaaatctcagaaaaatgaaaatattaacagcagttgcctctggaaggaagagattataatcagttttctctttttaaatcttgcctgtatttttcagtttctacaatgtagaagttattgtttagaatacaatggccttccaccttctcatcagccaatcttgcctattacaatctgccctctttccaccttgccatcctcccacctgcctttgctgaaattgatctatccattcagcaaatacttattgaattctaggcactagggatgcagcagggaccaggtcaaggctccagctctcagcattgcttccagagggactatttagacaccagacagagtgacctcattcaagaccctcatcttagtctttctgtgctgttcaccacattgagtcaacctctcccacatggaactgccctctggatcctctccgactattctacctgttccctgctctgtcaccttttctgtccccttacatgggagatgttcccagaggctctgttctgaactccttcacttctttctctatagcagaagatgccattcacacccagattcttaatcagaatctcctgtccttggcaggtctgagccaaggcagaggtctgggatgctggagatggtggtgaatgttgatatttcattggttgtccacaacacgaatcggggaggcccttaagatgtggcccctgtggcatctatacttcagaaccactctgtgtacccctctagcatggtattgtctaatgacatattttgatttacttgtttctagtctatgatccaggtccccatggcttatcacagggtctatcctagaggaatgaatgaatgaaggaaggaattaatggcatgatgcagtgacattaccaggcaggttttagggacaggagcaaagtaaatctggtacctgtaccagtgagggaaagttcaaggaagtgtactcagggcttctctgaaagttgtggagttagaggctttatttcattatcactgtggttggctatttttctggcttctgggccatttatgtcttcttttgtgaactaatttgttcagatcctgtccaattattactaatagtacttttccccctaagtattagtaatagttctttctatattcaccatattacttttctcctaacatttttgtatgctttctgatattctgttgttgacatatgcatacttttaatatcaatcttgtagtatcctccacagctattatgctaaaaaatcacggtcagataattacctaggttttcttctcattattttatgactttatttttttaccatgtaactctttgctccatctggaagttatttttgtatatggtgcgattcgaggagataacttaattcttttcccaaacagtttattagttgatccagcaaaagtctttttcttttctcaattttttttaatattgcctgatacatatttccatttttatgtgcattaaagatattcatgcaataccatttcatgtcctacctgtttactcctggaccacccccacactattttcataagtgtcatttatgatgctgtttagtatcttgtgaaatgagactgctaaatttactatcttctctaaacaatgcattgtgacaatctatttttctttttttttctttttatttatttatttatttatttatttttttattattatactttaagttttagggtacatgtgcacattgtgcaggttagttacatacgtatacatgtgccatgctggtgtgctgcacccactaactcgtcatctagcattaggtatatctcccaatgctatccctcccccctccccccaccccacaacagtccccagaatgtgatgttccccttcctgtgtccatgtgatctcattgttcaattcccacctatgagtgagaatatgcggtgtttggttttttgttcttgtgatagtttactgagaatgatgatttccaatttcatccatgtccctacaaaggacatgaactcatcattttttatggctgcatagtattccatggtgtatatgtgccacattttcttaatccagtctatcattgttggacatttgggttggttccaagtctttgctattgtgaataatgccacaataaacatacgtgtgcatgcgtctttatagcagcatgatttatagtcctttgggtatatacccagtaatgggatggctgggtcaaatggtatttctagttctagatccctgaggaatcgccacactgacttccacaatggttgaactagtttacagtcccaccaacagtgtaaaagtgttcctatttctccacatcctctccagcacctgttgtttcctgactttttaatgattgccattctaactggtgtgagatggtatctcattgtggttttgatttgcatttctctgatggccagtgatggtgagcattttttcatgtgttttttggctgcataaatgtcttcttttgagaagtgtctgttcatgtccttcgcccactttttgatggggttgtttgtttttttcttgtcaatttgtttgagttcattgtagattctggatattagccctttgtcagatgagtaggttgcgaaaattttctcccattttgtaggttgcctgttcactctgatggtagtttcttttgctgtgcagaagctctttagtttaattagatcccatttgtcaattttgtcttttgttgccattgcttttggtgttttagacatgaagtccttgcccatgcctatgtcctgaatggtaatgcctaggttttcttctagggtttttatggttttaggtctaacgtttaagtctttaatccatcttgaattgatttttgtataaggtgtaaagaagggatccactttcagctttctacatatggctagccagttttcccagcaccatttattaaatagggaatcctttccccattgcttgtttttctcaggtttgtcaaagatcagatagttgtagatatgcggcgttatttctgagggctctgttctgttccattgatctatatctctgttttggtaccagtaccatgctgttttggttactgtagccttgtggtatagtttgaagtcaggtagtgtgatgcctccagctttgttcttttggcttaggattgacttggcgatgcgggctcttttttggtttcatatgaactttaaagtagttttttccaattctgtgaagaaaggcattggtagcttgatggggatggcattgaatctgtaaattaccttgggcagtatggccattttcacgatattgattcttcctacccatgagcatggaatgttcttccatttgtttgtatcctcttttatttccttgagcagtggtttgtagttctccttgaagaggtccttcacatcccttgtaagttggattcctaggtattttattctctttgaagcaattgtgaatgggagttcactcatgatttggctctctgtttgtctgttgttggtgtataggaatgcttgtgatttttgcacattgattttgtatcctgagactttgctgaagttgcttatcagcttaaggagattttgggctgagacaatggggttttctagatatacaatcatgtcgtctgcaaagagggacaatttgacttcctcttttcctaattgaataccctttatttccttctcctgcctaattgccctggccagagcttccaacgctatgttgaataggagtggtgagagagggcatccctgtcttgtgccagttttcaaagggaatgcttccagtttttgcccattcagtatgatattggctgtgggtttgtcatagatagctcttattattttgaaatatgtcccatcaatacctaatttattgaaagtttttagcatgaagggttgttgaattttgtcaaaggccttttctgcatctattgagatagtcatgtggtttttgtctttggctctgtttatatgctggattacatttattgatttgcgtatattgaaccagccttgcatcccagggatgaagcccacttgatcatggtggataatctttttgatgtgctgctggattcggtttgccagtattttattgaggatttttgcatcaatgttcatcaaggatattggtctaaaagtctcttttttggttgtgtctctgcccagctttggtatcagaatgatgctggcctcataaaatgagttagggaggattccttctttttctattgattggaatagtttcagaaggaatggtaccagttcctccttgtacctctggtagaattcggctgtgaatccatctggtcctggactctttttggttggtaagctattgattattgccacaatttcagctcctgttattggtctattcagagattcaacttcttcctggtttagtcttgggagagtgtatgtgtccaggaatttatccatttcttctagattttctagtttatttgcgtagaggtgtttgtagtattctctgatggtagtttgcatttctgtgggatcagtggtgatatcccctttatcattttttattgcgtctatttgactcttctctctttttttctttattagtcttgctagcggtctatctattttgttgatcctttcaaaaaaccagctcctggattcattaattttttgaagggttttttgtgtctctatttccttcagttctgctctgatttcagttatttcttgctttctgctagcttttgaatgtgtttgctcttgcttttctagttcttttaattgtgatgttagggtgtcaattttggatctttcctgctttctcttgtgggcatttagtgctataaatttccctctacacactgctttgaatgcgtcccagagattctggtatgttgtgtctttgttctcgttggtttcaaagaacatctttatttctgccttcatttcgttatgtacccagtagtcattcaggagcaggttgttcagtttccatgtagttgagcggttttgagtgagattcttaatcctgagttctagtttgattgcactgtggtctgagagatagtttgttataatttctgttcttttacatttgctgaggagagctttacttccaactatgtggtcaattttggaataggtgtggtgtggtgctgaaaaaaatgtatattctgttgatttggggtggagagttctgtagatgtctattaggtccgcttgctgcagagctgagttcaattcctgggtatccttgttgactttctgtctcgttgatctgtctaatgttgacagtggggtgttaaagtctcccattattaatgtgtgggagtctaagtctccttgtaggccactcaggacttgctttatgaatctgggtgctcctgtattgggtgcatatatgtttaggatagttagctcttcttgttgaattgatccctttaccatcatgtaatggccttctttgtctcttttgatctttgttggtttaaagtctgttttatcagagactaggattgcaacccctgcctttttttgttttccattttcttggtagatcttcctccatccttttattttgagcctatgtgtgtctctgcacatgagatgggtttcctgaatacagcacactgatgggtcttgactctttatccaatttgccagtctgtgtcttttaattggagcatttagtccatttacatttaaagttaatagtgttatgtgtgaatttgatcctgtcatgatgatgttagctggttattttgctcgttagttgatgcagtttcttcctagtctcgatggtcgttacattttggcatgattttgcagtggctgctaccggttgttcctttccatgtttagcacttccttcaggagctcttttagggcaggcctggtggtgacaaaatctctcagcatttgcttgtctgtaaagtattttatttctccttcacttatgaagcttagtttggctggatatgaaattctgggttgaaaattctttcctttaagaatgttgaatattggcccccactctcttctggcttgtagggtttctgccgagagatctgctgttagtctgatggacttccctttgagggtaacctgacctttctctctggctgcccttaacattttttccttcatttcaactttggtgaatctgacaattatgtgtcttggagttgctcttctcgaggagtatctttgtggcgttctctgtatttcctgaatctgaacgttggcctgccttgctagattggggaaattctccgggataatatcctgcagagtgttttccaacttggttccattctccccatcactttcagatacaccaatcggacgtagatttggtcttttcacatagtcccatatttcttgaaggctttgctcatttctttttattcttttttctctaaacttcccttctcacttcatttcattcatttcatcttccattgctgataccctttcttccagttgatcgcatcggctcctgaggcttctgcattcttcatgtagttctcgagccttggttttcagctccatcagctcctttaagcacttctctgtattggttattctagttatacattcttctaaatttttttcaaagttttcaactcctttgcctttggtttgaatgtcctcctgtagctcagagtaatttgatcgtctgaagccttcttctctcagctcgtcaaagtcattctccgtccagctttgttccgttgctggtgaggagctgcgttcctttggaggaggagaggcgctctgctttttagagtttccagtttttctgttctgttttttccccatctttgtggttttatctacttttggtctttgatgatggcgatgtacagatgggtttttgttgtgaatgtcctttctgtttgttagttttccttctaacagacaggatcctcagctgcaggtctgttggagtaccctgcagtgtgaggtgtcagtgtgcccctgctggggggtgcctcccagttaggctgctcgggggtcaggggtcagggacccacttgaggaggcagtctgccagttctcagatctccagctgcgtactgggagaaccactgctctcttcaaagctgtcagacagggacatttaagtctgcagaggttactgctgtctttttgtttgtctgtgccctgcccccagaggtggagcctacagaggcaggcaggcctccttgagctgtggtgggctccacccagttcgagctttccggctgctttgtttacctaagcaagcctgggcaatggtgggcgcccctcccccagcctcgctgctgccttgcagtttgatctcagactgctgtgctagcaatcagcgagactccgtggggtaggaccctccgagccaggtgcgggatataatctcgtggtgcgccgttttttaagcccgtcggaaaagcgcagtattcgggtgggagtgacccgattctccaggtgccgtccgtcacccctttctttgattaggaaagggaactccctgcccccttgcacgtcccgagtgaggcaatgcctcgccctgcttcggctcgtgcacggtgcgcgcacccactgacctgcgcccactgtctggctctccctagtgagatgaacctggtacctcagatggaaatgcagaaatcacccctcttctgcctcgctcacgctgggagctgtggacgggagctgttcctattcggccatcttggctcctccccccgacaatctatttttccagttaaacttaggtatcattttaccaaacttaaaacgggtcattgggcttttcatccgaattgcattaaacttataaattaacttttctgtaacttgtcaagaggttaatatcataaattaacctttctgtatccactcaagattatgctatgtctctccagttattcaaattttttatccctctgtaaaagtcattttcatatcgtgcctgcacacttcttgttaagtttatatgtactatatgcattttgtagttaccataaacaagatcttttttctttatatttttatctgtcattgacatataggaatgttactgatttttgtatattattttgcatttggctagtttattaaaatttcatattatctataatagctttataatgaattctcctgggttttctaggtatattaatgtatcatctacaaaccataattttgcttcctcttttctcatttctttttcttgtgtcacatgggttaactcttccaataagccgtgaaatcccagaggtgatggtggcacctctgtcttgttcccaatcttaatcaggtgtttcaccttaagtacaatgtagagtattgttctaaaattgaagctttatcatagtaaggaaatattctttttcctagttttgaatgcttattttaatcagggttacatgcctaattttatgaaatgcctgtttaggatttattcagaagaccttaacatttttttttctcatttaatgggatacttcgtgttaagagatttcttaatattaaagtcctttagagattaactgtcctttgtcagttaatccctaaaatgggctttaaaaaaattagtgtcgagtcaatttatcagcatcatggtgaagaaaatggattcgaagtggaatacttatgtttgaatcccacctttgtgtaacagtgacttgggccccattacttaatttctttctgccttagttcttcgtctgtaaaatggagatgatagtaatagtatctaccgtatagggctgttgtgaggattagacaaatcaatataggtaaagtttttaggagagtgtctagccaaacactaagtaaatacaaacaaaatattaaattattgagaatttaccatgtacctaatactgagcttgggacatggattcaaagatgggcaaactcacatgtggtgtctgctctcatgaagcattcagcctggtgagaagacagatacttgtgaaacaatcacttggaagcatggagatttacttttataataagtaccaccaaggagaagttacggtgtcatgacactgtgtagtagtgggcttgacctgaccaaggaaggacactaggctgagatctgaaagatgggtatgctaagagtgttgtaggcagagagaaccgcgcaaaggtcctgtggctctgcagtgcaagagtgtggcagatacaaaggacagaaacaggcaggatttggctggaaagctggtggatatgaagctgggaggtcactaagggccaggccatgtggaaagccttgtatactttaattttccttattgaagagcaaggaggagccattgaatgtttggggcatttgggaggttggcatgacctcaccaccttctgcgtgcagtgtgaagaacagattggcaaggaccagagcaaatgtggctgaccagttaggagttaatacggcagtttaggaatgagcttggtgtagggtggggacagacggagatagagatagagtggtagattagccatggggttgtgaagaagaggaagcttctaggtgagccttacttagataaagagatggaggcatgattccattcactgagttggggggtaggcaacagaagaggagagagtgggtggggggacatcgagagcatcccaaaggggtgatgggcctggcccacagagggatggctggcctggatcatgacgttgtgagtaaccaatgcacaagtgggaagtcccccaaatcggagagaggagcagaggccttggcacggagactgaaaggaggcagagaaagagcaggagcaggaaaggagtatggtattgtgggaggaagctcagggcattgctgctcaaagtgtggtcccacagagggcatcatcacatcaccagggagcatggtgggaaggcagtccctccagctccaccccggtgtcgatctgaatctccatttgagacagattccccaggtgatgcgtgtgcacagtgaggtctgagatgctctggcccggaggagtgtttctgaaaggagggtgagcaagagcagtcagaggcactgagcagtaaattaacaagaaaacggaaaaatagccactgagcccatgggtagtagatctgtttgggtggatcaatgggaccagaaggcagaattgacagggttggagagtgagtgggaagtaaggaaatggagacagaaagtatagacagattgtgttttctataaatttagctgtgaaggagagagagacaaggctggagggagacgaggagtggggtagggaatttttttcttaacgatagagtcttgagcacatttaaaatgagaagatactagtggagaggaaatgactgaacacacgttagaaagaaacaggaacgtatactgttcttgaagagtagggaagagtcgagactcttggcaagagtccatttagatggaggaagaggtagctcctctgtagcaggaatgaagacagcatgggataggctagaagggtttggaattgggaagacaagggaatccttaggaatggcttttattttctatggagagtgagggagaggaattagctgagagccaggaggttgcagacaatggagaaggtttgaaattgtggttctgacattccatgttgtagaggggaagtctgagttcagcctggtattggtggctgtgtagttcagattctcaaagccttaattttctactgcatagagttgttgtaagccttgattaaatgatacacaatgtatcacctggtcagtacacagcgcacagcaagccgacaatcaacgttagtcaccctttgtacctccctcggtgccaagtacagggctggctcatgggaagcacttggaaaagtgggttcatgatttgctaacacattgctcctgactctctagaagcttctaggagttattctggctattctgaactgctccatttctctttcccaggccagaactgcacgttccaactgcacggtcccaatgggacagttgagagcccagggttcccatatggctaccccaattacgccaactgcacgtggaccatcaccgcggaagagcagcacagaatccagcttgtgttccagtcctttgccctggaagaggactttgatgtcctgtcggtgtttgatggtccaccccagccagagaatctgcgtacgaggtaccatgctgcccaccttccctgtagcaaacagctgggctatgagccaagctcactaggaggaagatctttctcgagtgaaaagtttatggtcatcaacaaagaccactgttttcatgatgtcctccctcaacccctctggttttccaattcatgtctcttgcttagaggtttccggttgggaggattgatgagtaggacatttgggaagactagagagaaaacacaagagggttctagacaaattcagctctttcttttgaaactgatttttcatgcacagggtgtattatttgtacacacagaaatataagttggaaccaacagatatgggtgttgaaggctgatagtgatgcagtgaatatgtcttgcgtcacagtatttgaaaccatcaatacttttctggactttgctttgcatttccaaggccttggttgtggatgtagactctggaatttgggggagttctcaccctcttaacccccatccctgtgatggaagagatccccatggagagagtaagatggcttcctgtacccctgagctgactcccaaggggaagagcttacaggagggagatgggaggaaggcttccaacctctgcagaaagggcagacttttctggggcaaaggtgaagaccccagggtcaaaactctctaggtgacccggaggccagccagggtctgtcacaagccttgtccaggtcaggtcagcgtggcttcccggctctacaggaagccaaagggttaatggcttacaagccaagccctggggagccggaggtgctaattgcttctaatgacatgatgcactaatgagtggttcccagccaaatgcttaacctcaaagctttgtttaagatgcatctcagcccttggcctccaagctcctgcagcagggtcacacacacatttactgcacagtcttcagccctcttctctttcccctctgggcagaagtgagtctgggaagcctgcagcagaggcgggggggcatctggggccccctgcaccccttctgcagcttctcccagaaaagactgggctaatcatcttcccttgaggttcagcagggttctgtgaaacattggtaaagggctagagtcctcttcaatcattcattccacaaatatttcatgggtacctattatgtcttgacactggcctagatgctggggaatagcagtgagaaaaacaaagccaccgccttcatggaggttacatgctaatggggaggcaggcatggaaatatctaacatgtctggtcctatgaagacaaagcacacagggtaagaaagtgatggcaggagtgctggctttattattattattattattattattattattattattattattatactttaagttctgggatacttgtgcagaacatgcaggtttgttacataggtatacatgtgccgtggtggttttctgcactcatcaacccatcatctacattacgtatttctcctaatatccctcccctagcccccaaccccctgacaggccccggtgtgtgatgttcccctccctttgtccatgtgttctcattgttcaactcccacttatgagtgagaacatgcagtgtttggttttctgttcctgtgttagtttgctgaggatgatggtttccagcttcatccatgtccctgcaaaggacattaactcatccttttttatggctgtgattgctggtttttatagggtggtcagggatggtctttcccaggggaaagagagctatgagcagagagctgaatcatggaatatcatgtatggtgtggtatcccatgtaggtatctagggaaagcttctaggctaagggcacaggaaatgtaaagggtacagggccaccgtttggaggatggtcttgctgtggcagagcccactttggccaagccagtcatgttgactaggaagacctgcagttttggaatcctcattctagatcatcccaggtgttgtttttatgctctgctagtttgaattcctctcacaagcaaaggagggtatgcaggaggtcagtggttagaggctagagcagagccagtgggtaggagttctggaagggaaaaagtgaggctgggaggtggcagaaggtggtagatcctgcagggcctcataggccatgcagggactttggccttgatcctgaggcacaggaaacccttggagggttctgagcagaaaagggacctgctgtgacaggcctttgccatcgtggggaaaatggagtgaaaggggtgaggctggaggctgctgttcagggcagagaagaaggaggcttgggtctcctggaagtggggacatgatgagaagtggccagctctgtgctgtattccaaacacagagtggacaggatttgttgttgcattgggtgtgggctatgggagaaaggagatgaggatgattccagtctccttggccttaatgattatggaaagaagtagctgtttcctgagatggggacagcaacaggaggagctggaagttaagattcagtttggccctataaaattttagatgtctattagatatccaggtggagaaggcacttaacgtgcacttgaatatgtggtttttgagttcaaggccgtcagggctagagatacaaaattgggagactaggactggatggtgcctaaaacgtaagactggatgtggtcacaagggagccagtcttctccatcagattttgagctcatgtgacaccatctatggggcacctgtgtagacttttgatgaatgttgaatgcatgtttgaaagatagaaagtcaggtcaaaccaatggggcactgattgaggtatggacagctagaggcaaattctccaattctgcctgctggagttatttaagcttgtcctgctcttaaggcagagtccccacatgtgtggtcgagtctttgttttctgacacttggttttctttctttctttttttttttttttccaggaaacttaagatttcatttgcataagccacagtaattaagaaattcaatttggttttgaaatggagattgacatacagaaacacaaccccatacacacattctcacacagtctgtgggaagtgtttccagagcagtcttgtttgtggtatttgttgtgtggtcctagtggggaagaagtaaagagtctttgttcacctcagacaaatttataaactaactgaccaagagatggactttgtttacaagtctgtttataaataaaatgacgttctaatttttattaaataataggcagttaagcagcagtaaaaataagtataccagaattaaacaaagaaaggggttcatatctcactttcaaatggtcagctcttttccccctaaacctcaaaaaatcttctgtctcctctcaccatcttgttttagaattgactaccaactattgcaggaaattgaactgtttttgacctacatttgtgatgagtctgccataatgtaattctgattgtgctgtcaaagaaaaccacatattccccccaccaaaagaaaataattatgtataatgcaaacgtgattatcattgttagtgtggaagggtacaatttatttatttattattattattattattattattgtacttttaagttttagggtacatgtgcacaacgtgcaggtttgttacatatgtatgcatgtgccatgttggtgtgctgcacccattaactcgtcatttagcattaggtatatctcccaatgctatccctcccccctaaccccaccccacaacagtccctggtgtgtgatggtccccttcctgtgtccaagtgttgtcattgttcaattcccacctatgagtgagaacatgcggtgtttggttttttgtccttgtgatagtttgctgagaatgatggtttccagcttcatccatgtccctacaaaggacatgaactcatcattttttatggctacatagtattccatggtgtatttgtgccacattttcttaatccagtctatcattgttggacatttgggttggttccaagtctttgctattatgaatagtgctgcaataaacatatgtgtacatgtgtctttacagcagcatgatttataatcctttgggcatatacccagtaacgggatggctgggtcaaatggtatttctagttctagatccctgaggaatcgccacactgacttccacaatggttgaactagtttacagtcccaccaacagtgtaaaagtgttcctatttctccacatcctctccagcacctgttgtttcctgactttttaatgatcgccattctaactggtgtgagatggtatctcattgtggttttgatttgcatttctctgatggccagtgatggtgagcattttttcatgtgtcttttggctgcataaatgtcttcttttgagaagtgtctgttcatgtccttcgcccactttttgatggggttgtttgtttttttcttgtcaatttgtttgagttcatcgtagattctggatattagccctttgtcagatgagtaggttgcaaaatttttctcccattctgtaggttgctgttcactctgatggtggtttcttttgctgtgcagaagctctttagtttaattagatcccatttgtcaattttggcttttgttaccattgcttttggtgttagacacttgggttttctgactctgagaggaagtatggaagactcagcagagactggtctggcctgtgttctagcatggaagggtgggagtttccatgacctggagaagtggttctggcagggaaggcttcctcttgtccttaggatgcagaagaatcagatgtgtccccagccacggcacagcattcctggccaaccagccatgaggatgaggctctggggttgaaccttcattgggttttccctgcttgtgctcctgatctctgtcatctttatgatctgcttattctaattcatttcacacgggcttagcaaaggggaagggctagaaggagaccactgcctttttttttttgattgatgatgacaacaatagccacagcaacagctaatatttattgagtctttaatgtgtatcaggcattgttctacatgctttactagtgaggctggagagcagtggtgcaatctcagctcactgcaatctctgtctcctggactcaagcacttcccccacttcagccccaaaagtagctgggactacaggcatgagcccccacgcctggctaatttttgcactctttctgtagagacagggtttcaccatgttgcccaggccggtctcaaactcctgagcttaagtgatccactttgcctccatctcccaaagtgctaggattacagatatgagcctccatgcccggtctactagtgtgtcatttaagtcttaaaacagtttatggttaagtgttactattaagcctattttaatgaaactgtagcaaacttagttatgtcacttgcccaagctcagatcatttttaagtagggccagaactttatcccagggataaataatatttcagtggactgagaagttgaattaggaaaaatgaacctaattttgattttgagaaatctattgaatgttccactcataattaatttacaacaatgaacaaaataagggaaaaaatcatcacttaaaacacagatatatagggttgaacagagagtgacaaagagcgagagctagaagattctttgggggcccctctttcctacatctcagcctctctggttctatcagatgagtcctagcagcattttccatgctgcacttttttgtgtgtgtgatctaaccacacattcttcatcaaataccacctcacttctctgctccctttgccagacaattctccaaagagctgcctatgttttctatctctgcttccttgatttctttttttttttttttaatttttttagtatttattgatcattcttgggtgtttctcggagagggggatttggcagggtcataggacaatagtggagagaaggtcagcagataaacatgtgaacaaaggtctctggttttcctaggcagaggaccctgcggccttccgcagtgtttgtgtccctgggtacttgagattagggagtggtggtgactcttaacgagcatgctgccttcaagcatctgtttaacaaagcacatcttgcaccgcccttaatccatttaaccctgagtggacacagcacatgtttcagagagcacggggttgggggtaaggttatagattaacagcatcccaaggcagaagaatttttcttagtacagaacaaaatggagtctcctatgtctacttctttatacacagacacactaacaatctgatctctcttttccccacatttcccccttttctatttgacaaaaccgccatcgtcatcatggcccgttctcaatgagctgttgggtacacctcccagacggggtggtggacgggcagaggggcccccccaccccccagacgtggcggccaggcagaggtgccccccacctcccagacagggtggctgccgggcgtgggcgcccctcacctctcagatggggcggctgccaggcgggggcgccccccacctcccagacggggcggctgctgggcggggtcgccccccacctcccagacggggcggctgctgggcggaggggctcctcacttcccagacggggcggccgggcagaggggctcctcacttctcagacggggcagccgggcagaggcgctcctcagttcccagacggggtcgcggccgggcagaggcgctcctcacttcccagacggggtggcggccgggtagagacgctcctcacctcccagacggggcggccgggcagaggtgctcctcacatcccagacggggcggccgggcagaggcgctccccacatcccagatgatgggcggccaggcagaaacgctcctcacttcctagacgggatgacggccgggaagaggcgctcctcacttcccagactgggcggctgggcagaggggctcctcacatcccagacgatgggcggccagttagagacgctcctcacttcctagacggggtggcggccgggaagagacgctcctcacttcccagactgggcggctgggcagaggggctcctcacatcccagacgatgggcagccagttagagacgctcctcacttcctagacggggtggcggccatgcagaggcggcaatgtcagcactttgggaggccaaggcaggcggctgggaggtggaggttgtagcgagctgagatcaggccactgcactccagcctgggcaacattgagcactgagtgagcgaggcacctcgggaggccgaggcgggcagatcactcgaggtcaggagctggagaccagcccggccaacacggcgaaaccccgtctccaccaaaaaatacaaaaaccagtcaggcgtggcggcgcgcgcctgcgatcccaggcactcggcaggccgaggcaggagaatcaggcagggaggttgcagtgagccgagatcacggcagtacaatccagcctcggcaacagagagagaccatggaaagcgggagacgaagaagagggagcgggagggggagggggagggggaaggagagggacgaccactgccttttattgacctggaaccagaggagctcacacctcggaggatgataggaggggaaatgaccttagaggacagtccaagtaacattggaagatgctgtccttgatactggaatggtgctactctgggggtgtggagaggcagcagcaagcatgcttggtggggacccttgggtctttgtgaatttttttttaatgttcttgcatgatttttaatctactgagatttccttcttattcatgaatcatttttgtgtgtgtgttagtccagggaatcaccaataaaatcacccattttattgagagtgtcaagtctattatcctaaggttgtacactgttttcccactcaacctttctttctccatggtgtctgggtcacatccctttctcacatctgctcctgtgcatttctttctttctttctttctttctttctttctttctttctttctttctttctttccactcagttagtcttgccagaagtttgcctattttattggtctttttaaagttccaatgctagggtgatccattttattctcttttatctaaattattgatttctgcttttatctttatctattcttttctctcactttccttaggctaatattgttcttttgccaattttgtaaattaaattagttttattatttcttgtttgataataaaaacattaagagacattttcccctaagtatagctttgaccacattccataaatttttatggctagttgttattttagaaagagtttctaattgcaattttgttctttctttgactctagggttttccccttaaattttgaagtaatatttgtttatactttagaaattattatctagctttatttcattatgattagattatgatttctactttggagaatttgttgacttgtttccctctgtataagatcattttttgtcagtattctatgaagaaagatattctgtgtatgaaaggtgaaaaaattatgttattaatatcattcagtttttctaatttcatatctattgcctaactgatatttgcggataggcaatatattgctctcacattcttactatagtttatatcagttcctccttttattcctaagtttttattttatatactgtgatcctatactcttcagcacattcatattttcaaacattagatcttcagagtgaattttgtatatgtatatatatatttccaatatgaaaattgtagttattccctattctctcctttttttttttttttgctttacattctactttgtaccaatattacactctttttttctttcagatatgcattgattgggtccatttttgccaatttctctatttttaatatatctatattattgttttaggaatagttcttagcacaatatacacagtagttaaatttttaaaaaatcctggctaagagtcactatcctttaacaggaaaatttagttcactcatattttttggtaacaactgatatgtttgctcttctattatacttaatgctttctattacttttaagcgtccttactgttacttccttttatctgtcttctagtgcaagttgtctttgttttttctgtgatttttattctattagtgcttaaagttgcttctttagaacatgttttaagctgtatttttctgtcaacatcctgcctagctagcttttgtcttaggtaggtcttactgactctatcttgtagaattttcttcgtgtttgtagcatgtaggtatctatctgtattccttggtttccaaagttaatgtagatattccatctctttatatactttagatcattttcatgagaatttagggggtcaggcaaggcagagtttaacatgttatcgttcctcttcatcttgacatggaaattttttaaataaaagttttattctttttgatgctattgtgaatgggttttttaaaaaatttgtttttggactagccattgttagtatatagaaatacaattgatttttgtaaattgatcttgtatcttgtgaccttgctgaatttgttagttcagttcgtttatatctgtgaataaaagttttaattcttcctttccaatcgggataccccttatttctttttttccctgattgtgctgtctagaacctccagtataatattgaatagaaatggtcagagtggctagccttgacttattcctgatgttaggggaaaaacatttcgtcttttagcattaagtatgatgttatctgtaggttttttgtggatacccttctaataaaaatttttaagcagaggattttggcatgatttggtggcagtgtggaaaatgcactggggtggagggcagactggcgaccgtggggcaaggaaagagacagcagtagtctggactaaagcaatgaagggtaaagatggcatggatgtgtatgatgctatgggaaagagttatccccagagttagtagtggatgtatagggacagtggactgggagtaagaaaaagaaaggaatggaggatgactccgcagtgtctgccttggaaacagaaaacaaaccaaatcagtctgcagtgaatttcagtctccagtgaaatgtgttcttggggcctaccaggatatttgctgcactgacatttttcttcacttgtctggtagatagagcaggtaggtcacctcctgtctcagtgttttcctgtgagacagaagggtgcagtggggacagacctagatttatacctagctaggctctacatttattaatgctatgacctcatacaaggtttggtttctctgagcctcatctataaaatggaggtgacatttacccgccttacagggttgttgtatgtgagccaccagctatagatgcttacgtggtccggaaacattgtttacgtcctttcctgcccttctgttcttaggactcagtaactcagacctttccagagagttctagtgcctgtgatgacacttcatctgtggccaactcatcagacattttagactgggaatttcaggtgtggtagaaagacactgaaggagtcactgagctcaggaacagtcattaattgtgcatgtatgtatcatgtgtatgtatgtaatgtgtacgtatcatggcattactgatcccatgatagcctcctctcctctcccttcccacacagacagtggggccagaccaccaagaggcctgcagcagatttttctctgcctgcatcacctgggggatttccatgtttattgtctaaaacttaatgagctgggcacagtggcatccacctgtagtcccagctactactcgggaggctgaggcaagaggattgtttgaacctgggaattcaagactagcacgggcaacacagtaaaacctagtctctgaaaaataaaaataaaaaaaaatttcatgagtacaagttttgcaattactgctttcactacattttaaaaaattattttattttagattcggaggttacatgtgctggttctttacatggatacattgcacaatggaggggtttgggcttctagttgtatccatcacccaaatagtgagcactgtacacaataggcagtttttcaaccctcactgcctcccaaactcctcccttttggagtctcctcacagcattttttttttttttttttttttttttttgagatggagtcttgctgtgtggcccaggctggagtgcagtggcacaatctcagctcactgcaagctccgcctcccgggttcacaccattctcttgcctcagcctcccgagtagctgggactacaggcgcccgccaccacgcccaactaattttttgtattttttaatagagacggggtttcactgtgttagccaggatggtctcgatctcttgacctcatgattcgcccgcctcggcctcccaaagtgtcctcactgcttttttttttttttttttttttgagacggagttccgctctttagcccaggccggattgcagtggcacaatcttggctcagtgcaagctccgcctcccaggttcacgccattctcctgcctcagcctcccgagtagctgggactacaggcgcccgccaccgcgcccggctaattttttgtatttttagtagagacggggattcaccgtgttagccaagatggtctcgatctcctgaccttgtgatccaccctcctcggcctcccaaagtgctgggattacaggcgtgacctcactgcatttttaaggcatctctcttctcttctctccaacactctggtcttctttctttatggatgcgttccaacaaaaggctgaaacgttacctccctaccccaatcctagccccctttaacctcacctttctccagctgcttgctcctggattgtgttgtgagaaatgaactttcctcctattagattctaagctccttaaggctgggagtcatgggagtcaagccttctatatatatatatatatatatatatatattttttttttttttttttttgctttgctgtaacagagccatacagtggaatatacaccagtcttgccagtagatgacatgagtttgctctccagctcctccctagctgcatagcattggcaagtcactttcactgatatccacagtatgctaattgataaacggggtgtatcaagatctaccttataggttagttgatcaagattaaattaaaacagtatgtaaactgctttaattatgatgagatagaaacaaaaggaatactcctacatttataggaaaaattagaaagcactatttagcaaaaagacaaaataatttgtgaatcatgaggtagagcagtggttctcaactgaaggcagttttgtcccccaggggacatttggccacatctggagaaatttgtggttgtcccaactgcaagtggagaggtgctgatgacatctactaggttgaggccagggattctgctaaacatcatcccacaatgcacagcacagctgtctacagtaaataattatctgtccccaaatgccagtaaagctgaggttgaaaaaccgtgaggtggattgatttgagaggttcatacctttagcataagacatacctgggttttactcctctttctatgtctgtgaacttgggcaagtgagtcaacccattcaagcctcagtttccttctcagcaaaatgggaacttctcactgatgctatgtactggcagcttcacctggcatcattgatgagaaggtgccaatagacacactgcgcacagcttgttctatatgcagatgctattcatctcccaatgactccctttctctaccaggagttcatagccatctccttgaaagcatctcacatttcatctggagctattcacaagcaaccacatcccagggtgccagaaggcagcgtctggctgcttcaaattaaatttacaatagaagctgatcagattcttctcataatggatcagggtggggaacgggagtaggagctggtcctgaaggccgggagcctgtaggagtttggaaattagcaagaaaagaacaaagagccttccagataatgcagtgtcagccctgcctggatgaattactgaaacaatccccacgtctctgcttttgcacaattagatggcctctccgtgctggcagacatcctattgcattgcagtttaatgtggaatgaagttttctaatgggacacgagcaaacataatctatgaagacgctgctaataaactgcatcccgtatattggagggtttatagggtgctggtgatgactgcaccagttaagcacagctaagcatctcttaatttagacatttgggctcaagttatgggaaacactacaactcgttccctcaattattggaaatacacattctgtcatcagcctaaggtgcaatgtagttttagtcatttggagctagttgcagatttcactcaactggcgtcagacacctgttttggaagttgtaaaaatccacaaatttgccagatttactgtcttcttatgaatatgtatcacagcagaggcccccaaaggacctgttttttggattccttaaaaggtgtgccttgcacatcaatagggacgtccttgaagggtctgctctccagaatgcctctgggaatgtgctcttgtgggcagaaggaggctgggaggacccatggggatgagggaaaagtctttgttcaggattgaaacagagaggggacactggaaaggagaacaaaggaatgaggacactgaacggctattatgttccagccaccatgctggacacttgtgttcatgctctcatggtaatttattctacatttattgaatgcctaacaggaatgccaggtatcagagacacaacagttaacaagacagcttctgccttcaaggaacttaacgatatctttagggagacagttaaataatcagggtataagtgctatgactggggaacctgacctcgccttgggggagatctttgtggatgctcatctggaggcttgggatgaaccccctccatctgccccttgcttagttgtcccttactcattcctcaagtaactcagttgtcccttccttgcccaggacaccctttcctcacaacctggtcaaaccctcctgtgatacctgctcagattaccatgcattcaccctttgtggttttacacacgcgtgtgtgtgtgtgtgtgtgtcttcttcatttatgcccatctaccccacaaggctgtaaactccttgatgacaagaactctttctcttttacttttcattgtagctctccagggcctaacagagagtctggcttatagcagatgctaaacaaatacttatggagtgaatgaatcaatgctctctggaggaagagatccctaatagagtgtggaaggagggatgagagtgtttcgagccaagaaatagtatgtgcataggtctaggcaaaagtgagagaaaggtgaggtgcagaatgacaatgggtaggttcattttggctggtgtatagtgggaaggtggagcagtggcccgggccagctccaccagggaccctgtatgccctgctgaggagctcgatacatttctaagaaagatggttcacaatgaaaggttttaaatagacattgttcacattatctaataattcaacaacacctttaggaggtgggtagtattaattctctttgcagaagttaagcaagcatgtaaggcccctaagctgccaaatagctgatatagtttggctctgtatccctgcccaaatctcgtgttggattgtaatctccaatgtgggaggtggggcctggtgggtagtaattggatcatagggcggatttctcatgaatggttatcaccatcctcttggtgctgtcctgacgttagtgagtgagttctcatgagatctggttatttaagtgtggggcacctgccccatctctgttgctcctgcttttgccatgtgatgtgcttattccccctttgccttatgccgtgattgtaagtttcctgaggcctccccaggagccaggcaaatgccagcatcatgcttcctgtgcagccagtgggactgtgagccaattaaacctctttcctttataaattgtcccatctcaggtatttctttacagcaatgcaagaatggactaacatagtggctaaagaggggtgggccaggggtctcctagagccagaaacaaggctttcccccactataccaaaatgccttttcattgctttggatttatttgcattcattcattcaatttccttttaaaaatccattcctttttcctttttaagcagtttctctaaaatagtaaatgtaataggtattttctgctttaagaaggtcagcagtgtatagagtgagaaaaatgcagctgcctcctttcccaggcccttgtcccagcctcactccctagaggtaaccgctgttaacagtttggtgtgtgtccaatttctttttaaataaggattcattaaactgcccatgaggcttattgggacatccatcagacctttaaaaattgttctgatgaattaagtgtaaactaattagaaacatggattcaattacccttgaaacacacaagggtttaataattaataggaagtgggtttgaggccaaaggcattatggattttatcaaacccctaacatcagaaaagtaaatatgtttgattcaccctaaatgctggcaaatttgccatccggaggcaaacctgttggtaggagctgtgtagttaatcaggaaagttagctgtggttaataaggaggcagaggaagaggggtgcagaagacaaaacccgctgatcattgctgggcagggcttcttgggacagggaagtggcctgttttgtggggttactgcagtctgcttccttcacaatccaaagcaggctttggagtgggaggctggatacctgggaccctggtatctgcttgatatccaagttcacacaggtcagcaccacctgaccagcaccgaagggggttatggaaggggaggagtggggtctgccagggatgaggctctggaaaccaactgcagtgaccccatggggcagccatgtgctccatccctaatgccaaagggagggtctgggcagacgtggtgggggaggggttggcagcaggtgatacacaaagccaggtgggcagcagtgtcggggtcctgagcaatctctccactcacagtaggaccctgtggttcaaggtcaaaatcaatatttgtggcaaagcctcaccttgctcattcaccaagtctgctgtttaatagcagccaaaatttaacaccccctggagccagagtctcagtccaaaaggctgtgctgcctgcatcacttctcacaattggtcctgcctgcagtatcatgagatattggtcaaagacgcaacattcccctagagcagacttggccacctctagatcctcatcggcccctctcttccaagtggctgctgacagcactgttgctgagataggaagtttcccccttctatatcctcagctcttactccctgaacttctggggccacagaatttgctcttcaagggaccctggtgtctgcagggtggaggcaggtttggacttgtcattctagtcttccctctgtttctttttcagcagacacggtacccaaataaacacttcccaagtattgagtccctcattctcttggaattaaagtaaatctaaaactaaatcaattctcgacttttaagtgacaaaagagccaaattattgtacccttaagtgggtctactgccacaactacccataaacagtgaggccagccttttgctactgcatcaatttctactctgtcacaagatgtggtgccaagagccagaccaggggcatggagagctgggttctgtcccagcttggccactggtttgcttgtgatcttcactaagtcctattccttctcagggccatctgcgttttcctgacttacaatatgaggatttaaatctagaggaactccaaagcttcttccagctctgaaattgtgtgattgaatgatgctggagatgcatatagaaggactataaaatatccctgagcttctgggattctttctactctacgtaggtactgctcttggctgtttcagcaattccagcagttgtctttggcgaacagtttattttccaatggcacgttaagcagtgtggcagagaaggctaattgcccaccatcaatcttgctccttttccacagtgtaggtgttagtgggaagcagctgcctagctagggacaatattttcctaggcccccttgcatctagatggagccatatgacttagtggaaggtagatggaaatgatgtgtgcctcttccaggtctgggcagaaagcctcctctgcaatcctctctttctatctttccctgggacaggagatgagagaagcctagatgcctggatgactgcatggagcagaacccacctcctcccctatctgctgctgattgattgaattttacataagtgagaaataaacttttatgtaaacttagacctcacgtattactgcaccagttgccccaggagctgcagctgactgggtttgcctagatgacatggtaaagacactgtagacagtatagactactagcctggctgttgaattcatggaagcagtttctgaccacgtgatgcccctagcatcttgcagactggcaatgcagcatcttcaatcctgcctggaggagcagatgttttcacgaagtttatagtggctagctcctctgcacctggcagtctttcactgtgccagttcagtctctcgcatcatcactgccacctttgtccttccataagcaatggctgccttattaagtctcataaggaaggaagcgtgaacaattgactccaccttccaatttgattattttaacccaaagggctcttaactagggatctaggggcttttgtgatgccctggcaagctggtagagctgcatacaacttctccctcctccaaagttccacagctacatatcaaagacaaggcaaatcttaaacttacgtaaaccctacaaagtaaagaggaacggggacgcatcttggctctgatagtttagctggatttcagttataagaggaattcctcaccatccagagataaagaaatctggacaataaagaagctttctagttctgcaagaagccttgcagtagtggatattttcaaacctgccttggtctgcaagggtgggggtgggggaatgcagacacaaagagttcttgcagacagaggcagatttgtatccactaccgcaaagctccacccatgtaagtgcccagtgttactcctctcaattccgtttgattgttgtggcttctcaggcgcattatgttattgacttctcccaacaatccaattgaagtgtcatattcatcccattttgcagaggagaaagctgagcttcagaatggctcataagccctatgctaagaaggtgtggctgagttcttagcattttctccctgctctgagccagtgccctccagccacaggagcctgtggagggcgggagaaaggccttgggcaacagtcagccagaaaaaggacccatctaccctaaaggacagagatagatgagaggaaacctaccagagacgggattctacagtcctgtctccttccatgtttggaatttgcctgcacttaggcaagaagtaaaggaagagggaatggctgtcttttctccactgcactcttcctccagtgtaagttaggtgaaggcctcaaagtggcaaattatttgtagaaccccaaaggagtgggcttcttctattttggagtatgtagaagagtaaagattttctttaattagatagtgccggatagatttaattaaagcttcaaacctgcaattttctttgtttgattgatcagttggtgctgattgcctggagtaattatgaagggggaggtggagttttcaaagtctgatggtgataagaagcagactgagtcaacccgtggatacttggttgtcagagtcattctgaaaagatttaaattgcacaaatgtttgttggctggtcaaatgaaaaataaggtatctaaatcacacttttgtctaaatcatgctcctggtggatgtgcttctgcagaaaaggtcccctttcccctcctttctccaaatctaatcacacctctgagaccaggcagtattctgttatttttgtctttcttttatgaaataattgaagcacattgttgggagtgtctcataatggccttctaaaatttctagagcttactggagggtcaggagagaaagagcatcttatagtctccatgtgaatttagggaattcagaaagagctttaaagtcaggcactcctggggttgaatcctgcctttaccatttactacctctttgactttggacaagtacccttgaactgctttttcctcatcagcaatgcaaaagagttgtgaagattctttgagctgatgtatgcaagccaagcacccacggttagcctgtgatgggttcttactggatttctgtctctttcccttcctgtgctctgttgctttgctgaggtcaccaccataaaagttccatgaactcacgggaccagagctgtcttgttcaccactgcagacagagacctcagcacactgctttgtacatggggggtctcagcaaattcttgcccaatgaatgaataaatagttgaataccctgtatatttaggcctccctaaaagtagatgacaccagtacagagtaaaagaaggggttccaaagagttgccacatttatgaggccctggggggtgcaagatgaacaatgtcatgcaggctgccatgtgaaagcattggtggagaaactgttctctttttcctctgaactggtcaaaccatctttattagtccatttttcatgctgctgataaagacatacctaagactgggcaatttacaaaagaaagaggtttaatggacttacagttccacatggctgaggaggcctcacaataatggcagacggcaaggaggagcaagtcacatcttacatggatggcagcaggcaaagagcaagcttgtgcaagggaactccccttttaactatcagatctcacaagactcattcactattatgagaacagcaggggaaagacctgcccccatgattcaattacctcccactgggttcctaccccaacacgtgggaattcaagatgagattttggtggggacacagccaaaccattaccaacatcttggggaactgagttcagttctcagttacacactggaatgggaagctaatgattgtcaagactgctgcagcataaaaaatgtttaagttaaaaaataacaaaacaggctacagaattatctgtttattatgtacattaccatgtaagcatgtatacacaggtgaataagactagaaggaaatatagcaacatgctaataataacatgggtatgaggatggcttgattatgaataattttttaatcttttgtattgaaaagttttttgcaacatagttacattgtttttataataagaatgcatgttttgattaatgtaagattaaatgtaaaagaaaagagaaaagtttaagtatatcccttgctacccatacccaaagagggacattgacaaactcaagtgggaccacgggagaatgaccaggatgaggaaggactttatgttgcaagatggatcttgaggacttcaggctgttcacttgaaggaaggagactcttaggggaaatgacgactgttgtcaaaagctgacataagatggtggcactcaggctgtgaaatgtacattccagggaaacaaacttcaagtcatttctaacacttgtgtctgtctagaactgagggtccctgtctcaggaagcaccagtgcagaagttggggcttctagggaagcacctctctgggctacagacatgccatctgcacagtggggctgtagctctctgtcagtcattctttacctggggatgtgcctccccaatcctgacttcctggagtcatggagagtggttcttgcatcacatattgtaagtgggagccagaagggaggtacgtgtgcagtttgaaaaagcatcttcagagtgacctttactttgacttgtttttattcattttattttgaattttaaaccacattgaagaaggaggcagtcattttatgtgaatcttcatagggggtccctgattttaaaaggttgacaaactgctctggaaaggggcttctcaaactttcacacacatgcaaatcagctgggaatttgtgaatgtgcacaatcagattcagtctgagatgcatttccaaggagctcacaggtgatgctggtgctactggctcatggactagtcaggataatccctgaggctcttcctggcagcccctggggctcctggctccctagaatggcagaatattggtttcttatgtacaagccgttggcccatcctttgtagagtttgttgaatggagagtaaccatgtaagaatgcaccccccacctaatccaggcagcacataagaactgccttcagtagcaatagaactaagcattccttgctcagatttacatcttttgtacatgtttaaatctgtgcccatgtctgtttatcatttgcaaataatgctctgttgtcttaatcctacttttatggctaatgatgtgtgtttcattctcaagtgtagaactggagtaaatatatatttctcaatagttttccctctaatcactacccagagctgtgagtcattgggataactcatgtatgagggagcttgtatctggagtccatccctcaatgcgagccttctctggctgcctgttacagccctggtgcgggcattcatcctcgcctgtgccttccctgcaggctgagggaggcaccacaactttctccatgaatctgcgagggcatgacaggcttgccaataccatcgatcctgtccccttccaagcagaattgcttcactatcatttccaggaatttgtgatgtttctaatttgatgattgagtgtcgctctccaccattcctgctcagctgcagatagtgctgtctgtcctgcagaccccaagcccatcctgactgtggagaagccccatctttcccagagagcggcacaggactgagcattctaggaccaggacactcagatgcctactgtgctgcagtgtacccaaccccctggctggtccacatcctgctgcgtccaagcccgccagacccctgcctccctaggctagggcaagactccacctgcctctcttgagcccacttgtctctgcagctggactcagaccctgacttctaactccacgtcagagccagcccccagggccttagcagctcccaagacttgcagctcgagcttcatggcatcccccctctactaggctggtttctgagccccaaactttgattatttcccctcttcctttctctgcccattatttctgctgactttgttggtgtttcaagatgcaaaggatcagggaacgctgagggagaggaaattccgagggaaaggaaattccaaggcagagagggggatgcaggagggaatgagcaacgagtagggtgggatgaatcaactgcaggctttggaacagcgcttcctgatcataaaaattagcacttatacagtatttgtatatgcagtgtatatattagtatgtgtgctgtgtgtatgtgtctgcataaaaaacactcgtacatataacacatccttgcacccagcactcttctcagcttgaaatgctacatctcactgagtgttctcagcagccctatggggaatgtattatcattagccccatattacaaatagcaactgaactgaaggaagggagggaggaagtgtcttcctacggtcacacagctggctgatccaggtggtcagacttcagagttgaccattatgtcttgaccattctgtaatactgtctcaagttcctaattgggcagggtggagatatggatccctctgaacttctgatgacagccagggactctctcccataatatacacacattgaactaaaattttgcatttaatttctatgggtggactcacaaactacttgaaactcatctttgagccccagggtaacaactcatgatttagaggttgtgcatatagatggcaataatgataataggaatttaaactatttttgagcatttactgtgtcctgggtacagtgctaaaggctttccatgaattaccttgcttacaacatttccataacatttccattcacccgcattgcacagataagaaaattgaggtttatagaggtcaagtcattgtctcaagctcaagcagctagtaagcaccagagatgaactaaaacccagctctgctggttccaaagtcagtgctctgtgcactgtgcagccggccctgcttagggctggtggtacccttgtagacataggcctgagggagagaaggggcagttttggggatggtttagaatgtgtgcttctggactgttttactgcctgaacctttggagatttggaccccagcccatgcctgatggagtctgcagtttggcataatgaattctgtgcatacccaacaattcggccctatctttgagagcaaaaaggcagagtggggcgaagaaggaaagtgttggtgcacccaaaggcagagctggacatgggagagaagaagaagtctgtttcaagctgtctgtaagacactctcagagttaagagaccatcatgaggtggggttgggggaggggagcaaaggaaggcctaggggaaagaagagctttcaggaagcctccttgatatggtttggctctgtgtctccacccaaatttcatcttgaattatactcccataattcccacatattgtgggagaaacctggtgggaggtaatttgaatcataggggtggtttcccttatatcattcttgttgtagtgaataagtctcacgagatctgatggttttatccgagttttccgcttttgcatcttcctcatttttctcttgttgccaccatgtaagaagtgcctttcgcctcctgccatgactctgaggcctcccccgccatgtggaactgtaagtccaattaaacctctttttcttcccagtctcgggtatgtctttatcagcagcatgaaaatggactaatacagtaaactggtaccagtagagtgaagtgttgctgaaaagatacccgaaaatgtggaagcaactttggaacagtaagaggttgaaataatttggagggctcagaagaagacaagaaaatctgtgaaagtttgaaactttggaacctcctagaggtttgttgaacggctttgaaatgctgacagtgatatgaacagtagggtccagactgagatggtctcggatggagaggaggaacttgttggaaactggagcagaggtgactcttgttatgttttagtaaagagactggtgacattttgcccccgccctagagacttgtggaactttgaacttgagagagatgatttagggtatctggcagaagaaatttccaagcagcaaagcattcaagaggtgacttgagtgctgttaaaaacattccatttcaaaagggaaacagagtataaaagttcagaaaatttgcagcctgatgatgcagtagaaaagaaaaacccattttttgaggagaaattcaaactggctgcaaaaatttgcataagtaacaaggaaccaaatgttaatcccaaagacaatggaaaaatgtctctaggccatgtcagagaccttcacagcggcacctcccattacagccccagaggcccgggaggaatacgtggttttgtgggctgggcccaggatccccatgctgtgtgcagcctagggacttggtgccctgtgtcccagccactccagccatggctgaaaggggccaacatagggctcatgctgtggcttcagagggtggaagccccaagccttggcagcttccatgtggtgttgagtctgctggtgtgcagaagtcaagaattgaggtttggtaacctcatttcagatgtatccaaatgcctggatgcccaggcaaaagtttgctgtacgggcggggccctcatggagaacctctgctagggcagtgcagaagggaaatgtgggatcggagcacccatcggagctccatctagtggagctgtgagaagagggccaccatcttccagaccccagaatggtagatccaccaacagcttgcagtgtgtgcctggaaaagcagcactcaatgccagcccatgaaagcagcccagagtggggctataccctgcaaagccacaggccggagctgcccaagactatgggaatctacctcttgcatcagcatgacctggatgtgagacatggagtcaaaggagatgattttggagctttaaaatttgactgccccatctggatttcggacttgcatgggccctgtaacccttttgttttggccaatttctcccatttggaatggctgtatttacccaatacctgtaccgccatgtagctaggaaataactagcttgctttttgattttacaggctcataggcagaaaggacttgccttgtctcagatgagactttggactgtggactttcgtgttaatgctgaactgagttaagactttgggggactgttgggaaggcatgattggttttgaaatacgaggacatgagatttggaggggccagggttggaatgatatggtttggctgtgtccccaccccaatctcaacttgaattgtactcccataattcctacatgctgtgggaaggatcaggtgggaggtaatttgaatcacgggggcggtttcccccatactgttcttgtggtagtgaataagtctcatgagatctgatggttttatcggggtttccgcttttgcatcttcctcacttttatcttgttgccgccatgtaagaagtgcctttcacctcccaccatgattctgaggcctccctagacatgtggaactgtaagtccaattaaacctctttttcttcccagtctcgggtatgtctttatcagcagtgtgaaaacggactaatacactcctcttgcccataagggtttggccataggtttctatagccagttctgttgctttgcttctccagggactgtcagttgtggcatcagagagcagagtctcaaacaccagcagaagcaagggtgtggctggaggcctttcagcagaacaggccaaagaagagccaggttcagccacagatgttggaggctccccctggccatcctgtcctcccttgcctggctgtcccaccctcgggatggaccctcaccttgggatctcttgctcatggtcttgcccccggagcccctccctctgccctcttcaccaccttccctgtcctccatgtccttcctgtaccccctgtcttcactgccagctcgaatgcatgtcctgaaacatggccacagcgggacttcctggcttgtctgttttaaggcatccacattaaagtgactgtcagaaggtataagctactcttttgctaccagtcgtgtgtaccatggacacccctgatggatgtcaatgacatgtgttacttggtaataaaaatagttgaaggcttaagggtttatttttaggctgggtccaaatgctacctcagaatgcctctgcagagtctcagagggcctggtgggtgcttgtctggttttgctttgagctattgccagcacctgggtcccagcaaggtcaagggctgtggtaaaatgtgctcttgctgattttatattcaccaagttcataaagaacttaagagtccaaagagccacatgtatcctgctggactccccatcagaggggaagccagcacactcatgacattggggtcttagcccatcctgatgacctgatctggggatcccatacacagatcccatacacagatatggagaggcttgaagcaattaccctagctgagctgacccaaccattgcctcatttggaaaaggaagataatgctttcaacctctagggccatgtgcatagacggcaataatggtgtcaggttataaggcctccaggaggttttgtaggatccagcacggaagcctgtgcctttgtgtgtgatgatggggatgcattgcagtcacgatgagctatggtgcccagcaatctctttcactcatctgagtaataatattgataatattaatggctactattattgagcacttactatgtaccaggcactgctctaagcactttgcatatattaacccttttaagtcttacaagaactctgtgaaataggtgttgccattctgcagatgaggagctgaggctcagggagattgagtaactcataagtggtggtgctgggatttgagcccatgagtcaggtagttgagcccctgagccccactcagaacacagatagcagagaagcagtgagtggtggccctgggtgctagagaggagccaggggcatggtcttccatggtgaggcagccttggtgccctgtgtcccagccgctccagccgttgcgaaacggggccaatccaaagtctggatcagccaaggatggacagccatcagagcacagtctgccttgtggtcagagtgagatgtggcacacaagggcctggcacagagcctggcacactgtccagcctgcttctcaccatggcaccctcgatattcaggactatggagtttctttgttgtaaggagaggtcctccaccttgtaggatatttagcagcaaccgtggcctgccagtagcccccctctccccattgcagagaagaaaaatgttctcagacattggccaatgtcccaggcagggttggggtggagcaagcttgctgcaggggttgggaagtgcgagcttccctttgtgccaaagactcttccacggctacggattatggtctcttatgcaatagctgtctccagtcgtgacagaaagccaacttttctgacccaggggatacaggtgggtggggcctttgtgcatctcaaccaccaggcagaagcatggctaggggaggaacagggaccacgaagatgaggcctggctgagaggggactggacagtgactgctttccaagccttcacagcctttttatccttttccattaaagggattcatgacattttggttactccatttctgcaaagaatcaattgaaaagatcaaaaatatggcatctggagaatttaaaattagattcttacaaaatacaaagtagaagagagaagaaaaaaaaaaaaaaggaaacagggaaccccatgacttgcacaaatcctgcatttgttgcctgggagctgagcaatcctggctctagatgagaaggaattccaggatgcctgggggcgaggtacgctggggagggcaaggcagcctcagagctccccccaggctgccgcagttgcctgtcctcccccaggggccctgcatcctccgcctcccggtctttctccttcccatcctttgatatatatgttttcagtatataaatacattctaattatagaaaacttggaaaatgaagactgtcataaagaagaatttttaaaagtcagctgtcatgttggcacccagaaagaaccactgataacacaccctcacacacttatgcattgattttacccaaactgaatcctactgtctgttccttagctgcctgcagtcatgtttcagagcctcctttgcctgcagatcctcttcttaggatgttcattcccctgacccaggggactgttcttggctggtcctccttttcctctgtggcatccactcctgttgacctttcccattcctggccctcatcctcagctcctggcaccctgtgccttcctggcattcttctttccctctcttctagaggtcacaaatgtgatgaaatccaaggagccaatcgcagccatggctgtggcttctgtcaggccagaggtgaccctatgatgacctgatggtccagcagggtgggggtgaaagggacatttgaatgaacacagatgagatgggaccagccaggcaagagtccaagggagtggtggttgacagggattcagcccagagggatctgggcaggggaattaggaaagcaagagttacccaccaggatccagggtgtgctacagtactgacaatgtcgacttttactgcttgtgttcattcgttcattcattcattcattcattcacgtattcattccccacatagttactgagcacctgttaggggccagccactgagggagaccatataatatgttaattatactgggccatgtggtcactctgcagggttgaacaggcatcgcaaaaacagtgggggaacaaaatacacagattcccatctctcccaaacttagcctctagtaagggagattagtaaataaactaggaaacagacagaatgattacagatttgataagcttctgaaggaaagaaatagggtgctagaattgacatggcctggggaacctacttgggtggcttgagtattcaggaaggacccagttagaatgagggggctgagggaagagggtgtcagatggaggcacatctagcaaaaagctgtgagccaggaaggtggtggccttttgaggcacagaagaagggcccatgggtctcgctccacccctctcagcccttggggtgtagcttttgctggtcactggaagcaccttgacttctgatgatactgatagctccatccttttgcatgtgtagcagtgaccttagggtcataatgtcaccaaatacttgagctgtgacttggggaacccttgagcctagcaggaccttggggatattattgtcattgctcacttacttgtgtcctgccatgacccctcatgcttctgtcctatgagacatagcaagtggcccagtctctagatttgcaaatggggaccagggctgggtttctttgcctaggacattcactgaccgccacctaagaagcagcaggtcctaaagtttggtttagacaagggccccacccaaggttcaaggctagttgagatctaaaaatatagcatccatggcttccagcttgtaaaacggcttcatgtctggcaggtggtagagcaatcatgtaattcagggctggggtgtggggagcagggtccaggcttctggggaccagggctgaccagccctaataaagtagggcgaacagtgctgaaggccaggtgtgcggtttcaaccagggtgggcagcccagtgggcactcagaccctcagagctgacactcactccaaacccagatccccagacaacaggcataggtggtgattccagctctaaaccctgccttctccctgtctcgtctgccttggtagatatagacttcctctgctactgtgggcccttcacatattccattctgatgccacagccttgcacgctgtagctcaacaacttccctctccttggggtaggtcttggtttatttatcttcataaattttgtttgatagctataggaatgtagaggatttgtttttatatcatcatcatcatcatcatcatttcaagcccttgctctaggtcaggcatcatgctaagtgccttccctatagcaccccattgaatcatcacaaagatcatctggggtaggtactgtcatctccattttgcaggtgtggaaacaaggatgagagaggggaagtgacctgcccggggtgacacagcaagtaaatggcagagctggagtctgaagtgcacccgtgctctacccagctcctatgtgatgcaggagcctgggaccctgtttctcccagctcacaagccatccttggcaaatggagttgtcactcccactacagctgtgctcatcctgtcccaactaggtgactatgactggctttccctcgtcccacgcccctactcccaggctagttctctctgctttcaggccaggagaagccaagcctgccagaaacagctctggccagtgtcactgccagcccagagcgtgcctcacctcctcaccccaacccccagcttgcctgccagtgctcagatgtgtggtgctataaaaagccaagtagtaatatgcaaattgccctgattatttatggccaagttagtaaataagccagagagacaaggtgggtagttgtttttatgatctctgcagtccttgcaggaaaatctacagtaggcagagtctgggtgggcagagctggagcccatggtttaacaaacacagcctaattatcaggcactggggacaaacaagcgagggggcttgtggaagggagtaacgggaagcggtggccaagaggcggaggcaaggggctggaggactgagtctggcagctggaccctctctgcccacctctctctggctcagcctttgagctgcctgccgggagggggcggggactgagacaccaatcagtgtaaggtgctgtagtgttgctaggaggggaggggtcctgacagtttgccagggcatcgcctccaccaggagcctcccactctaaagctgcaggaaacagcatagaaacagcgagaggctcagggcttaggggtctaggagaagggaaaagggaagcttcctgccagccatcagcctatgctgaggttggcgtggcatcctgggtgggcacctgaattagttttcagcgctgttgcatatctgtgattccagcccttggaaggttgtggtcaggatggaatcaagcagagagaccagggcagaggctgtggtgctcaagggacttgaggagatcaagactccaagcagccacagggcacagtcagcagtgctgctaggctttcgctcccactctctgctcaggtgtcactgggagtggaggggagacgcagcagatccagtagatgccacatccatagttcattggttggagctaatgaccccaggagcaaccagcaacccaaaaggagggagttagtgtattgataccccagcctcttcttcctgtaataggatgactctgagttgcgtattctatgctcactcccagtgttccccaatgggatttagctcaattgactcccagtggcaccttatatgaccaggtcccctttctcagctgccttctcttttctgtttcatatcccctcccctcactgtgctcttagggtcaactcccaaataagctcacttgtagccaaatccttaacacaggtcttgttttagtggaaatccaacccaggtgatatagctaaacaggtgctgaacattttgatagaaataattgtaatagctatgagcacttattctgtgctaagtaccattcaaaacattttgcctgtattaagttattgaaacctctcaacactctgtaaggtagataccattgttaaccgtacatttgatgaaggggaaaatggagcacagacatgttaaagaacttacccaaggtcacacagctgagccaggatgcaaaacaaagcactactagctttagagactattttcctaattattatactaaattgcaggcctttcagatattccccaaagacctcttcattccaggccttatgcttagcattgggatccagagatgaagcagacataggccctgaccttggagaactcagtcttgaggcagaaacatgaaggaaatagacaagccagtgcagcatagagggatgtgtccagagctgggagagattagaggcagagcaccaggaatcagggaaggtgttcctgaggagatatcacttgaacacaagtcttaaagaagaaatgggagttgggagatagcaggggataaatggagtaggaagaatagtccaggcaggggaacagtggtgtaaaggagctgaagcgagtgtaccacggtgatattcagggaattgcatgccattctatatggctggtgtggtattgtgaaatatacatttggtctttgtctcttgtcctgacatacggctgctgaaatccttggaatctccaaagtgatacacatcttatgaatgctaatgggttgactgttggcttgccatccctaaatatcttcaagaccggggttggttactgggaagaccaagccatgattaaagagttgggattttcagtgtcaacccgcaaactctggaggagagaggggctgaaggttgagttgatcaccactggcctatgatttaattaatcatgcctatgtaatgaagattctataaaaactcagaaagactgggctcaaggagcttccagatagcagaacacatggaggttcctggagactgatatgctcaaagaggatgtggaaactccatgcctcttcctccataccttggcctctccatctcttcatctggtgttcattggtatcctttgtaatattctttataataaaccagtaaatgtaagtatttccctgagtcctatgagccacattagcaaattaatcaaatctgggggagggggtcctgggaatcttgctttacagccagttggtcagaagtaaaggtaaaacaaccagggtcttgtgattggcatctgcggtgggaggcagtcttgtgagactgagccctcaacctacgggacctgatgctaacttcaggtagataatcagagttgaattgcactggaggacatccagcctgcatccactgcagaaatgattgcttgtttggtttgtggggaaccccatcccacctccatttggttacagaagtattctgtgttgattgtcgtagagtgagagcagaggaaaaacagtttgtttttctacagctgaaaagttgggagtagactggctatttgcttgtttattgttattgttgtttggggagagagtggatgactgctgggagaagcagcagaggccagattacaaagggtcttgtcaccatgccagggggaggcagagctacccaggggctccaactatgtttacagtgttttatttcctgtgtgggtgttgtatatacaggtgcttattatattattcttcatccttgtgtctctaaaagattcttatttttgaaaatgacttagaaaaaataaaagcatttaggaggtaaacaaacccaaagaatagactggaatcatcacctctccttacagagacgtagttctgggaaggtgccctaaagtctcaagcttttttcacaccagctcacacgataagagacaatcaccagctccaataatgtttgacagtggcctggttggaaaccacttttttttaaagagacagagtctcgctctgtcgcccagcctagagtgcagtggcgcgatctcggctcactgcaagctccgcctcccgggttcacgccattctccttcctcagcctcccgagtagctgggactataggcacctgccaccacgcccggctaattattattattattttttattttttggtattttagtagagacaggatttcaccgtgttagccaggatggtctcgatctcctgacctcgtgatctgcccacctcggcctcccaaagttcagggattacaggcatgagccaccgcacctggccagaaaccacttttatagtttggatctcagacccaaggacaaaagttcactcatgcctgtctttagtgcaagttctctagattaagcctgaagaaactttttggattctggtcttaattattatctaggacattcctgctggcttcgtactagtcataaattgatcagtatgccatctctgttcccagagaagatattaaaaattacagggcaaatgcaatgtagtatcctggattggatctcggaagagaagaaggacatttgtggaaaaacaggcaaaatccagataaagtctacagcttagttaatagtaaaatacctatgttatctcttagtcttgacaaatgcgccatggttatgtaagctgttgacatttaggaatagttggataaagagtatataggaactttctgtgccatttttgcagcttttatataaatctgaaattatttcaaaattgggagtctatttacaaattcaggtgggctgggcagggctaaggatttagctctgccgcaggctgctagagccctattcccagttgacaactgtgtacagttgttgagccagtaatcaatgggtcttattgtgataaagtctagctcatctttccctttcttgtgcatttataagtgccttgttgaagctagtgcattccatatctgttgtattttcctgctttcccacccagtaactcttttcaaaaggaaataaagatgataatagtgcactttgcagagaaactcaacttgatcaaaagatttgccggaggatgcctggaaatagcatgtttcttactacattttaagaaattcatctactaaagttgcatgttcatatgccttttcagactctgaagcaatgcggacttgttttcctgaggaaacaaagggagaaagagggattctagggtagtagagcaccgcaatcataatggacctgtattgaaactacacacaccattacatattaaccttccttggagctttcttgtgtccactttgctaggagggacccaagaaggtggactaaagaagagccagtcacccatggaagcatcccattctgacttcgagatctggtgacctttcagtctttcccagacaggctacacggcaaactgtcctccacttacatcattctaattgtccctgctgattaatgaggtcacttacggtatcaattattatcctatcaagagaatgaatatgagactgaaacaaatgcccatgaacttgcttattctattaaaaaataaagtaatgagagatgattgatggtgtgtgccccaagagaaggcgtgggaagggatggacagtagagagaggtagaaatgagcatgttctgattaggggttaaaagaggcttttgtttaaaagtagttcgccattgaccctcttccttccaaagccacttattgagagagctgtccaaactccttgtctcacatgcttccttcccatcaccagcttgctctttgtcccccagtttcagccttgccactgacactgctctcgagcaggtcaccaccactgtcctcattgccaaatccacggaccctcttagtcgtctcttaccaagcccctcaaaagcgcttgctgccaatgacctaattcttctcgaaacacttataccaccaattcctcattcattcattcaatctcgtgtatatttactgagcatccactgtgtaccaggcactgagccagggactgagcatactagagtaagcatgatggacacagtccttcttgttctaaatggagtttgcattcagatagaggaagataggcaattaacaagtacacacatataaatgagctgtgttagtctgggttctccagagaaatagaacctataggatactcaatagatcctataggatactctctctcctctttctctttcttacacacacacacacacacacacacacacacacacagttgtcccataggggattgatttctcgaccccccccccatggatataaaaatctgcagatgcttaagtcccttatttaaaatggtgtagtaattgcatataacctcccatatcctcccatatcccttaaatcatctctagattactgacaatacctaacacagtgcaaacactatgtagtaattgtactgcgttgttttaaaatttttattatttttattaatattatttattatttaatattttcaatgcatggttggttgactctgcagatggggaacgctactgtgtgtatgtgtgatgtgtgtgtgtgtgtgtgtgtgtgtgtatacatatgctttattataaggaattggctcacatggttgtgaagactgagatctgcagttggcaagctggagacccaggaaagctgataatgtaagtttcagtctgagttcccatcagaagacgagagaagaccaatacccccggttgaagacagtcagagagagtaccttctcccttactcagatttttgttctatttaggcccttaatggattggataacccccacccccattagtgagggcagtctactgattcaaatgttaatctcacccagaacctccctcacagacacacccagaataatgtttaaccaaatatctgggcatcctgtgccctgtaaagttggcacctgatattaaccatcacaaatccaccccttgtcaactctgcactatatacatcttaaaacacacttaactgccaaataaagacaataacaaacttacaattttgcctaatatgacatgactatcctgcattaacccctcaccagaggaggagacaaaatcttggaatggtgtttactcttcctgatatcctgcaacttaaatactatggtgtaaaagtaacaatacttaaataccataacataaagttattatatcttatgctatatgaaaaaggaaaaagaaaacaaatacatattacttaatatatatgtatgtgtgtatatttatatatttatatttacgtatatttatatacacacatgaatagatatatccttatatacacatgcaaacactcataacaaaataaagagggatactcataacaatgacagtctttatttctgtaactggctatgtggtcacagctggtatttataactaactctttcactacccattctgtattccctttgtcttcagcaagcatcacagctgatcatggttctttaccacgtggggtgacctaaacttaaagtgcctgagccattaatagtcctgcctggattgagttgttctggtttttcattgatcttaatcataggccatgataatactaagagataacctaagggatcttctttattccagacataatcttccttacctccattgtgtagtagcagtcccatttctgtttggtagtgagaatcaatcaccctggctagcatagttactcttttctttgcctgttgattcagaggtatgaggagtgcaaagtgcccgggtagcagtcttaactttcagcacagtaggatcattgttgtgacacctggaactaagacctctgggctagcatagcatatgctagcctctggacttgcatagcatatgctagcctctgggctagcatagcattaattttcagctcagtaggatcattgttgtgacacctggtgggagcattcctccctttggaactaagacctctgggctagcatagcataaggtcatagaacaggaaggaaacactttgtcagttggtcactagaggtaatagtaagtggagctactcctatttccatcccttgatttctagacttgtgaatcctggctatgggagaaagaacactatatatgcatgctgattcagagcatatacagccttctggagaaccttgtcccagcgctgcaaggtattgccacctagctggcattgtaattgagtcttgaaaaggccatttcattgttctacctagccagctgcttcagattggagggttcacatggtaggaccagtgaatcccatgagcatgagcccactgccacacttctttggctataaagtgagtttattggtcagaagcagcacattgtggaataccatgacagtggattaggcactatgtaagtccaaggatggtagttttggcagaagcactgcatacagggaaagcaaatccatatccaaaataagtgtctgtttcagtaagaacaaaacacttctccttctacaatggaagcagtccagtgttatctaactgccaccagggtagttggcttatcatgccagggaagggtaccattttgggaaccccacttctggtaccaaaatctgttttggtctctttgggctgccatcagaaaatactcgtagactgggtggcttaaacagtagaaatttattttctaactgtcctgaaggctaaaatgcaagatcagggtgccagaatggcctgattctggtgagaggtttcatcctggcttgcagatagctgcattctcactgcatcttcacattgcagacagggtcggcaagagaggcagagaaaggggtcttttcttataagggcactaatctcatgttggaagtcccatccttatgacctcatctaatcctaactacctcccgaagatcccacctccaaataccaattcaacatataaactttgggagttcacactcagtccattacctaagccatccaggtagtggtaattgttatgagaaaaataaagcagagcaactggcagagtatgacaaggcgcaatcaatggaacctttttgggaagtgatacctcacttgttttcacatgtcagtcccttaaagcttgccactgtcttcagggtttcatgttttcttctgtggcacctcactctatacacttggattggatcttaggggtgagcaagtccctgttttacagtatgtcactaaaagtgattcaaaagatggcatctggggttggggggcaaaacccagttccaaattccagctgacagttatcctaagggtccaggcagaaaagcagaattcagggataaggcagcagttcagaatccagggtcatctaccgtaatatgaatggtgctcctgaaagatgtgcaacatagtggccctgaaaaatcctagaagctgcagcagagttagaggttcacaacagacactgggaagtaaggcctgagaaagtccctgaaccacctgcaaaaactctccagtgaccaaactctcttactgcctctgtggctcctccctctcttgtctacagatgaggcccacaggtaaagcctctttgctattaactgcaaatatcgatggtttggatgtaattcaggttgaccctccactgttcacaacgtgtgacttgggcttgggtaatcacgtttcacacttcacagctgtgggctcagcctaccctgcagtcccagcctgagcaaaaaccctggagcccctcttactgagaagggtctctccacatttccttctggagaaggaaccatggttctggagaccatggttctggaagctcctgtttctcctagttccctggagtatgggaaacagtgggcatagtgtcctggtgcctgaccctcccttccaagtgggccaacaagcatttctgtccagttcacaaagacagggcctgatattctcccacttcatggccaacaccttctggtggtggctatgcagcagctgataataatatgtttagtattaacctgtgcacaggtgctgcctgtagcacactgcaaagcgctgtctttaaatggagacctaatctttcaaaccaggtgcggtgctcaaaaccagctctggcggccaacaggaagggcattgtggtacagagcaggtaaggagaagacccccattctttctgtccatcttctccatcctcttgcaggcatgttcagcatcttttgccttcttagaattctcagaggctccacctgctccttccccaggttggcctgagcagctgtccgagggggtaggtgggcacaaagccctcaggatgcagaatctgctgaccattcactgatatttttataattgttgtttgtgtctctctggcacacaaggaacaaatcctagcctggcaccatctgagggcctgggtaaatctcagctgttccatcaaacctcctggggtggtccaaactttaagggctgccttgacagagagcagtttccattcctaaatgggtgatgtcactaagcctgatttaggggaggtagatatggaaggcagcacctgtgcacgggttaataacaaacatcatcattattatcagctgctgcatagccactgccagaaggcattggccacgaagtgggaggcaggcttctggaacatgacgacctctcttcctcaaagcttccttccccatttccatccttgccaacctcctgacacgtggtgctggatacttcagtctctgtcatggaagaccaagttggctcaggggttttcaggcttctgtggaagtaaatgaagtctgcatctgctagaaggctgagcagcctccagaaaaatcccctctcttggggagactggtaattaagcagtcatggcaaacaagtggaggaggaacatctggttgtatccatttgttctcctgtcattagttggggaacaattttataaattacacgtaaagtgggttttgtctttcctctgcttgtgccatcctctttgagatgacctccgtatcctaccacagcccgccatgccctttggatgattggctaacaatttatctttttagatcagctcaggctggtgcatcaagttccctggatgcatccttatcactgcacttactatattgcattataattgtgtcttcagtaattacctcctatggtgtatctggtgctgttctcaatactggggttagataagtgaactaagtggatagaaatccctgccctcgtggaattcacacactggtgggaaaaggtagacgtaataaataaggagtgatcaaatatataggaagtcagattatgataagtgttaggagaaaatgcaggacaaggggaatcaggaaatgggacaggaggggaggagggttgcaattttaagtagaatagttatcaaagcctcggtgtaaagggtatgtgaacaaagacctgcagaagatgaaggaacaagccatacacatctgggggaagagatgaggtagctggaggaaactgagagaagagcaggtgcaaaggccctgaggcagaacttgccaggtgtgttttaggaacagcaagcggccgttatggttagagtgagtgagcagggggaggtagttggtgataaggagggtggtgatggagtgggagcgggtagtggcagcagaggattccctagggcctttagaccattatgaagactttggcttttatcccaaatcgagtgggatgcttttggaagggtttcaagcagagaagtgacatgatctgacttaagatgatcacagaagctgctgtgttaaagaggatctgtaggtggactaggaggaaagtaggaagactggttaggaggttactgcagtaattgaggcaagagatggaggtgtcctgttccaggatggtagtaatgaaggtgatgagaactggctggatttctagataaattaatgtaaatgcctccgtttgagggtaaatccctcgagagtgagtccacgtcttaggcatttttatcctgagaaccaagcatagtacatagcgtttaatagggcatacaattaatatttgttgaatgaatgattgatgagaaaaatttgtaattgttaccggtgggaataagccagccttaatctcttttgtgaacctatcagatcatagagacaaatcatgggtaacatctatttagtttctcaactgatgtcgtaaataaagctattcatgcatgtactgaaccaagaagtgtggggtacgctggatccaactgtatttgtctattattcaggactttccaaagcttttcatacagtaatgcaaaggttcccaaagtttcttaggtgccattagtgtctcagtaatgtttccacggtgctccatgggtaaaagaaatacctattagctccacttattaagtagttaggtccaaataactgaataagtatttataccccaacaactctgtatctgtttgaagataatataaattgaaagaaaaacatttttgtttcatccttaaataattgttaaataacaattgattgctaatggtatgtgtttccttgttggtcattgcaaagattctcaaaccttggactcagattggacactaccacctgcatatcctgttccacactgattcacacatggtccctaattcccatcacaccaactaccaaagctttgcaaagatatgatgtcatctaacggaaggtagctttacactgaaattgtgaaccaccttgagctaatagtttgtgtgtccagcagatattaagtgccactatttcctttgaaagttaaaaatagtccttggttacccttgtaaactcactgcaatgccctggggcaccttggtgcaccgtttgggaaccatggtgcatttcccaaaattacttatttttttcaggcaaacctactaacatcatattggatagtattctgtgcaacatgatttgggaaccgttggggtagagcacatcaagagggctccctgctgcagaaggagacgctgcagtccaatgggaaacacccctgagttttgatggagcgagtgtgcttagaggatttgcattctgaacgtagtgcttctcccctatttttagacctcagcaggtgggtctgctgtgactccagatcttgcttctaaagagagtccacatcctagaaagtgtactgtatatggggatttggaggtctagctttgctcccatccagtcatacttaagacaggtatcccagcctccaaaaataaatgcacatgtgcagctgaaagcagaggtttgcagagccagtagatgttttctggagaggcagggacattctagacaagatcctttggacataagttgggttttttcagcagatatctagctaatgcaagattgccctcttaaatgggagtttattacaaggatctccagatcttgagacagcacaagaataatctctttagacttcctctcattctgggtttcagggtgttgaagactgagagtgtcagtggtctcatagctaatgtagctacagcctcagctccatgatctaccttctctgggcatatcctttcccagagagatttccacagaaccccagcccacaagatgctttaagaataaaggagtctatgatgtatatatagaaaggcacaaaaagcctagattttccacatttcccagttttagaagctcttgatgaaatgcaaaggggaattaccagtgaaaacctgtgtttgtaggggtgtgtgtgtgtgtgtgtgtgtgtgtgtgtgtgtgtgtgtatggtgtgtgattatgactaatgtccatcaattacctgcaaattactagatgatgcctgtaatgatagttctgtttttagcttaatggtttatgtatctaactagtggctgctgtctggagtagggctgctggcaaatcaaaacactatttgccaagcctgtcagtgtgacaaacgttgcttacatttactcttttattcccaaggtcaattggtatgtcttttttcatatcactgtttgatgtgctaacagccttaaatgagaaccattcaataaaggcccaatttgctatattactatttattcctaggtaattctatattagtttggctctttaagattgcaaagaagagacatgcatagatcaccctcggaagtggaggcttatcacatggttctccagatctcggggcagcacagaaccacatctcagacctttggtcactctgggtttcagaactttcaagatagggagtgtcagcagcctcatggctgacatagcaacagcctcatgattgttgtagcaacagcctcagcttcataataacctgcattctctgggcctattgtttcccagagagggttccacagaaccccagcccacaggatgctttaggaataaaaggggctataatataatgggtttgggatctgttacataatctattccagccttgaaggtttacattgacttagcttgttaaaagtcctcctacgcattttattttttaattgttttctgaaaaatccctgctttatttaacccagcatttcccaattctgtttaaccggtgaacattctagaaacatgctttgaaaaataacctagttttggtactttccagaaaaatctggttgtattaatttgtcagtctctgtgttggggggtctgcatcaccacccgcatgatttattaggactcataggattcagtataaatttgtacccatggctatgatttattatagtgaaaggatacagagcaaagtcagcaaggggaaaaggtgcatcctggggcgatggctgggagaagccaggcacaagcttccaagagttttcttctggcaaagtcacacaggtcgtgcttcaaacccctggcaactaattgtgacaacacatatgaaatattgccaaccaggaaagctcagcagagactcattgcccagggttttcccacagagatgattacctagacccctcttcctgtcacataccaaaattctaggctcccaggtggaaagcaggtgttcagcataaaccataatgtttgtacaaattgtttagacctctcttgaaagtactggaaatggagggaaccctcctgaaatcccggttcccagatgccagacagggattatacttgtaagctggcctttcaaaggatagcagtcaggccttttctgtctgctttctcatagtgaaaccgtcatttattgactctatattgcatctaatatgtactgtgcactagtgatatagtgaaaaggttatagatagtctttgcctccaagagacttaccatcaagaaggaaagacagatatataacaattcagtaagaaaatcgattcatgatcattgggatgaatgttacaaagtagaagtactctattctctgaggacatttatcaaggatccctaaactctttcccagaggaactgatgctgaaagtgagccctgaaaagctaatgcagggttggggggaaggtaaggtggaggccgcctgggtggcaaagggatacatctgggcacagagtcctagggacagcatctgcaaaggccctgagatgggaagagatgtggcaccttcaaggacagtataagaagccagcttatgcctgtaatcccagcacttagggaggctggggcaggtggatcacgaggtcaggagattgagaccatcctggctaatactgtgaaaccctgtctctactaaaaatacaaaaaaattagctgggcgtggtggcgggcacctgtaatcccagcactttgggaggccaaggcgggcagatcacgagttcagaagatcgagaccatcctgactaacatggtcaaactccatctctactgaaaatacaaaaaaaaaattagccaggcatggtggtggcctgtaatcctagctactcgggaggctgaggaaggagaatggtgtgaaaccccggaggcagagcttggagagagccgagatcacgccactgcactccagcctgggccacagagcgagactccttctcaaaaaatagaagccagtgtgggtagagggggaaagaccaaaggggagagagccatgagctgaggtagaaagaaaggcaggccaggtcttgcaaggcaaagcctcgggccacgtcacccagagagccatccatctctgtcattcctgatcattatgtccttctagctgatccagatctcttatttcacttgaggcctagggaaccagtcccagcaacactcactcagggacgactcagggctctgcctccatcctcagaaagttatgaaaagtgggggtttatcacatggttctccagattttggggcagcacagagacaatcttaaagagcccaactaatatagaattatccaggaataaatggtaatatagcaaattgggcttttattgaatggttctcatttaaggctgttagcacatcaaacagtgatatgaaaaatgacatgccaatttgaccttgggaataaaagagtaagtgtaagcaacacttgtcacactgacagtcttggcagatagtgttttgatttgccagccgccctactccagacagtttcagaaagttccatgtgcctggaagacatttggacaaagcctaattcttccgtctttccctgtcttctatgtttttctatcaagcaggaatcaagacttacatttactccagtaatggggtcaacccaatgtactaatagactccataattccaggttggagtttgttgagatcagagtttcattatggcctttctcactggttctctgactggcaaaagcaaagccatgtctctgagcttggcccaagattcaaccaggtatgttcctcctcctctctgaggatcagcatctgagacctgttgccactcagtaaatatttgagggattaaaattggattgaacttgagaggtggcacgctcatacctttggcagatgtgaatgccagtgttcttctctgcgtggagcccaagtgtgtctctctggagcctctgtcctgtggtcctttttctttgccaagcatttcatgaggacattggtgtgtcaagcatggccctagggatgtggagacagttcttatcctttgccttgccaactctgttggaccccagactatacgtgcctactgtcttcaactgttcctcaccccacagggtgaggggtcttttagggtctccttgctgcaagcctggcacgtcaaagccaagagaccccagcctgaggaagtgagtagttggtcagcttgagagccttgaagttctcaaacatgggcacaaactcctggagtaagaaaatgagctttcatttccatgggtaggaatttgcagacacttcacttgggtggaagaaatgtcatattcctgcattaaaaacaatttgactttgagtcccatgcataaaggggaagaatttcacttcagccactgttgggattctcccaagcaaggtcttacatagacctggcattccaggaagaccctcaggtctcagtccacactgggcattgttgatgtgctcaaggcctcagtgacacctgaaggcaggaagctcagttgtatccgagccaaattctggtgggggagttcaagtccttctgcttagaatgggagtccttttgtgtacagtccagcacttctgtcccctcttccttatttaaataaataaataaatggcccatttatttatttttgagacagggtctcattctgtcacccaggctggaatgcagtgacatgatcatagctcactgcagcctcaaactcctgggctcaagcaatccttctgcctcagactcctgagtagctgggactacaggcatgcaccaccatgcacaactattcttgaaagtttttggaaaaacaggatctcactatattgaccagggtgatctcgaactcctggcctcaagcgatactcctgcctcggcctctcaaaatgttgggattacaggcacaagctactgcacacagcctaataataccctctttaaaataaaagctcccacccttttatttttcctggaatgattaggaagaagtggaggtgttcgaagcagtctgctttttccttatatctcgcctcatttcatgggtgtgaaggggatttgccatgtcactaagtgttacttagcccaagtctggatgtctctccctcctgttgtctatactgccagcatcagagtcacctaagactctgtgtggctgctcctcgaaacaccaaatagttggccattcattcatttatccattcatttagaaatacacatgcaaggtgagcaacacaaactcagccatggctcttggggtgctttcatctagtcagggagaccttaatgaaaactactcaccccaataaacatctaattaggaattatggttagtgctagtaaagaaaagaaaagaaaagggatgtcagtcaggataggtcaggttatactctgtgtactaatcatggttttttaattgtctgtattttctgatactttgacatcttgggactttgttgacctaaaatagcaaagagctctcccggaagtatgcctttcatatgcaaactgatgatcccaattgggtagagcacaactaagtcttttattattttttttttaatttaattttttttttgagtcaggatctcacttttttgcccaggctggagcacagtggtacgatcgtgggtcactgcagcttcgaactcctaggctcaagtgatcctcccacttcagcctcctgaatagctgggaccacttaagccccctgagtagctgggaccacaagtttagctgagtaaccaccacactcagacaaatttttgaaaacatttttatagagatgggatttcaccatgttgctcaggctggtcttgaactcctgagctcaagtgatcctcccaccttggcctcccaaagtgctgggattacaggtgtgagccactatgcctggcctctacctcttttattgagatctcattgtttatctactatccccctgccctaattacccagggccatacatcagacagctaagggtggtccacataccctggtgccctctgaaattattcaaactaggcaatcctaaacctgctcagctgcttacctgatcttgcccattccttcttgggaaaaccacaataaaggctcttgcccacatttacccaggctccttctgccttgtcactgacgctggagcttctgacatgcttgtggccctgcatggcatagtatgccccttcctctaggaaactgtgttatcttttcagcggcagtgtcttctgatctgttggcctcaccatacctgaatggtagtaacaaaacctacaagtgaaaacatggtggtagcaaacaaccctcaaattgaaatggcttaactcaccaaaagtttatttcttgctcatgctgcagattcaaaagaggtttgcaggggctctttgcttaggggagttgctcagagaccgtggctgcggaggccaaggatcactgaccttggataaggggaagggaattcagcaaaaggtacacaggctgttcaagcctccctcctggcaacagtgaccttcactgctacccaaatctccctggccaagctggtgtcatggccaggcctgacctccacaggggtgggaggtgctgttccactctgtgtctagaaggaaagctggaaatgcaaggtgaaccataccagtgacttcactgggacctctgagcatgcagaataggctggtctgggatgtcaggaatgcacctttctagaagtaacgttgagacactcgtgataagatttgaatgatgagaaagagttaattagacaaatcccaagggttagaaagtgttctaaatgggagacagtgcgtgcaaagaccctgaagatggggcatggcaaattgaaggaactgaaaccacaggtgtacgaaggaagggagtgggagaaaagcgggggaagagtatttaatcactgacattatttagaacatggatgcatggtgataagaagtgaacttttaaagtccattttattattgatttcaaattccctacaggaaattaatgcccttattgcctgcactttgggctgaccacttcctttgcccttgggatggccttgaccaaagaagactggggggctggagccaggcaggagacagagcagagaatctgtcagggccaagccatgcaggatttgtgaacctcgttagggattctggctttaatcctaagaacagtgggaggctgtgggtagattctgagctgagaaatgaggagtatatggtgtcctggccgtcccattttcaagactctgggttacttttggcaggaaggcaaaaacaaagaaaagacagtggagaaaatgagaagacaataaggctgatgtaaagcagaagatgagtattgttttacacgtttggctatgccacctgtttgcaaaatgctgttctctgtgcattttagagtctgcaaggaggataactcatagcaacaggggactctcacctgccttgccatcattttactgcatttctctgctaagtctggatttcactattgaaggatacctcactcctttcaatatggtatttaatcttgtcagataaaagatgggaaagtctgaaagttttatttgctcattctgtcatgcaacaccatagctcctcctaactgcggggtcttcagcgtgtctaaaatcgatctcaaagataagtgggtgggggagcgatgattcaggtatccagctggggagattcaatttcccatcccctcccccagccttagctagcgcctttgaggaatcctccctgctggaatttatctaccaaccctgggaaagagcagagcagtggtaaatatctgattagagaaaatgcctagcaagctgcaattccatatattgtaagtgataaaactgtaattgtttgttgacagtgtacattagctattcacagctcgcatcaatatagtaccgagaaactagggtctaggaatctttaatggcagtgcaaaaatatactggaactaagttggggaataaaatcaacaatttctgcttagtgagaggaatgccattctcagagaggacttcataggagaaggcctggtgaggtttgagcttcctccatgaggctctatgtagttgaaggaaaggatggtccctaggctgagtgtctgggaagggcacccaagggcataattctggtagacatgggtgagagacaagttgcagctgctgtgaattgggcccacctggagatggagacaaccagcgcttgctaggatggggtctggggaaccagatataggtctggccttgctggggacaatttactattttaatccatagggtacaatgggatgatgtcagtctgtcactgaagatacgaatatttcgggggagggaaagggcaactggtgcatgggcaagtcaacaggaagccaaggaataggctaacgggggccctgtggcctgagttctggtactggtagtcagcaaggctgcagtcagtgccgccggtgggggcggggagggtgcaatacaggctggagtggataggaggcggctggagtgaggggcctggaaaagacaaagctcaaagcccaatccagggagactgagtgtaagtctgatctaatggaggactggcgtactgtccaatagcaatataatatgagccatagatataattttttaaaacttattaaatttaattttttattggtagagggtgttttactggggaaattcacagacagaagcatggtcttgggtagccacaaggcaggtagatctctgcaatgttactccccagacccagggcatatgtaccatagggaaagggtgtatgtgtccagccagacaatgaaaagcagcctctagaacaggcaagggtactgtatgtgtcatagcctgtaacttgtatgataaacatcaagattgacatattcttatgctaggaacagtaaataaaataggaatcaggaggcattctcaagactggagctaatcagaagtcaatatggtagatttgtattcatgaaactttttattttgaaataataatagattcacaggagaggttccatgtacccttctcccagtttcctccaatagttacatcttatgtaactatagcacactctcaaaaccagcacactgccactggtgcaatgtgtgtgtatacttctgtgtcattttatcacatgcagattcccataaccatcactgcaatcaagacacagaatgattccatcacccaaagatctcctcatactacctctttgtggtcatatccatttcccttcctcttacgattcctaatctctagcaagcactaatctgttttccatctctttaattttatcatctctagaatgttatataaattgaatcacatggcatgtgatcttttgagattagctttttttccctacttggcttaatgaccttgaggtccacccaaattgctacatgtattcatagtccattcctttttattgctgagtagtattctgtggtatggatgtactccagtttgtttagtcattcacctattattgtaggacattttggttgtttccagtttgggctattaggaataaagctgctatgaacaattatgcataggtttttgggcctaatggatataagtttccacttctctggagtaaattgctgagttgtatagttatgtggttttttttttcttaaagaaactgccaaactatttaccagagtggctgcatgtttttgcatttctaccagcattgtatgaggaatccagttttcctgtatcatcaccagcattgggtatcgtgactatagtgttttattttagctgttccaatgggtatgtagtaatatttcttcatgttcttaatttgtatttccttaaaggctagtgatgttaaacatcttttcatgtgcttatttgccatgcatatgtcttatttggtgaaatgtctcttgcatgtcttttgcggattttctaactgagttgttgaatccttgcctttttctcaatcttaagggaaaagcattcagtctttcaccatgaagtgtgatgtcagctactgtttttttttttttgtagatgttctttatcaacttcagaaacttaccctctatttgtaggtttctgaatttttttttttcgtttaactacaaacgggtgttgaaatgtgtcaaatactttttctgcattagttgatgtggtcatgtgatttttctacctttaacctgttaatatggtagattacactgattgatttttcaaatgttgaaccagccttgcatctttagacacaaccccacttggttatggtgtaaaaatatttttatatattgctgaattctccttgccaatattttgttaaggtttttgtgtttgtatgcatgtgaaatattgatcttcatttttctttatttgtattgtctttggcttggtaccagagtaatactggcctcataatatgagtttggaaatgtttgttcttcttttctggaagagattagagtagaattggtgttaattcttctttatatgtttggtagaattctctagtgaaatcatctaggcctagatatttcttttttgggagttttaaaattactaattcaatctccttaatagttatagggctattcaagtgatctgtttcatattgggaaacttacggtagtttgtgcttttcaagtttgtgcccatttcatttaatgtgtgaaatgcatgtgtgtaatttgtagtatttccttattatcatgttgttaagtgcaggatctgttttccttagcccttgccaactctagataggtgaaaaatgagtcttggggtttcagttttcacatttttatattaattaggtggatcattaatttgtattgtatcttttgctcttttcctcctgtttaccgttttcttactgatttgtaagaactttttctaggttataaatacgaatcctcctcctgtcacatattcgtaacctttcaggttgcacttttctcattatcttttacagttttttgtcacacatacatgcttttaattttcatgtagttattaatcaatattttcctttaaggcctctggggttttatgttgtatccattagcactcaatttcaagagatagaaaaccaagtcaagctagtttaagaaaaaaagaaagtaaagaaagaatgttagcttatgtaactgggcattgaagagataaatctcgctgcatggattaaggatctgaaaaatacatcatcagggttctgtttctcttctcttgccactgctcagcttttatttatatctatctggcgatatcattttctctaaagcagatagtctctgtgtgatgataaaaaggctgctgggagtctcaagcttatattgtagtagtttaaggtccaaaaataaaaggctttcagagtctgtatattatatcccatagaaggactcggaatgactctgcttgggtggtatggtctcttccctcttccccataccctgaatccgtccataaaaatgagggctagtatgtcgcgattgatcatttacctagctctgtggctagtgggtaggtggagtaccatcagaactccatgccatggacagctcccatggaagactgacagggcaaataggtgcaaagagagtcctctgcgtgtcttgcttaggaggcctttccccagcataagatgattaaacaaagtttgtttccttataatatgtatgatttcattattttatgtatacatttttgatgagagagagtatatgaatatggggtgaggtagggatcttttgctggatgtgtttatatttgaagagaagatgcccttgaaacttatttggttgcctgctgcataatttgataattttttctttgctttttcttgagtctattctgagttaacatgaatcccacaaggttaggatggtgggaagggcaagggcttcatctagcataagggttttcacagtgtctgttaacaaatatctggtttaactcatctgagcccgatactcatgcccttcagtggatatcctgggcatcaagatattgtatagcagtgggaggtatacagcggcacccaggagaaccacggatatttcaaattacctaaaaatggggacaaagttaaaccttgaaattcctcctagattcctacctgggtgtggtaaggcaggctgaggcttagagggggttaaggacaaaggtgtgtaggagactggccacctcactatgacctgtgtgcacaatcaggtccctgtgagggtcaccaggcatggatgcccagcagtggacaaggtctttcctaaatgtattcccaagtgttcagtggtatctttttcccttagaggaatctttaaaaatgattatcttgtgctaaaagcatattatttcaggttcaacaattcctttagcttcacacctgtttccttttattcagttaaattccagaaagaaaatttaaacattttaattttaatagcacgcacagtttgatcccatttgtatgaaattatttcattgaatatgattccatctattgatcccaccatctctttgtatgtcaactgtcaggaataattatttctagattgtgttggttttttattttttgctttctttaaaaactaataggcacttatttctataaaagcagtagacattcctttgaaagaataaagtctatgataagaagcatgctcattcttctacttagagttggctctatttcccttactatgtgaataaatattgtctactggcaattgttagttgtaaactcatggggaattatacccagagcctcacaggacctcagccagaaagagaggagacaggaaaagaaatcagaaaaggagaaaagaggaaacacaaaggaagcaggcaagcctccaggttggggattagaccatggctttggcggagtcacttcctcatgtttctggggcagaagcctgctggttttcatcacctctgctgagaatcactttgtctttgaacaccctctgtgtgcctagatcagcactgtgtatccagcaggcactcaataaatgcttcgtggatgtgtagtttcccaagggggtcattctccctaatccaattctttgtctttcaggctcacaggctttcagctgccagccaccattgttagtgcagccaccaccctctctctgcgcctcatcagcgactatgcagtcagtgcccaaggcttccacgccacctatgaaggtaagtgcctccctcatcggccacaggagccggagatgtgatgtcctaatagccacaagcaggactgcattgctcacagatgcagggaagtgttcttcagacccagagcttgcgcctgtcctgacaaggctggttactaaccagtaactcagttacttaaattgtccctcttggttcccaggaaactgagaattgaaatcaaagctcatgtgcagtagtttatcctgagggcctggtaacatctacttctctgtcccctttaactgggttttgttgtgtttttatttttttaattctgttttatattgggcttcattgtataaggtacctcaggttgtttttgaaaataaaagacatataaaccctaagtaaaagaaataaaataagcaactgaaaacaccatacaatgactgccaagagtcagttttatatcattcagagaagaacaatcgatttttccttaatagcatggattaggggcttttggtttgtgctatgcaaataatttgtacttctctcagtctgtttaaatatggtgttagaattcaaattaacactaatatcttcagattatacactattattattattaactttattatgttcagaaggtggtacttctagatctctgtcatttccctgggaaatttacatctcattaataggtaattatgccactcttggctaagacctgcactgttattttgtgttaagatcattaataggcatattttaagactgttaatgataattaataacagtaatgacataataccctagtaaagcacgccagatatccaaaagctttttttttttttttttttttttgcctttgcctttgtttaagaacttaaagagtaagcgatgctttcttcaatgaagaagctatagcaatacagaaacagacactccctgtcttggccaggggtgtaatgcataaagaggacaagttctgcctccttagcaaaaaaccacccctggtggcagggggtataggggagatggtttgatgctttaacctgagcaactgggggctcctgggaaggcttcagttatttttaactaaaggttgctgagaaggctcctgagaaagttccacctgtcttttgctgagggcttctgacataactctattttaccttaactgagggctcctgacaaagactgacctgtccttaaagtgaggattcctgaaatagcctaatttctttttaaaaaatgatcagatctcagccgggtgtggtggctaacacttgtaatcccagcactttgggaggacgaggcgagtgaatcacttgaggccaggagtttgagaccatcctgggcaacaggacaaaatcccgtctctactgaaaatacaaaaattagccgggcatggtgttacacacctgtaatcccagctacttgggaggctgaggcacaaaaactgcttgaacctgggagatggcactgcactccagcctgggtgacagaatgagactctgtctcaaaaaaaaaaaaaaaagttcctaccaatatcaagcctgtgatttttgtcatcctatttattccttcaacctggccctgaatccaaagtaattctctccaagtttgagcaacaagctcctcactaggagaagcctcttcagaagcttcctaaagtctgtctggccattagctccttccacaataggttggccttggggacattgactgcacttgggacccggggccaggaaaagggagactgggtcagggacactagaagaggtgccagcaaagatgctgggagtgactgacacatgggggaactggccgggccctaggctctcatggtgccctcatttctcagtcctggtcgatctttgaggccctggcttccctgaggcttgaggaaaaaggtgtccctgcccacactgccctgttaggggcacaagcacttctcattaagcagagcagatctgagggcacattcagagtcccgtgaaaacagacactgtcacctggaaatcatgagcagggtctgtagttgggcaacaggaggtctgtaaactccatgacattagagacaaaaattctgagggtgggtatatctttttctagggagaatatacagcaggcattagagaactcagatccccctggccaaatctagccagaaggttgtttttgtaaataaagttttattggaacacagccatgcccattcgttgacatgtgtttggtggctgtcttcatgcactacaactgcagagttgagctattgtgacagagaccctatgcaaagccaatgagatacttactttttgaccctttacagaaaaaatttacttacccctggtctgcagctgtattgtccaatacagtagccatcagccacatatggctatttacatttaaattaactaaaattgaatagaatttaaaattcagtttcttagtcacactagccttgtgtcaaatgttcagcaaccacatgtggcttgtctgccatgtagaacagcccagatacagaatatttccatcattgcagaaaattttactggacagagctgagctggagctttcatcggattcacaaagaggccggtgattcaaaagagattgcaaaacattagggataaattagaggccagtggatccctcctcccacctgcctggcacaggtgaggcagtccaggcatgagaatgctcaacattccacagcaagactcacagggcagaaggaacagcctatttcacctcagccacataatgatgtcaggtgtctaagtcattggcactaaggaaataaagccttgtaggcaaggcccctgcaaaggctagaccaatgctaacagattgctgtagccgagcgagtctctatgcagtcacctgttgcagggtttctgcaaactacgcaggatgtgtggctggctgttttgtactgcatggtaaagtgggtcacaggtgtctgtgctaacaaaggagtcagacacccataagccaaggctgtggctatcactgaagctcattaatttgatttgggactgggctatgtggcaattcatgcatctggacaaatgtgagttgcacttacttttggaacacccacagtggatggacaaggatggaaggtgggaggcatgagtagggtcagccacagctgtgagcatacctacctgatatatgccctgggatgtctatcgttgagcttattcaacaggcaactgaatcgggttgaacctgtacctgactcactgggtgaccttgggcagatttttaagctctctgagcctcattgtggggtggaggaggggagattcactagtcaaaaggaatttatgaagatttggctctcagggaaggagctcagcccccttcctccattgcagagtccccttggacatttgtgctgggtggcaagcagggagaatgacagacaggcttcaaagaagaggcccccacttccagcctaggctgcccccagtcaggatggtttccttatattcgctattcatgatgttgttgtgtccgtttcaaaatggcatcagggccctgctcttggtagctcctcttggctgacatccccaaatgtctgctatcaaagcgagtttgatcctcctccaccctcatccagaatgtgaaaagtatagataaggaactgaactgctgctagggattttggagaaaggtgaagtcaggtgatgagtgtcagcccacggctgctgccgccgcaaggaaaagatcaaaaaggccggtagtcaaaccctgagatgacagaaggtgcttggtttgtaatccccgggggcaagagcgtgggccgcagcagctggacgggagggaaggggatcaacctgtattaagcaccgactgtatgccaggcactttacatacattatctcatttaatcccccaccacaaccctgtggacagacattgctatccatcttacagaagtacatgctgagcctcagggaagttttgtgtgcagcttagggcctgatggccaggaattttaacgtggcttttctgcaaaactctttgagtaaggcagaggctagtgactccatttcacaggcaggtaaactggagataagccagaggcaggggaggatgtgggaacttccaggctggtgtgggtcatccatggaggcaacaagagatgtgttcctgagcttctcagctagggtcaccagataaaatacagggcactcagttaatctgaattttaaattattcaaatttttgaagtgggaataatgtttagtgtaagtataccccaaatatacttattttattttatttatttagttttttgagatagggcctcactttttcctccaggcttcagtccagtggcacgatctcagctcactgcagcctcgacctcctgggttcagcctcctgcctcagcccctgaagtagctgggaccgcagacacgcgccaccacagccggctaatttctttgtatttttggtaaagatagggtttcaccatgtttcccaggctggtctcgaattccagagctggagcgatctgcctgcctcgacctcccaaagtgctaggattacaagcatgagccaccacactgggcctgaaatttaaatataactgagcatcctgcattttcagttgctagaactgacaatcccattttcagcaaagagtctgaaaataggccccaggagccctcgccccacttacctcctcctcctcctcctgactcccatgtctgcccatgtcctgctctgcccatgtagggctgtctgcccatgtagggctgtctgcccaggtctagcctcagttctgccattccaatgaatatacatttagacatctatctgctcacacacatatgcacacaggtgtggatccgtgtgcacttgggattatgctatctgtgcaattctgtaatctggttaatgaagccaacgtttttctgtgttaataaaagtagccctgatttgtctttctaatgaacatcactgaggaagccattgtggtttgcatataccatagttatctaaccagtcatcttctgtggacatttaggtgaagaacatccttgtacatacaatttaagccctcatctaattatcttcttagaataaattcttggaagtgcaattgctgggtcaaagagtatgtagattttccattttatacataattccatcgtgtcttcagaaaggttatacgaacgcacacttctaccaacagtacacaagcaggcctgagcccattcctcccaccttgccagtgttacaagtcagtttcatggattaaaatgggtggaaaatgacatcccatttgttgcgataattggcatctctttgattgtaggtaaggtgaagcacctgtcatcacttactggccatgtactgataattgtataaatcctctctcttggtctctgcctactcttccatgggggtgttagaatttttcttatcttctttgtaagtgctttttgcatattaaggatattaatgtaatgggtttcctttagaggtacagcagttttcatttttatgccactcattttacattttaattttttaatttttcctttatgctatctatttttggtgccatgcttggagaggcttcttctgtgtgaagattagataaatgttcatttaaaggctcaccttattcttttagttttattttactgtttatttttaaatcctcctggaacccagatgtgttgatcttggtttctgtgtctccctttctgtctttggctctctgatgcttgccatgtgtcactccgagttcatggaagcctgcatcttccccactctacccccagtgtgtctctatctgatgtttccagtcttcctgccatttggtcatttttttctcaccctagccccagacttcccaccttccccacacacaactcccaactgttgcatgagattgtttccgattattccagactgatcgccaggtaagcgagcgtgatgggcagatcagaaatgccaatgagggaagagtctctgcaggtttttagtgcttaatcctggttgcacctctgcattttagcagcatggatctcgtgcactctgacacttttgtgaaggagagcccatctctgagtgtcgggtctcagtctgttagatctacttaatactctagctctcaaaacaggtatttctttgtttagctaagtctaactgtgatctggacatctcactatcaaactataggcttccttaaaaatcagacctgttctattccactaatgatctctatgaagaatcttagaaggatgaggtacccttattttcccttattttttgtggactccttggtaaccataaggggaaaggtggcatagtacaagaattaagatctcaggttctgaattcagacacctggaatcaaatcctatcttgccactcacttgctggttgaccttggacaagttatgtcatttcattgagctccagcctctgtgcctataaaatcaggataagaataatacttcttagagctgttgtgaggattaaggaagagaatgcacaagtcacaagatgtgctcagtatgggacctggcaaattgtcagcgcttgataaatgtcagctaattaattaagtcactctcatcctaaccttacttgactgggattatttcaggggatggaaggaatatgtcaacttcatagttcacaatcccagccccaccccagtaccctggctccagagtttgcataaaatccttaatccagctgttcgtggtgtgtctagctttacagccagacggtggcttttggagggaagaagcagagtgttcttcatattcatgagcctctggcactgcttgagcctgtgtccattggatagggatgaagtctcaggttttgtcacttggtggatgggagctaatgaggccaaaccaggaacttagtctgttcatggcctcttctctttgtatcagagatgttggctttagagctaagggtcctagtaagaagtcaaataggccctaggcttttgaggtcatggatttgaaaactgtgacacacacacatacatgcatgtacacgtactcacacaaatacaactcttccataagattcacagggagtttacagatgccctgtggccaccccgatcccctagttcacctaaaaaaacagcccagagaggttgacctcacacattaagttgatggtagagatttcttcgttcattgagctaatatttactgggcacatattgtgtgcagtccttgactttcatccaagcttcattttcattgtcacgatttgtgctctctccctagtctatctcccctcccaaaggggagcagggagaaagaagacatgctccacttagtgtcacttctggaaaaaaaaagacaaaaccctggtatgcttttgctaccaatggaagatcggtaatatcatctctgtataaggaccacagcgtgttgcaacagggtagacagactcatctgtgagggatggacagatggagccagagctgcccgttttgctgttccaggagacgcaggttaggagcaagcctcagaacacagtgtgcttctgtgatgtttggaggtgggagtagggttggaggtgatcatgccactgtgcacgcagataaattggggtccagagatggaattggaagcaagtacatgggagaaatgggcctttcctggttttgttttttcctgtaattagacctgctgattctctctctcggcctcagcctctcagacaatttcctcattccaaaagagttccccaattctgggacatgatgcagacatctcaaaattgggctaatggaagccatttgatcacatatatatagatagacatacactgaatatgcaatttgcagcatttaagccactccaggccagaacagcagaacagcaggccaatgccctcctccagggagggaggtgatagatgtccatttcctccgctcaggagggatggtgtgtgcttcctgagtgaacctgttccatttccgatggctctgccttgggagttggagaacattcattttaatcagtactgtggagtagcaaattaatacatagagacgtgacatttgagacaaattgggcagcacttctcaataagtggagaatcaggatgattttcatatcacgtcctcaataatcccacaaatagttcatcatgcatagtaatattttacccctttggggaagagtattaacatagctttaagatgatattatgccaaactctagtgccatgaccgtcttcctgtcagggtgtcaggagaaacagtgatgaggaggaaggagcattctcacgcagctgcctgcttgcagatacagtgtacctctgcttcacttctctgtccccattcattcattcttcattcattcaacaaatatttactgaacacctgctatatatcagtcccaaagtaggctttgaggatacaagaaagaataagaagtggcccctacattcaaggagctctgaaacctaaaaatgttgggagagaagtaagggcataagcccaggagacaggagatgtggatccaaaccctagctttccctcaggctggctgtgagaccttgggcaagtctcccaacctccctgaaatgatttttttgcaaaacagaaactataatgcccactttaataggttgtaatgaggattaaagagtcagtgcgtgacaagtgcctggcacagagatgctattcaaaaacaaccaattcgtctaccacgtggagaaaattgctctcatgcccggttaggtttctggagatcaagtttgagctctgccatatccccagtgtatgcccttagataaggaactacacctctcagactcctcctatgaaaaatggggtaattttctctccatttcaagaggactgtgagcatgaatgacaaggtctagaaagaatctagggtgacatttggcacatagtaggcactcagtaaaaggaagctaatataacaaggcatggtgggttttatgggagtgaaaaaaacccaattctttcccctgacaaaacctttggtcaaatcttgtggctctccgagggcaagaactatcacttacttttttgttttctctgccaccatgataccttagtctagggcctgccacacagtaggagtcctgcaatggtagctattgcttgcatctcctgacctggatccctactagtctatataaggcttttgtacaacacaaaagtggctactctgagaagaccctgtcctgtgagcatatggctcagtggatagcgtataggctgggttctaatccttatcacccctctgcctgggcatactttcgcagtactcaacttgaacaacttgaaggttttggagctttacttcagaaccgtcctcttgggagtctgtggtcattcactatccaacaaaagattcagagattcattggatgcttgggagcaaagatctcagagagctttcacttgaaaccctttaattgggttaaagggtttagccctttaaatccttcgagtgtggtggcttacacctgtaatcctagtactttgggaggccaaggccagaggatcatttgaggacaggagtttgagaccagcctgggtaacatagcaaaactccatctctacaaaatattaaaaagaaaattagctaggcatggtggtatgtacccgtagccctacctgttcaggaggctcaggcaggaggatcactagagcccagggggttgaggctggagtgagctgtgattgcgccactgcactccagcctgggcaacagaacaagattctgtctcaaacaaacaaaccaaaccaacaacaacaatggaaatccccaaccatttaattgcttccaggatggagtccagactccttacctggccatcaaaacctccggcatgagccctacctccatccccttccagttctcagatgcaccatactctgtcttcccacttgtctttcaaacacactgagtcccctctcctgaaccacctcaccactaccacccaactcttctcttctgttctctgcctaaactaaatccaagaggctgcccctgtgtacaacagccctattctattacctcttggctccctgcacttctccttctatcatgtgcatcactcgtgtattttctgttccttgtttaccttctctactcttgtgtgtgcttctggacaggaagaacgctcaatagagcactgaagtcagagctcagggtctaaaggaagacttgactcccaactcgtccagatagtagccagcatgtgactttgagcaagtcacttaacctcctctgaccccttatcataggaggacaataagaataataaaccctactccatgggattgttgtagggaagaaatggggtaacacatcaagtgctcctaataatgcctggcatagaataaacactcactaagtggatgtgtaagctattaggatcactcttcacagttgtgcctagcccagggtcagacacatagtaggtgctcaataaataccgattaaacaagtgaatggataaatgatcgtcttgccccatgtgaaaggcccaggcaagaaaagagatttaggctcaaggtacctgataccatatttctttgactctaagatgcccccagtcgtaagatccagctttagttgatgtaccattaagaaagaaaaaaatgctgccaattaaagtgtgacatgccattgactataagacacatcctaatttcagagatattaaaatatggaaaagcttgcaccctagaaccgatgaaatatggtaactgcttaattgctcctaaccaccccttagcctcagttgaggtgtacttatcattccaacctgttctctgacccagagctctctgatggtcaggattcctccttttcagcattcaggtggggactctttaccatgtgatcacctgttaatttattctcttggctccaagtctcattacttctcaattttctgcattgaactctatttaacacttattagcacaggtctttagctgataaacacccttttcacgggaagcagcagggtgccccaggcttgaccctgcctcccataaccgtgctcaaggcaggggggcccagagacccccaaacatggctagctcaggaccactgccagcccactcccagcccctcccaggatggatcccttggtaccgaagaaccactgggtggggacctggatgtgatttctcccgtgtggatagaaggggagagggttgtccttcaactgctgctctggtagggaccgtagctggacatgcatatctgtctccttcctgtgcccttgggtcaggtgaccctgttggagcttcctccactgaccccagccctagaggtttaggggatgcatgcctttctgccacctcttccttggggtgacttatttcccaacccatgagcccagcatcagtggggagagaacacttccaaacagaagtgtcaaattgaatatttcagtcccacctcttgccattaatgaataactcaggagtgattaaccactgttttggattattctttctaccttttccttcattaatgtgaataactgagagttgaacccactgatatttcattttaacagcaggagagaaaagcacttaccgcattaggtaggagattctgatttggagatttggcggtggacagatggcatccctgtccttcccctgtggatgccgttacatgataggagttgtttcacagtcctttatcctcatacaagctgcagggtccatagcccagggcctctgagatgaagacaacaaaggaactggcacttgtcgagcaccttcgacatgctcagcaatgcaggggtgggggctttatagacaacaaccgacacataaccacctcgtgagcaaggccttaggatccccattttacagataaggaagttgaggcctagagaggtgagttaccttgcctgaggtgaaccaggacctaaaggtcatgcacaatttaaaaatcagtctggttccaaagcccacactctccaccgtgttcctgctgaaaataagccctgcacagttctccaggcctgccccactcgcctacccctaccccacagcaggagaggcctgggagagtcgggtgggccagcagcatgacgctggggcatctccttgagcctgtggtccccagccctggccttgctcagggcgttgttgctgcctgagacccgtctcatggacagtggctttgcttcccagctctgtcatccttccttccagctctccgcttcctgttatccctcaagacctttatccagctatatttgcagagtaaacagactgggcttggtaatgaattacttgaccaggagctaatcttgggaagtggaggggacagggcaggtgaaacacatttgagcctcagggcctccatacattctgttccccttgcctgtacccagtggccccaaagccctctccctggttccattcagctctgtgctcatgtgtcttcttattgagaagccttttctgaccacactgtatataacacagcacctgttacccatcactccctagcacctcctgacatatgctatgactgtttatttatttgcttattgtccttctctgcaagaatgtgagcttcctggggtcaggagctttgtgttgttttgcattactattgttctgtgctgattcctcagctcctaggacaggtcctgtcacatgttaggtactcagtaaatatttggtgaatgaatggaatcaaagaccagaagaaagagcaaaggcatttgagcaactgcaagaagggcagttgtggagtatgagggcaggggtgtggccggagctgaactggcttgagggacagggaatagctcatgtaggacctaggaggccacaggaaggagttcgggccttactcacaagaaggggaccatcgctgaagggtcttaggcagggaagtggctccgtgagatttatgctttagagacattggggagagcaggggcagactgcggggaaggaaaccagtcacaggaggcaaagcagggaccactgtcgagcatagaatgtttctgaaccttcaccagcactgaggatggtgccaggacaaggggagaccaagcccagggctcactccctacattgcctttatggatggacatttacactgctggaatagaaggaatgccctctacgtggagcagcttagccttcacaattgcttacacagttgtttgtgatatttctgtctgttctgctgacattcagatgtgactgtaactgattgaacaagctcacctgaagagtcttgctgaatagatgaatgttcaagtgctggggtctccagttgtgagtgatgtgggtggagccctagagatcatactgggaaattatgcagaggagtcagggcagggagacatagcaaatgcattgggtgatgatgatcgtcaggatgataatgaaagctagcattgctggggctcttaccaggtgccaggcactcttctaagtgccttacattttaacatttaattctcaagcagtcctttgaggtaggccctattattatctccattttacagatgaggcactgaaagttaagtaacttgcttgaggtcacacagctagtaagaggtaaagtgtgggtttgaatccagacagtttgacttcagtctacaaaaaggaataaaataatttcacatagttgcgactattggatccaaattaaatattccactataatagggagcagtgtcaagctttgtactttaaaaaatctaacaaaaggaaaagattagtgatcagactatattcaaatgtaaaagttctgcacaataaaaatcatgtaaaatgggaagagaaacaactgacttgaataatattctaccaaatgtggcaacaaagggttaacctctgcattgtataatgaacccatacaaagtggtaagaaaggtatcaaggagttcacaccagaggaaatagagtcagcaaataaatacatagcagcactacctggtcctgatagttatcagtgtaatgtcaattaagacaatgaaatggcactttatccctattaaattaggctgaagaacttcggtgggtatgatgcagtgctggagtggtggcaaagacacagacacactcgcacatggctggtgctgatgtaaattagtcctttggaaatccagcttgacagtatgtatcaagagtcataaaatgctcatgtcatttgacccagtaattcccctcctgggaatatatcctaaggaaataattcaacagaagaagaaagttatatgcatgaaagtgttgatttcagcattatttataatgatgaaaaattggaaactgtaaaaatgtccaacagtaggggcatggccaggcaaattatggtagatctacctaatagatttatgcagtcatttaaaagtataatagcattatttggcaatacagaaagatgtttatgatattattttctgtgaaaaaaccagaatgcaaaatggattcttcatatttattacaaacatgtaaagtaggtcttatatgaacagggactggatggaaataaaaaaagaaacagttgacgtgggcaggcagtgagatgtgggtgaatttttttttaagttcctctttatggctactcaagtgttgtttgtgtgataaatagcaaatgggagaaaaaccaaaatcagagtaaactaacactcaaaccaacatcagtgaagtcctggcttgtgtgaaagctatgtggaggtgtcagttggctatgaacataacatgaatcaaatgtcacatggctctattaatggaaatatagactctggatcttggagggtggatgcattcagaagaaggaaattcatgtaataaagcattgatcagtagcaaggtgttttgttttgttttacggagataaggccttactctgtcacccaggctggagtgctatagtgtgatcatggctcactgtagccttgacctcctgggtttaagtaatcctcctgcctcagactactgagtagctggaactacaggtgtgcaccactatactcggctaaatttctgtagagatggtatcttgctatgttgctcaggctggtctcaaacacctgggctcaaatgatccttccatctcagcctcccaaaatgctgggattacaggcatgagccactgtgcctggccacaagatgtttttgagggtcatggattgtatctctagcacaagacccaaaactaagtaggtatttgggagaaattaatgagacaagtaactatgaaacaaagaatagttaaggagaagatctggaagtgacaagagagtttctctcacagaagacaaataaggattcgttctgcattgctgcagggagtagaacaatgtccaatggaaagatgttaaaagtaggtgaatttcagccaagaatcaagaagttgttttatatagctttaattaccctaaattggagtaggctgccttgtgatgtaatgagttcctcatttctggaggtgatcaagcaaggctttgattgatcaagctctgccaaggattctgttaacatactttccaaactggcatatatactggattttatcaaagttgacattctattgactgtaagatgtaccattattttatgcaccactaagaaagaaaacagtgccagttaaacgatcacgtacccttggttgtaatactcattctaatttctgaattgtttatatgtgaaaaaaaactgtgaaatacaatatagccctgagggttgcatgatgggagcaccaaagcctacaagctaaatgtggcacgttttctaatcttatcgtaaagcaaatatacatacaatcattctatctgtctatctatctatctatatcaaatagtaaactaaatacatatatttcaaccaaatatatattttaaaaatatgtttctttatgcagtctatcactgatgggcatttgggttggttccaagtctttgctattgtaaatagtgctgcaataaacatacatgtccatgtatctttatagcagaatgatttataatcctttgggtatatactcagtaatgggattgctgggtcaaatggtgtttctggttctagatccttgaggaatcgccacactgtcttccacatatacaccatggaatactatgcagccgtgaaaaagaatgagttcatgtccttagcagggacatggatgaagctggaatccatcatcctcagcaaactaacagaggaacagaaaaccaacaccgcatgttctcactcataagtgggagttgaacagtgacaatacatggacacagggaggcaaacatcacactctagggcctattgggggtggggggaaagggaagggagagcattaggacaaatacctaatgcatgaggggcttaaaacctagatgacgggttgataggtgcagcaaaccaccatggcacatgtatacctgtgtaacaaacctgcacattcagaacatgtatcccagaacttaaagtaaaatttaaaaacgtatatgtttctctataaataaaatgataaactataaatcttaactaaatatatgtatataaataaaatattcatgcacataaactaaatacacacatacacacacacacacacacacacacacacacagagcaaggagtccagtgtaaatgggcatctttcaaaagatagaggaggagatttcagagatatccttctggtggctggccatactttcttgagccccatgtcccaggtgcatgcacccacattcttttcctgctgaagatttattcgtgtgagaagcttggctgaactgcataggggcttgctctagatgctttctaaaatccatgacaaatctaggagtcgctaatccaatggatctataatactttaaatcagcaactccttatccactcattccattgactttgattccaaagtgctttctaatccctagtattggtctaggccctgcctctcagatgccatgaacaataagactgcagggatccaggcctgtggccctcctgttgtaccagagctccagcatctctggaacccctacagccctttgtgatccaggaatctgcagagtgcctgggaagggatgggtgctttacccaggcattagctttccccaggcccaagtaagcctagacccagtgccatggtggctcctcatgcctctcacctagctagtctcccacccacttctggaggcagggaagagaaaggacactgctgggacaataggataagcctacactttggaatcatagagttcttgggttaatctaccactcactgtggaatgctctgtaatatctctgaggctcagttttctcaactgtaaaataggggtatgagcataatgagataacagcagagctcacatacagccatgcccagtgaggtcgagtgtgcttcccctccaagatcccattttgccctgggaaggaaaagaattttcagcaggaaaagaatgtgggtacatgcacctgggttctgggggctccagctagtatggtcatgggacacttctcctaaagcttctgtgtccgtctcaaatgaggggtaagatacaggaggacttccttcttttcttgagaaatatgcctggaagactgtagttttagcagctccacccttcataagccagggagaatacatattttctttcctgtgctgcacacccagctgtcttggggaaaagcacagaccctgcttagaggcacacatggactggttggcttctggctgaggcttcttggtacagagagtatctttgtttctcattgtccaaccaagaacaaacaggaggaaatgtcctcaaacactataaaggttatgcaaacctaggtgttttgttgttgctgttgttcatctacccatccatccattcatatgccttgaatacctcttctgaacaaggcctggaaaaacccacatgggtagcaccagcccttgcccttgggcaatcatggtctagtggaggagacagataaaaaatcagacaactgtgacaactgctggagagctgagcgcttagggcacagtggtcgcttgcctaggctccaggaaaagatcacactagagcgactgtggattccacaccatggcctactggggaattcccaggctctgagccagcagcacttctgacctctcaaggtgagagttcccctggcatatctggagaacagagatgcaaccagtgctcctggagcagagtgagggagacgagtggtaggaagagataaagttggagacaagggaccaggtcacacacagcctttacattatgggaagaacttggcttctactgagtttatcaggacccatgggcaggttctgagcagaagctgacctggtctgacctagctttaaccagctgctgtgctgagaatatgctgaaggagtgcagagtgggaacagggagactggcccggagtctaatgcagcaatgcaggtgagaagccagggggcgctctgggtgagagccgcaacggtgaaggcggagagaagtgggcatcttccagacagtttgaaggtggagctaatagaactggctggcagattagaagtgggtgctggagaggagccaaggttagctcccagggtttggggggatcaacgggcagtatggagctgcccttaactgaggtggcaaagcccataggaagagcaggtttggggtgcggagatcaggagctcagttcagactgttaggtgtgagaagcctgccaggaatatgggaggaactggtgggtaggcagctggatggagagaacctatctgcccatgtaagttggagcatccttagcgtgtagattgtattgaaagccatgaggtcagatgagatgacctcgcaagggagcagagacagaaaagagggattctctttactccccaaggctgcctttgcctgtggtattcagagagtgccctttgcccctttttttccccaggtgtggacctggaaaacagttatgtctgtttctggttcttgcagcagttgtagtgtcagctccttccagaggtctaagaaggggcagatcaggctgtagagagctgggaaccaagaacagtaccgcccctggcaaaggagacctagcccctgccccgaagggcttcccagctccctacttatctccctgaagcaggtgcccagctcccagcaggagctcagcacatgttggctgagtggagggatttggggtctcaggagagctggtgggttctaccccgcggtcctgagagaagcaagaaggactgtgttgtcaagaggatgcccctctgagggagagaggcaggtcgtgtgtgtgcatgggtgccagggagcagatggcagcgcagacaaaggctcgcccatggcacagagcacagaagctcatctctgcctggcaggcacctattgcccagggaacgatggattgaaaactccataatggcacgatgatgactgataatacttgaaaggaaactgcaacgtctgctttcaaagcagccctccccggaaggctgaactgccctcagctcccatctcagtgcctttgtcgatggccataacgctcagccagcttgctagcgttcacacctagagaacaattaatcaatctgtggcttgggcttagtgttgggcttcttcctaaaggctaatcgttggttcacaaaaaggaagctttgctggcccattgcagatgggaaccccaggaaaacaaaatgcagacaagcctggagaggcaaatgtatcccctttgtgcccaggccctggcagctatgttgaaggaagctgtatgggacttggttatatttcactggctttgtttatgtgactgtgtgtgtttgaaggataatcttttattcattcaacatatatttattgtgtacttactactgtgtgccaggcataatttgaaattctaggctcagagcagtgaataaaacagataaaaattctctgtccttatggagcttacattctagtatatggagcagataatagacaagctacatgatgaaatcctgtctttaataaaattacaaacattagccgggcgtggtggtgcatgcctgtagtcacagctactcaggaggttgaggcaggagaatcacttgaacctgggaggcagaggtcgcagcgagccaagatcacgccattgtactccagcctgggtgacaaagcaagactctcaaaaaagaaaaaaaaaatagacaagttaaaagagaaaattgtgtagtatgtacatgttgatgtgcaaagcaaattaagaaacagaggaggataagacggatctggggtggagggatgaccattttagatgggcagtttgggaagaccttgagaaggtggtatttgtgtgaagaggtgaaagaggtgaaggactgaagcctgggagaagagtgtcccggcagcgggaagagcaagggcaaggctctgaggtgggcctgatctgctggaggagcaaggagtcctgggtggctcgtggggatgggtggggagagaggcatagatggtggaatcggagaggctgtggggccacaagacagttcctgatagacttaaaactggaagaaaactgtgaaccattcagcccaaattcccagtttttcagatgaggaaacggcttctagccactcaaagcgatgtttatagtctcactgtcagtagcagacctggttctatcactcaggtgccttgatgtccaaattactccttttcatttaactcatctcgtcactcagaacgtgcttatgggttaccagaggctgggaagggttgtgagtggggagggaggaggggaggatgattaatgggttgaaaaaatcattatcatgaataagacctactatttgataccccaacagggtaactatagtcaataatcatttaatttatgctttaaaataactgaaacagtataattggattgtttgtaacacaaaggatacatgcctgaggggatggataccccattcttcatgatgtgattatcacccattgcatgcctgtatcaaaacatctcatgtaccccatgaatatatacacctatgtactcaacaaaaattaaaaattaaaaaaaagaatacacttataggcttttcactcactattggacatgagctataaacaaaactggtggagaggccccgggaactagggtggggaaagaatggactctcttaggcacgtgctcatagcctctcttcgtttctgtttcccatcttgatggaaacactgcaacgtttacctcacctcagagcaaatggaaatgggactcctttgccagtttaccaaactgatttccggacttttgtcagttttgatagcagtccaccccaacccacctttatatgtagaagttattagaaagagttattagactggggctcagcctctggtgggaaaaagaagggaagcatgtagtaatctgatcaggaattactagcacagtgccaggcagtggggattcactcatgagcacaggcagcctctccctgagacctcctggagcccccagcccagcttggggctagaccagtagtcaaaacacagtgaccaaggctgtgaaggggttgacacgggaccatgggagtgaaatggaagggcatccaagccagacttaaggtgaatgggttagggaaggcctcctagaggaagtaaagacctaaaggatgaaaagaaggtggctaggccttcccaaggcagaaggaagctcaaaaacaaatcactggccaggcgcggtggctcatgcctctaatcccagcactctgggaggccgaggcgggcagatcacgaggtcaggagatcgagaccatccttcaccgaggctaacacggtgaaacctcgtctctactaaaaatacaaaaaattagcctagcgtggtggcaggcgcctgtagtcccagctactcaggaggctgaggcaggagaatggcgtgaacctgggaggcggagcttgcagtgagccgagatcgtgccactgcactccaacctgggttacagagcgagactccgtcacaaaaaaaaagaaaaaaaagaaaaaaaaaatcaagagagtcagtgtggcaggccctgctgacgatcaacctggattcgggtccagctccattggttacaccctttgtgacctcgggccagtcactgaacctctctaagcctcagcttccatgtttataaaatgagactaacaatagaacttaccttacagagttactgttaaaaggacataacaggagaatgcaggtaaactatgtggcacattttaaatgctcgtagatgatggattatccttataatccagtatggtagagggttgtggatgataactcccttacaggccctgcttcctggaggtggcaccactgtggctgagtcttacaggaagagggtcagtgaactaagggaaggatgaagaagtggagaggaagggattccagacagaaagaggaaagactgagcaaagactggaggccaaggcccacatagagtggtggaaagctgcatgtgattcagtctctgggaatagtatcagaaggcaaggaaggctctacagcagacagacctgtatgaatattaaggatctgaacattgtcctgtagacaatggagagccactgaagggctcttagaagcaaggaggtgacacaattagacatttcaaaagatcactctggctgctgaagggagaatggattgcaaggatgcaagactggaggctgggagcccacttaggaaaacattgccttggtccagataagagatgatgagacgtgagctaggataatggccatgggaatgggatgtaggggagagactagggttgagtcacataggagtgaaatcagcaggagttaatattttattaaatgtgggggagtgggggtaggaggaagcaataaggcaaaggaatgtgcagaatgtccaagaagtcagcagtttttggaaagaaactcctgatggatttaggagttaagcgctactatatgctagttaaccctccaggagggtgtgagatcactcagggagaggcagtttcagtggggagggcagtggttagcgagggagtcttgggagagacccagggcaggcagaggaagaggcttacatggagggaccatcactgaggtcccaggagagctgggagtagattgagcagatattggggtcagaggctccaggagtggtgtcagcagggtaaaggcccagaaagatcagggcggcacagtgtctcctggcttcagctctcagatgctaccctggagtatgcagagttcactgtggaaggcccttccaccttcccccacccccgaccctcaattcagggggctgaggcaagaattggaggtgagcaagtagagaagggtgtctggtcacctcttataggacattaaaatgataaggggagacgtggggccagctggggttctgggtttgtttggctttgtttttctcataggagagacaagggtgagtttaaaaaccaatggagcttgctggaaaaaagagaaaaggatcactaagtcctgagagagaaagggtcctgagaaggaggaagagccccttattctctgcagctggctccaagtggttaaggatgggtgagtttgtgtggtatgttgtgtgttgtgttgtgtgtgtgtcagagggtggatggggtaggcaaagtggatggggtaggcaaagaaagctggggagctcacaccaaaatatcctcaatttcttccataacaggctgaggtgagaagggttgtgaagatgtcaaatcaacattcattcattcattcagcaaatagttatggtgcacccactgtatgcaaagcacttgagaggcactgggaatatagtcatgaacaacacacaccctgtcctcatggaacttacagcctagtaggggaagagatgttaaacaagcaaccacacagataaatacaaagctattaatgaataaatgaatatcgtaagacttcacttatattcctacaaagctccaactttattagaagctgcccatctgtgtgtttaggtgagaaagagtttttgaacgtgaacctattgttctccttagttctgttgaacagaacagcatcatgatagagccctgaggcagaaaactagagaccaccttcagatgggcgcaagtctactgacttaacctacatctttttattagtactcagacctagcagttctttgtattgactcacagaagcttctgcccatccacagtactttgtatgagaagaaacaacatggtacaactaaaagagttgggatttggggttggaaaacccgatgttaaagtcccagccatgctgctcactagggggacaagatgaatgagacatttaacctttcaggaccttcatttcttcctgcattaaaataggctgaatcctgacacctgctctgccttcttcacagggtactttggaaggtgaaatgaaggaacctgtggggagatgggtggtaaacgtaaagtatggagcacgtctgtggttttatttttcacctgtgcccacttggagttggagccagtgacagatgagtgcagagaattgacagcaaatttcagaattctgatttggttttgcgcactccataaagcataattatttgttggtttaagtgagatctccaggctttttcaaatagtcaaacaatttatactcaaactgcattttgacagccagccttggatatgctcatcttttttcaagaccacatgtcttgcttttacagattgtgttacatgttcatggaagaaaatgggagacattcacaagagcacaaagaagaaaattaaaatcaactattatcacaccccctagatataaccacaattaatatgtaatttattcttccaggcatatatgtgcatattagtgcataaaattcgaaatatatatatttatgctatttatattgctataattattcagccaatcccctgtgtttaaatttagattgtttctactcttcccctttgacagataatgctgtcgtgaaacattcctatacataaatcattgggatgcatctgattatttccttagaataaatctataagggcatggccatttcaaagagttttggtatgtggcttcaaattgctttccagggagatttatgttcttatcagtaatgcatacccatttcttcactccctccccaacactgaatattaacaattttaaaccaattagtttaaaattggatgggtaaaaggtggttcaacaacaggggtcagaggaggccaatcttgagggattgcccatatcccaacagctgtaggactcttagcagaactcctgtttctcagaagcttgttgttccatggccagggtctggcctgcttcccatccacagaggaccgagtaagtgctccttgtatgctttccccagagtgggcacttccatgaggctgaggtcacttccatgaggctgaggtcaggcgtgatgctcaggggtgtctgagtcctggagacagagagggagcttcaggtcgaggcgggccagtcctctgcttatcatcttggatgcaattctggacttcgacttaaataaaggtccttttttaggttccaccagaagtgggcaccaggatgctctggtcattcacagggcatgcctctttccagactagatgcagaatctccagaggcagtgagctagcattctgccccgggagagaacattttttatggctagatgggagcgtgtcacagtttccatgcctgagagagtctggcagtggaatccctgggggacactcaccttcctcaccagcacttgcatactccttgggggcctttactgtcttggacctggggaaccttggggtagttacgactccacactggacatggctggtggcttataggggatgagaaggcagagagcatgaacttcctgagcctagtacccaagaatgaactgtggctcatttgcttattcatcccaccttgcattgtgctagttattagatggaaaaaaaatgaagataaacaggaccaagtcttttggtgacttgtaggagctcacaagtaagacagacaaacctgtcaaccagcaattgcaaaacaatgaagtgtttgataagccctagaataatttctttctgaggctctggaaacccaggctactcacctatctttatctgttatttatactctagagaagttcctctggaaacagtgtggaggtgaacggtggtgagagggtcaggtaatgagatctggggtgggatggggtggaataggagcagttgatctattggcggctctaggttgaagctcctggaataatagaagcaggtgtaggtggggtcttggggacacagaattctccaggtgcaacgtacagcatccccatcctctaggcaagatattaatctctgagttaaggactaagggaccctgatgaggtctgggaggactgtctcaaaggttctctagactgaggcaccttggctttgtatttggctgggattcaggatggagtgagtgatgaaccaagatgggctggagttctaagagggccaagtatatactgatagaaggatatggtagtgagggcaaatggactttgtcttgtattgccaatatcagtcaattggttgtggttgacaaaaaccatgtgttcagaccacatctagattcactgagaagagggcagagatcaattagtgatgtctgcatgggggtggatgagcaaaatagtggcacatgtgctatttgtgtcatttctgacctcaggcatcacagagcatattgctggatggcagagaggatagcatcataacagtgtgcatgattgatgcttatacctgggaagcaggctgcataggctctgctagaatacaaatctgaggtatcagaggagtaggagccatccatggaagaaagactcttgagctcagcagtgtcccaaaccttggtgaccagaatctgacaaggttccagtgctaggagacctatagcatgagtcaaggaaactgaggcagaaactcagtcatagacactataccaaaccggtgagtgcaaggaaggttcaagcttgatgggctcctcttgactcataatattgggcctgtggccacatggctaatttggactccaccttctaatgatgtccttgccctagtcaggaccacattcaaggcctgggcgtggtagagcctgcagtagccatatgggttacacctaatcataaataaatcacagattggttctacaaaggggaagtggaggattcctggcaagtgagatattaggagcatttaaaagttctcttttctctccccacctaatcctctcccatagcctaagcactgtctgtattttcactatcacagatgcacccataaaatgcctaagccagaaatgagcacatgacccgtcattgcccaggaagtaggtctttcactctccctctgcctcttggccaaggcagagagggtctccctagctgaatgtgcttgggtttgggagctcttcctattactctgggaagatttctctctctcgtatctaattagctttcttattgagaggtcactttctttaaatgggaactctgttcatgggtttcccatgtcagcatgaagagccactgatggaaagtggtgggggattctacagctgctgagccatccatgcccattgtcttcaggggtaattgtcgaatgacccccaggtcagggctcagcccagcccagaaaggattgagaagaggtaattgctgaggaagaaggagagcgagtgaggattggcaagtccagagccagatggggaacactctcagaacaacatcaagctcctacatgtaggagagagttggaaataatagattaggtggaattaagatgctatttgaccaggccataggaatacttggaccctacctcaggccatctcgttctaaaaagccccctagggagatttcatatattctcaattgcaagatgtactccctcccctcctacaccctaaccaatagtttaaccttttggaaatcaaaacaaatcttactatcaacaaatgcagtttatgctgtgtttttctttctctctttttcccaaaaagccctaattaaattgacgacacatgttattattgatggcgtgcttgaatcaagaaaatatagtatatgtacaaagaatggcgctggcaaaaaacaaaaacaaacaaacaaaaaaaaaccttgattactaggtaaagctgtggctccaaatgctctagcaagctggctagatgccaatgagaatgtctttagcctacttccatgatttttctgtatgagagaaggcctactcaaataaattttaacacgaaagggaatctattggcttaagttccagggaaatccaaagggtggcgggtgtggcctcaggaacagctggatccagtgtcactgggacctcattcatctctcagtcctgttttttctcttttatgtggcaacaagatggcttctgggagctttggattcacatgatcctagagaaagagagagattatatttccccagacatctgcagatctaaagtcatggaagaagtgtttttggctgtactcaggttgtgtgccacacctcaagagaaatcccagcggactaagggatggggtgtcatattggctggtctcctggggctagagggcaggtaggcattgtgatttgattgagagtctgcacagagccacatgggatgggggcagggcagttctccaatgggaagagaaatgctggacaaataaaagcaacagctgtccactcttggatcagcctgaaaggcctcggaccaagacttcttccatctaaagctcaatctgagacttgacttttaccacttctgtttgaggaaaggccagtctagactagaccattggaatgacagaggacaaggagaggaagaggcagggtgtggtgcctggatggtgcagtagagtccctccagggtgttggcctctggacatgtccccaccaaggggatatgagaagaagcaaaacagccagagaggcttagagcaacctaatccatgccagcaaagaaggaagaagccagagagagactgcatcctcctgtgaagataatgcatgggaatgcttagcccattgcctggcacccagcgtccaatcaataaatggtagctattattattacccattagggatcatccctcagcgcctgcagtctgggcatgatggatgcaggctgtgcttgtgtaatggggattatttattagtcaccttgtaaaaagcaatgacagaaaggcgcaaaactatgttaccacagagggatcttatctcatggaaatcaaaagcttctctgtttttccactaagaaacaagagcacttgttctcagagattaatccaattccactgtaaagacctcaaggggaaggaggagatgtaattcaaacagatttcagcactgcttttgggataatactcctccagctcctaagtacctgggacttgggcatggatgggagggagggaggggaatgggagttggagaaggaaggagggagttggtgtgaagaggcaggagagtacccttggagctcgcttagaccttgcctggccttctctactggttcagggcaaagccccagaggtactgtttatgcaaataggttgctatccaatgagggagcctgacccactttgaccactccctgcagctgcacctgctttcggcttcctctcctggcccactgcagatccagggctcattttacaaaacttgggcccattacccattgccatttaattacaaatactgtttgcaaaccactttaaattttttttttaatttatcttttccattaacagatgtagcaagagtatatttatgtggcaatgcttatacaacaattcagagtggccactaaatccccatgtgtgggcttaggccttttgttaattatttgtttcacaacaactctgcctgaaaacaatcagcaatggctccccaaagaacatgggaaaatttaaaatttatgtggttaataggaggcagcatacaaatcacttctaattagcatgcaacgagactttgtggccaccctgaatattaacattgattaagcacttaagtcgccccaacccctcataataatttttttgcatataccccacaactatcctcagaggtagctgttattaactattatgtgcccattttacaggtgagaaactgaggcaccaggagagtaatagtctgggggagtgttgaacccagaacttcagaactaggccctgccattgtcacaagacaaggcctcctggtagaagccacctagtcagcttgtaaacaggaattatgatttaattttttaaaatgacccatgtctattttaagcattcaagcaatacagtaagaatataaatatgagatattttataatcactactcacaattcaacattccagaagtagagcattgttaaggttttcagggcatcacccttgacatctagctatctagagggataacaaactaatgctaatgctggaaagacagatttttcaagaaaacaaagtgagcttgctacatacccaccattttatttttacttttcaaaattttacttaaattcgacagatggaaaaaaaaacaaaggttgaaggaatcattaaacttcagatcattagacattagctcctcaaatatacctctgaagctaagaccaagttcaaacagcatgttaagaagttgcagtcattattatcctttttattattattatttttgcagcatttattaaccacccctgcattgaagaggaggaggttagcgcatgtatatttgttcttatttccataaactccctttcctggtttaaattctttttaatttggcaagatctataacatttatattccattctgtacaatcctcagggttgtgtaatcttagttccatatttaataggatttaacactcaccaccaattttcttgccatacattttacattccaagtgttgtattttgattgatttcttcatttgccagagtccactgtcagatacttcttacaagaaaggttcatgggtgttgtattccctgaattcatgctcgtgaatgtccacctgttgtctaaatatgtaaatgacaacttcaatgagtatacacctcttaagctgcagttctcctcggagctcgaatggcttgattggaggccaaccagacttatttctctcttgtttagcttggtgtttctgcctagatgtccatatgattcattcttttcccttgaaatgtagtatcttcaccagaatacatctttaaggtgattgctatatataaaatttttggagacctcatgtgctcttttgatcttgaaattcaactttcactatttcagggatgtttttgtcgattatatctttgtatgtttttctctatggatatgttgaatttcttttgtcaatattccctatctgtgatcttccatataatcatgtttatatatttgatcttttccatgtatttatttaattttcccaagtttgcttgccaagttcatgagttgagttttcagatatgtttaattcattcctccttctccttttcctcctcttttctctccctcctcttcctcctcctcctctccctcctctttttcctcctccccttcttcctccttcccctttctccttctcccctccttcctcctcctctttctactccctttcctcctccacctccccttctacctcctctctcttctcttcctgttttagctgttttcagtgtggtacttctttttctttcccagctcatctttcatggttttcgcttatcttacaatttttcttttaggtccttgaaacttttctttgaattcctttttaaaaactctgcaatttctttgagattagacaacagtggttttctgaattcatcttgcttcctttgacaattccctctgaggtctatgtgttccatagccttttactttattcatttcttcctttcttattttgtttgtttattttgtaatttctatgacacttctctggctagttccctactaattatctctccctttttttgagttggaccaaatatttgccaaagaatagtgtgcagaactctggggcctgggaaaggggattatgaaccgagcggttctgcattgccggtatggttttgtggtccatttgtcctctcaccagatccggcatttctctttgctctgtgccaaagctgctgcgtgtggtggtttggggatggatgtctcatttgtccactgccttactctgcagcctctctaggacagagacagggccgtccatcattcgggtgaaaaggcacatggtctctccttcagtctcctcacattccttcctgcttgaaatgctgaagaggtttccgcgggacactcccatggctggtccacattcccacatcttgtcactttcatcaaaaagtttattgaagtccttttgaggactgagatactttgttttaagaaaatttcgctgaaggtctgaggattactgtgtagactgtcaacacttcttgtttagattcacgtttctcagtatttggcaaatatgcctaatggtttgtggtcaagacccatttccttgtttccctaaagatacagtttctactcctctgtatttttgttcttgttgtcagtggatttcaagagagattaaaaaatgtaaataccttcactggacatctttaaaaagaaatctcccttttcagtgttgtttaatagttatacagaattccactatgcaaatatagtaacatttactaaaattctctcttgaaggacattaatgctatttccttttcttcttcttttttttgagtataaacaaggctatgatgaatatcttggagtgtatgtccagttatcctcatcatattttaaagaactggggaaaagccttagagaggttcaaggatttgcccagggccaagaatctagtttctggttaggcatggcagcttatgtatctgtaatcctagcactttgaatgactgtggcaagaggatcacttgggcccaggagtttgagaccagactgggcaatataatgagaccctgtctaccaaaaaaaaaaattagctgggtgaggtggtgcatgcatgcggtcccaactactcaggaggctgaggcaagaggatcccttgagcccaggagttaaaggctgcagtaagtgagctatgatctcgctactgcacttcagcctggatgacagaatgagaccctatctcaaaaaaatagcaaaataaaaaaaaatttttaaaaagtatctagttaccatacacctggatgcaagctcaaccttgagacatccgtttcaaagctgtccagcctgccacagccctgcctctttgttcatctcagggaagacccttcccactgcccgtcctctccaattttattgcctcctcctctggcattgcagtcttgtagatttagcccctattctcaaagggattaactgtaagaggatttctatgcagcttttctcctggattcacacaaaaggacttagataagtcttggcttatggggccttaatgggctgttaggggaaagtggaacatctggggccactcaaaccagaaggaggcatcagagaggctggccatacctggggaggaccttccaaagcctcttcttcaatgtccttattaaggacagaatccgggagcctgggctgtttatgcaacccagatatttagacttcctaagttgaggatcaactctctgggggcatccacacatcaactacaaataattaagtatctaacaggtagccagagccagcttcatagatatctgacctatgcagtcatacagggccctgctcagggaagaaccctgagcttggtttaatgctcttctgttgacctcttgaaattaataatcatattttaaccaggggccctgccttttcattgtgtactagatgctgattacgtagctggtcctccatgtaccagacacaacaccaggctctttcacctgtgccagctgaggctgccacagggagaagcagagaactggatctgagggctgccaggctaggagtctacagatctgcaggctgcagtctgagcagcgttgcgtgagaaaagcagcaaagttaacgaagctgggcagacagaaggacacctggacaaggtgactgtcctctgggcctatagccacaactggtcctactacagactggtcattttgcatgtacgtgagctggagatcttagtctgttttctgttgtttataacagagtacctgaaactgggaaatttatttaaaaaggaatggaggctgagttatggaggctgagaaatccaaggactaggggccacatctgatgagggcttttttgctggtggggactctgcagagtccagaggagatgcagggcaccatccagcacagagcaagagacctgagcattctaatgtgctagctgaggtctctcttaattttcttataaagccaccagttcctttcccatgcttgcctattaatccattaacccattagcccattaatccgtgaatggattaatccattcatgaggacagagcctcatgacctaatcgccttttgaaggccacacctctcaatactgccacattggggattaaatttcaacatgaattgtaaaggcaacaaatattcaaaatcataacagggtccttggtctgcacctcaggggcagaggagatgcccatcctatcttgctggactgcaccctgatgacagaggcttcgagaaaagaaggcattccttagattgccactacatttttctcccatcactagtcacattactgaagcaaaggagcccagttccagtaaatatgcagacagatcctcgcatttcatcctagctaactgtggtgggaagatggcctccttctttctcccctccaactctctctttctctcttttctttcttctgttttattagctgcacacaaaaaaaagatttttattactcaaatgagctctcagcacgtttgttaatatactcctaatgggttttaagacctaaaagcaacagcatgggtcaccgtttgcctgctcagcaagaatttgcctggtgggagggtgggactgagagaggggaggaagacagggaacaggagctacctctgttggccaggcccaccatgcaaatgagctgggatgcggtcccaacatattaaatggatcagagcagcttctcattcacatgtgcaaattagattaatcagaccagatgcagaaagaggagaataataatgccgttactaaggacacgcaggcacccgcagggacccgcaggagacatacctggactgagaatcatatttggacaccgagtcatgacctggcttctctcactgagccattccactggggccaaatctgccacatgatcccagcctctgcagctctccaagtccttcctgttgggcccagcctgcccaggcagcttccaaggcatcgatgagcagggaaaccgactctcgtttcttcatagcccctttggtgcctaggtctgagccctgcagagaggctgggtgtcagagtgattcagtgtggcctgagggttgagaacacaaaacccagtatgtgatgaactgacatggtccttacccattgtatgaccttgagaaagtgacttgaacttcagtttctgcatgtgcagaataattctctcaaaggattattctgcaggttaaatgagataatatgtgcaaagaactgtgccagatgcaataaatattatctattattgtctttcttcttccggtcccttttttctcctttctgcttaccttcctgcctttctctctgctttcccctctccctccctccccttcctcttcctcccgcccttttctccttcctttcctcccttccttcctttttcttttctgcttcgtagaatcggttccagttttctataagttgattcatagaactgattccatgatttatctaatttgatcttccaggagaggcacacaagtccagagatggtggtgtcctttggatgccccagctgcctgcctagaggggtggccccttgagtgagcaaccctttccttccagtccatgcaagctcctgggtctccttcctcagggcttggctcagtcctcttgtctgcccagctctcagtagcttcaggatgagtaggacttgctgccaagacattctgtttgttccctgcgtgttgtgccctgacagctgatatatgcagaatccacacacctgtgccaaggctggtaggcaaagaggttttcgtggaaaagccagggcggagggattcaaagcttgaccgagtatggcttgtcatcatcctctgacactttttcatccctctccgagttttattttggtggacactgtgtgtccaggattggggcagaaggaaagtgtggcagatccagccagagggcatggtgattgcatattgctctgattaccagtgaggttgcgcatcttttcatgtttattggccatttatatttcctttgctgtgaattttctgtccatatcctttgcccattttcataggtcatttgaatttcttttccttttttcagtaatttgcaggaggtctgaataatattaggacatttgttctttgtttgttgtgtctattgtgcaaattttcttttagttggctgcttgtccctaccttgtcaattgtatttcccacaaagtgacctcagcgaggggtgcatcagcaccagggtgtgcacatcagtaaagatagttggagtcacacctgggaataatatccatcaggtgcatatcaacagaaaaatctagatgaaccactgctcccggttactgaatatgaacacaactggactttggaattttaaaagtgttgcttttcctattcgcgataagtccatttctttcctgggtgaaaagagagcagagatatggtaaactctcatagctctgctgtagctggaagctgaatttgaacaaactcatgagggggtggttcagaagtggggactggtgagatagctgccatgtttttctgtctcctgagagctgagcaggatctcagacctttggaggaatcgaagttttgcacaagccctgggtcttgacccagaggccggttgcagagaccatatcccagaagcaggaggccagactggcttttgatcctagattgctgggctggtaacaagtggagtccaaaaagacaaggtccgatgtcccagagcttagccctgaagccactaggccctgttgaatcatctacttggcagcctctgatggtgacagtgtcgtagtcctgcagctgagggcttaacttgggtgagtccaactttggtaaagccaaagaccccacgtgcatatacaactgggacttgtcattttgtgagaagcgaagacagcagagtcgtccaagtgtggacttcgttggagtcttgctggatccacttgtggataatttacactcttggagaacctttcttctctttctcttcatcactggaaacatttgcaaagaacccattgggttcaggactgatgagagctcatggaaaacacttcttttttttttttttcttttcttttttttgagacggagtcttgctctgtcgccaggctggagtgcggtggggcgatcttggctcactgcaacatctgacttcctggttcaagcgattcttctgcctcagtctcctgagtagctgagattacagacatgcaccaccacacccagctaatttttgtatttttagtagagatggggtttcactgtgttggccaggctggtatcgatctcctgacctcgtgatccacccaactcggcctcccaaagtgctgggattacagacatgagccaccgtgcccggtggaaatactgcttagctacgtaaaccaactgatctatgaatgaggccaatgagattagattcctgggcccatcagtgtttgagaagtagaagtgggtttagggaagtggttctagggtgaagggcattttaactaagaactaactaaattccttttttttaagatgaatatttatggaatatctaccatgtgctgggtactgagttgggctctggaaatataatgaaaaacaaaaataagtacaatccttcctttcatggatcttaaaggagagagtaggagacagacattaatcaaggagcccctaaacatatgtaaaagacaactgtgaaaacggccatccatggtgctgtgagcgtgggattgggagagctggcctagtgggaggcagtggtcactcagctagctctggaggaagaggggactcatcagggggaagacaggccttcccagctcaatgaaatttgcctgcctgtcactcattctcccttcttcctctcgctcacctaccccactcccataacccaaagcataccccgctggatccaatggattattatgtcctatttattctacctctgaaaaatccctcaaatttaaccacccttttcagatctccctactggctctgcctcaattatctttttatctctcccctagattcctttaagggtatcctcactgttatattgccctccagtgtctcccttcactaattcacacatcctggagtcaaacaattgtctccacccatgggcaaaagccttcttaacagaacgtgacctttttcatttaacccattcacatttagaggtggttataagctagacacattggacttactagaaagaaagggctagatttattggaaggggtagcctttgagccgtacaaagaagaatggatatggagataaggtgcgggcaggggaggccactgcaaacaagcaaaagagtggtggtaaatatttccaagggggtctaggagagtgagttttgagagaaagcaactgggtggggcagccaggagggggacttccaaggaagtgtttccttaatgtgataggaatagatagaaactagatagtatagagttatgaattatgagagacataggcaaaggaatgcatttctctttcaatattattggtcatgagagcaaagcaagatggtggctggaggtagaagtagcaaaggaaaaaagaagtgacgagagagagagggagaggctggctgagggtgtagaagtgtggacttgctgatagagaagggcccaggagacacagagtgggcagaggcggctgagatggggtcgagaacacaagtccgaggactcccaaagagagaagcccttcttgagagaaaaggcaagtggaaatcagtggcattagtggaatgagatggacagaagcaaggtgagggagggagccagtgtgacctgttgtggttctgtaaaccaagtttttaaataataaaaataaatgttaatagtatattttgctataaaattttcagacaatgcaaactacaaactgagggtcccccttcaccagccctctcctgccttcccctctcagaggtttatagggttcatggattgatgcgtaaccttccaggttcttttctatacattcacagcactgtaaatgtatctagatagagatatatacatagacacagacatatacatatatagagacacatacatgtgcacacaatacacatatacatatgcagacacagtcatacttttttacataagtgggacaatacaagatgtactattctgaaacttgctttttttcatgtcatatgtctttagagctctttctctattcatattcattcttcctggtggatctatggatctctgtgccatgagttatctaacttttttttttttttttttgagatggagtctcactctgtcgcccaggctggagtgcagtggcacgatcacggctcactgcaagctctgcctcccgggttcacaccattctcctgcctcagcctcctgagcagccagaaccacaggcgcccaccaccacgcccggctaatttttttttttatttttatttttagtagagacagggtttcaccatgctagccaggatggtctcgatctcctgacctcgtgatctgcccacctcagcctcccaaagtgctgggattacaggcgtgagccaccacacccggccgagttatctaacattttattgatggacattgaagttgcttccagtgatctctgttaaaaaagccatgctagggctgggtgcagtgactcacgcctgtaatcccaacactttgggaggctgaggtgctgaagtgggtgcattgcttgagcccaggagttcaagaacagcctgggcaacatggcaaaacctcatctctactaaaaatacaaagaagtagaagggcatggtgagcctggtgaacatggtggcgcacgcctatagtcccagctacccaggaggctgaggtgggaggtcgaggcttcagtgagccgtactgtcatgagtaccatcatcaatgcacttttatgagcttatatacgaatgtctgtcagatggaaagtgaggagtggaatttttgcatcaaagactatgtgggctgtaattttgttattgtgagactgtcttctccaaagcttgtttacactcccactaaccacctgggttgattcccctaccctctcccaacattagattttatcaggctttttcatttctgccaatctgattgtcaaataatgctatctcattgttttgatttgcattttcctgattagcaacacggtgcctcttttcatatacttatcctccatttgtgtttgtgatttttttttcaagtggattacctgttcatatctcctgcccattttttttctgttgggtatttgctttttttttattgacttggaccacttaatatattcttggtatcactgtgttgtccattatatatgttatggctgtcttttcctactctgtaatttgtattttaagtttgttttgaggcctattttattgagtcagagacagatagcttaaatgacttgcccaaggtccctctgcctagagctgttttctgactccccgtggtgtttcaccagatccagtattcctctgcagaacagcaagaccgtgtcttcctttggctccctttcagggggattttttaattgcatgcactcctggagtaagctgactttgatcctgttgcaaagctggctgaggcagggaaacctatgactatggctgttgctgggttctactccacctgttccatttctcttctcaatttcgatggaagaatttccaagattttctagcccacactttcaagttcatgtaggatgtacagcggtaaactaaaaggtttcagtgttctctggaaccctaaagattcaaggactgtgtatcaggagccacctggaatcaggttgccagatgttccaattggaagtacaggacacagccatgggaggtggctgatgcctgtaatcccagcactttgggaggctgaggcaggaggattgcttgaggccaggagttccatgccagctgggaaaacatagcaagaccctgtctctacaaaaaatgaaaaatatcaaccagacatggtggggagtgcctgtagtcctagctacttgggaggatcgcttaagcccaggagttctaggctgcagtgatctaagattatgcctctgtactccagtctgggcaacagacagaggccctgtctctaaaaaagaggaaaaaaaaaaaaacccaaaacacccagttaagtttgattttcacataaataacaaacactattttaccataaatatgtcccatacgatattctattataagtatgacccatgcaatatttacttacactaaaacattattcatttttatccaaaatcagatttagctgggattgtatattttatctggcaaccctaatctggaggagacaggaaagggtaggaggtaactgggtgagctcagtaggctcacccctggcctcaacctaaggctggcactgtttaaatgtcttagatttttagatttaagaatgtaaggtacgaagagatcaagtgacttggcagagctgaagtttggatcaagataggtctgatagaagagcccattgtttttcccaagtcccttgagtttggggtgactgattctcctcttcatagcctctccccagggtgtggaagagacagccccagagcagcaaagagtgtgaggagataggcctatcagaaccgggctttccacgtgcagaaagtgtggggtgaggggagagtaatgtgtttcgtgcaacactctcatcaccttaaatggggtgaatcctcattaattccaattaaataactgtttaattggttctaactccatttccaggagtgagctcacagcccatgaatagatctttggacttctgactactacatatcttacattactactacatcctatcactttttttgatacctagtctaaatttttttttgaaatggaatttcactcttgtcgtccaggctggagtgcagtggcacgatctcagctcactgcaacatccgcctcccaggttcaggtgattctcctgcctcagcctcctgagtagttgagattacaggcgcaggccaccatgccaggctaattttttgtatttgtagtagagatggggtttcgccatgttggccaggctggtctcgaatgccggacctcaggtgatctgccagcctcagcctcccaaagtcttttttaaatcactcttattgatatgtaattaatatacaataaaatacaccattttggagtgtacagtttggtgcgttttcacaagttcatgcatccatctagctaccaccacaatcaagacataaacatctccatcgcccccaaaagtttctttgtgccggttcttagtcattctcctcccatccctgaccgcaggtaactgatctgctttctgtcacgtcagattagatttgtctttcctagagtttcacatagcaaaatcgtacagtgtaatcatacaatatatactcttgtgtctgacttttttcagtataacagtgatgagattagttcatgtgttgtcatgtgtatcaggagttcattcattttttttactgctgaaaactattcagttttattaatataccataatttctttatccatccaaatatccttttggtgaaagtttgggtcattggtttggggtcattataagtaaacctgctgtgaatgaacattgaaatataagtctttgtgtgattatatgtttcatttcctctgggtaaattcttaggaatgaaattactaggttgtgtggtaagtgtatgtttacataaaatactgctcaactgttttccaaagtagttataccattttgcattcccatcagccatgtatggtggacatgcccttgctgaaacttggtatctttattcttttacattgtaaccattctaatgggtatgtggtggtatctcattgtggttttaattttcatttccctgatggctaatgaggataaacattttttcacctgtttattgaccatttggaaatcatctattcaagtttctgcccatttttaaattgaattatttgtcttattagtgagttataagattacatatatatgtgtgttttatttctatataattcatatatattaatatactataatttgtttatgcatccatatatatatatatatatatatatatatatatatatatatatatatatatatatatggagagagagagagatttttacctgtcccaaagccatgaaggttttctcttgttttcttctggaagtgttatagttctagcttgtatatacactcagttgtatgattccttttgtgttaatatttgtgtatggggtgaagtgagagttgaggttcattttttccctgtgtgaatattcagttgttctagcatcattggttgaaaaggctattagcagatcgtattttgaataagatgccgatacaacatgattgattccctatcagcatcccctccttgtcttagtattttttttttccatcaacaagtatttgttgagtttctgtgacatgtcaggtgttgttttaattgctgggcatcagtcctgaataaagtggaacaagtccctgctctcatggagaccgtggcttagccacaggagacaacaacttaacccaaaataataatagtagacctggccctagaaagataactaaaatagggttaggaaacagagagtggcaggacattccagaatgaaacagagagggcaacatttctaagaagacagcgtttgagcagagacctgcagggtgggggatgtgagggcctggctctctgcagatgggctgttaaggggacagactgattgccagagcctcccattcccagcccagcttctcagacactcccttaggggtctacagttgtgacaagggccctctgcagagctcatgtgccatcacatgtcactcgggtctcctccatgtcctggctactccagccactgctcacaaagctgcatctgacagcagggagtgactttcgcagatttcactccttcattcatttctttaattaaaaggtatgtattaagcccagtaagtgtgcttggcactgcgctagactctggggagacagagatgaacaaatgaatggacctgagttacggcttcagcaggagccagctcaagaaaagtcttaaatgcacttggtacatgaagtgtttgctctgcagacaggagagctccatgaatggctaaagctactggatttgggggagtgaggaatgggagacaaggagagtttatcctaggagactgttgcaataggtcgggtgagatatgatgcaggtgtgaattaaagcagtggagatgtgggggctgggagaaagaatgttggatgatccaggtttctaacttgaacacaggggcatggtggtgctactgattttaggggacacaggaggaagagcaggtctggaataggtgagtgcatgggtaaagtgatgaagagtctgtttggaggcacggcaagggtgaggtgctcctggtagaaatgtctaggacttaatttcacttgaaggtctgaagctcatgaaggagatctgggtgggaggtcaagccttgcaatttatccacagaggaattataattgacagcagagatggaagagatgctcctgggaggtatctaaacaaatacttgctctgtgtcagacttttgcctggcgtgctactaaatgtttaatatactggttaggacattgagttctgatgcccaactccctgggttaaaactttagcagtagcacttgcgagcagggtgaccttgggcaagtcaactcaactctatattcctctgctaaatgttgatagtaataaatttaccttctggggtattatgcggattaaattatctggtatgtgtatagcacatagaatagtgtaataccatgtgattggtaaatgttagttgatcctaatatcctttaacatacctatagcatagggggtatcattacttgttttatagataagggaattgtccaaggttatggaattaggtagtggaagaacaaggacttgaatgcaggcctgtgtgtctccagagtctaccattcaaggctgtcttctactgggggataaaggtctgtgcattcattggctacttgatgaacttagcccctctgggcagaggggttccaatgcctggctaagcccccatccctgctgtgccatcggccatggctagtatcttctacctgcaacctggagccagcagaccctgcagcccctcctgcaagccttacacacacacacgagaaggatgctgcctttctcacctcctccagatgcttgcacctactgtgccacattgcaatcaggggctgcatgtccgtgccttggtcccagaacagaggaggaaaggagccctggagtccatgctgacagaggtctgtttaccttcatgcccagtgccctgagttacgctccaggtgtcccatttggagaagagaagctagtcaggagccctgtctgagagactgtggcagcttggggttgaagccaggagagcagacttggaaggactttaagctattagcaaatacagcacagacagaggccagaagttctgagaggaactgggattagggaacagtctgagtcatggcctggcagggaagcatgaaggcagccagctctggggagggcactgagaacaagcaggcccaggctggatgcctggctctacctactcgctctgtcacaagatttcatgcttctctgagcctcagtttcttcagctgtaaaatgggcatggcaaggatacatcccttctaggggcaatgtgaggactccttgctatgccaaggatgttacgtgttagcttcccttcccttcccctgcctacccaaggagggaggatttcctgcagaaggcaagctttcagcagcgctggagaggtacagaaagacatggattgagagagtagaggtaggagggtgttgctgcaagggcctgagccttgtatccccagaagccggagctgagtggaaagcttcaaggtgaagggattattgggcataaatatgtaaagaggaaaggaactggctgctgtcattctagtaatcctggctgctgccagctctgcggcaggcattgggctggactggggtggtgccaaggtgaatgaggtgccacctctgccctcaaggagctccctgggttggggcagtcagacttattaatggagcatctccatccagggtgctaactgatgctcaggggttggacaagggaaacagctcagagcagagagtgactgctccttccaccagaacatgagtcgctgtgccctggcagcctgcgagtggactgaggccccatgcattcctctaagggtggggcgatcaaagagattccaggcctccgctctatagactggaggcttgaaagggagcacaggtttgtaccagcaggactaagcttggcagtgcaccaaggaccttgacctccagccagggaaaacaaaggcacaagatctactggggagcagggactttcacatacattatcctacttaacctccttaaagtattgagtgtcccttttttatccaaagccaagagaggttaaacaacttacctagagacacacagtgagcaagtggcagcaccaggattcacactcgggtacgtttcgactccactggcttgatctttcctacaagcaccctccaagccagccccatgccttcccaacagatggaccacttccacctctctgccaagccctgcagacgtggctacgtcctgccttcctccagaggagcctgggcagcctcagggcctggcccaccgcagtccctcctgtcctccccagctgccaaaccactaattagtgtgcctggcattgttcctcacagtttccctctcactctcgcctcccctagaaagcctagctcccagctaaatttagctgtgactacttcccagggaggggtggggtggatggggaaggaaggctaagtcctgagttttgagtctccatagtgaaagggagacagcccagggctccatccctccaggacagcttcccctccatcgacctgctggtgaagccttgaagctgtggcattgcgttactgcacacacttggcttgaatatgatggattctgaggtccatgtacgatagcaatgggaaccgttaacgccacacgtctgccttcatcaaagctgccttgttttctttgagaggttttataataagcaatcattacccatttgtgcaatacttttatattaacatcacctcttttatacactggggttctggggttctgtgtgagatttccttccttccttcctgcctgcctgcctgcctgcctgccttccttccttccttccttccttcctccttccctccttccctccctcccttctccctttccctttcctttcctttttcttttgacagggtctcactctgtcacccaagcttgaatgcagtggaaaaatctcagctcactgcagccttcaacttctggacccaagggatcctctcacctcaacctcccgagtagttgggactaaagatgcatgccaccgtatctgggtaatgtttttactttttgtaaagacagagtctcgctatgttgcccaggctggtctggaactcctgcaatccttcttcctccacctcccaaagcgcaggcgtgagccactgcacccagaccaagatttcttttgggagggatttgttttcttaaaaagcaagtttggaaaccagagcttcacacttgagtgtcttgctgctttgagtgtgatctgagaagcagctgcatgggcaccccctgagagcttgttagaaatgcagaactcagcccccaccccacaccgagtgaaatagaacctgttgcactttcaagatccacaagtgatctctacactgttgaagaagcactgccttagtctaaatcaggatcactgaggagcttgtcaaaatgcagattccctggcttcctccatgagattctgactcaggagtaagggaaggcccaagctatgtccattttgtccttttttttttttggtggggggagacagagtctcgctctgtcacccaggctggagtgcagtggcgcgatctcggctccctgcaagctccgcctccagggttcacgccattctcctgcctcagcctcccgagtagctgggactacaggcatgcgccaccacgcctagctaattttttgtatttttagtagagacagggtttcaccatgttggtcaggctggtctttaactcctgaccttaggtgatccacctgccttggcctcccttggtgctgggattccaggcatgagccactgcacccggcctatgtccatttttcataacacccctggttatggtgcaagtctttcgtctgccctgagatgttaatgttcactctcggctaacagcttcagggaggcaggctgcccaatacatgcacagaaacaagcttcctcaaaacgtctttctctcctttacagagatcctgtcctctgatgtccctgacctcagaggtagtaggatgggtgatgggctggggagaaagcatgcctgtgacctgcagcttcacaagttctcactttagccttgaccaccgagacatccttctgctacagggagagatagactaagacagcagacgttctgtgagaaccaggtctgtccccaagaagaggaagtcttgcagattacagaccagatctgcaaatattcctgcagactctttgaaattactttctacataaccagtctccaaggatttgatgtcagttctttcctcccttcttgcccgctagaacttcccacagggaaaaatgttcccaagtagagagatgccccaagataggtggcaaggaggggagaggcaggtgattagacctgctgcattgcccacatccttgagcatgaggccataaataagttcttggcatctgctaagtgctcaaaaaataatcatcggatatttttttaaaaagccatctcccacctggattgttgcactgccttctaagcagctccctgcctccagtctccctctgcagagggcccttgtcataactgtagacccctaagggagtgtctgagaagctgggctggcaatgggaggctctggcaatcaggctcttcctgtaacagcccatctgtagacagctgggtccccactcccctgatcctgcaggtctctgctcacaccctgccttcttagaagtgttgccctcctcatctcactcccctttaattcatccttcttgggctcctagccctgccatcccttgttctgagtccctcaagactcccttggactcctagggtctggtccaaatgtcttggatgtacaaagccttcacgagctgggttctgcctaccccttcacccacatctttgccagccctccctgtgccctgtgctccaccaaggccacagtagatccagcgccttgagggtgccatgcccttgcggtcatctctgcctgtgcacctgctgctccctctgccagggatatcctttcctccaccaactggcaggtctcctataacctattccaggagtctcttcacaggtccgtcattcattcagtcattcaacatgaattgagtgagttcctaccatgtgccacatactaagctagagtctggggacgtacagtgcctgtgatagattcatcaactcatttaaaatactcccagtccaagaagcttcaggataacctctctcctcccttccacagtttgctaatgaggaaactgaagcacggtgtggttaaatggctttctcaaggacaaactactagaaggtagagggtcaggactggagcacagagtctggcttcagagcccagggcttgggcactgtggcactgtgccactgtgcagcccctttgcaaaggtctgtttctcaatgtctcctgtgatcttgctcctccttcctcccgccctggttctcctctgttgctcccagctcagaggatggaacgtctgttcatccagtagccccccaagaaaactggtagtcattttggccactgatctctccatcacccacttctgtttgccttctgaatgtttctgacatctgtccactttccacttttcttcaccgtcctgtcacccactagcctgaggttccatcttgtctcacctggacagctatggtagctctaaattgccttctctgccttcacccatgccctcggcacaaatcagcagacttacagccactctgatcagggcacccagtgtgacttccacaggcctcccatactgccctctctgccctttctcagccctccctctgaagcatctgcacaggggaccccttccacctgggggtgcttcttatcctgcagccccatcccagcagaacctcactgtgcccattcctcagctctcagctccagactcattgtcccaggggttctcctctgatggcctgtccagcccaaatgcctttgcttccctcatgggccagtctggctctatgattacatacttggcagtgtcattgctgtatgagcacctgtctccttcatgagactgaaagctccaggagagtggcaacatatctagttctggtctctactgtatactcagtgcgtggcccagggccagatatagagtaggacggaaatacgtgatgaacaaatgaaggggttgttatgacgatcaaatgagaaagtataggtaaaagtactcaaaacagcccctagcacaagtcagatactcaattataagctactagtaatgagtcttgttgttagaaccaatcttgagcaagccttacctgatgcccaaagggggatgaaaattgcaaataacgaggatggcaactgcacacagctggaagggactatacagagctgagggtggaagctgcaaacagctgagaaagtgcttatgaacagctggggctgtgactgcacactcctgaggataaggcctgcaaataagtgggaagtgagtgcaaatagctggaatgttgaactgcaaacaaccgggagtaaggactgcaaaacaaccagagcagaggctgcatctggggagcagaagagcttcggagcactcacatcacccactgcctctgcaatactgggtccctgcactttctcctctctcccaacagaagtgtgcccaagagaccccaggggtatctctcacgggcccacaaataagactggttcgcctggtctattctgaagtaacttttccctcccctcccatgctccaccatgttactttctctcagttcttcagataggcttgtatcctcccactacctgacctttgcacatgccaggccctccttctggaagttccccaccccatccttcagatctgagttccaataccactttatcagagagacaagatcagattatccttctccattttccttcgtttcatcatcttcagtgagaacaatgattagcatttgcatatacttgttgggctttctgatgactgcctaccacccctactagactctaatcttctagagagcagggacttagcacctagtccacggtctgacacgtagtaggtgctcataaatatgagatggatggaaggatgaatggaggaactggagcaatggttgagtggacagagagttcctcaaaggcacaagcgaagaaaataaaacaactgtcttaattgagtgcttactgtgtacctggccctggaacaagtcatccctttcttgttagtgcttgggatgtatatgaatgaatcattctttgtctctccagggagtcagaagatcttgattctttccttcattcagccagtgtttcactgtgagacctgacctactaggaaacctgttaggaaaagacaaaatattcctgccagtgctttgcactgacagctacccttcctgcaacctacctcagataacagcaaggaaggagccagtggtcctgaggctccagtttacccatttatgagagagggatttgggttctaagatgatccctaaggaccatgccaggtgggatagtctgagtctgtgaaacttctcaggaggttccttatatctttattttgtaactggccaggttccagagtcccagccccagataagagttgagggttctggccactggtgcccactgccttggccaggaaagggtccacagtgaaggctctcccctggttccaggacacttgttctatctaccaagttgcctacaagaatctcagatctctaaagcgggcacagaacccagacttacacagacacagaaacccactaaaacccccaaaaataacaatagtcaatctttataaagcactggctagatgcctggcattgctctaaactgaagctcagagaggttaaagaacttgcccaaggtcacacagctagtaagtcagagctgggctttggacccaggcagatgggctctggggtccctgctcttaacccctgcatcatagtctgagacatccagtcacactcaccaccagacacacaggctcacaaaagtacacacacacacataaaacacacacaagcttttccagtgaaggcaacaaaatggctgctgtctcccttctctttcctttcttgtagtgatttaggctctgtgggctaagaactctgcacaaagccagaaagggtctcttgttaccagtctgtttctcaaatggattggcattcacagtcgctctgccagccagtctggacaagaggcttgggaagcactgagcctgtagtgcccttggatactggtacccacagtaggaggaaggggcagggctatttctcagcaggttgacgacgctttggatggtagccgaaatgcctccttcatctctgtcccattaattcaaagatgccataggaaacctgctaggaaaacacaaaataggcttgtctggctctctgcactgacaaccacccctactccaccctgcttcagacacaaggaggaagggaacctgggcagctgtgacggggccaggtcctactgggcacagccaccctgggcatctcactggcaggggatctggcatggggtgggcaaggagaacctcagaaagacagagaagggcaaagtaaaccagcaggtgagacaggagcatgtcagatgggcacacaaagcaacagaaacgtggagttcaagtccaggagcttccagaaaggtatatgtacctgcaatgatgggagggtggagatggctgtggttgatcctgactctgattcttattgactatgtgatgtggctttgggcaagttacttaactctctgtgcgtcagtttcctcttctgtaaaatagagatggcaatagtactcacttcttggagttgttaagaggatttagtgagataattttgcaaagagcttagtatgatgcctggaatatcatagacatgcaataaatgttagctctcattcctggaaacaatgaggaggatgaagatgcagcggggtcaggagagacagaagggtctgtgccagggctaggtggctcgtaagcatccttgcatcatcccagccactctgagtttctagggttcttaggtacggtgtcctctcctggcctttgcatctgctgttctctccacctagagcactcttccctctcttctctggattaactcttgcgtatccttcaggtgtcaaacttagacctctctctgcccgggaagcccttcctgaccctgaccctgcaggtctggctgaaaagcctcctctcagagctcccacggctgtctatacagctcatcatgatctttctcgccctggagtgggttgcgggtctacctgtctgccctctgtgatgtgtcatgctcagcaccgaatccccagagattcacagagcctggaacacggtgctaaataataagttgggaatgaatgaaataacgacttgtatgttgaataatagaatattgtcccattacacccagctgcttctcaaagacaaaatttgaagcaccagacataatgagatgctcaatgtggtggggccaagagtacaggctctggagtcagacttcctgtgttgtaatctcatctccttccccagtacctgcatgaccttgggaaaattgcttaacctttttcttcctcaagttcctcatccatataatgggaataataaagtctccaccttgctgagttgctgcaaggataaacaacacacttaaagattttagacagggctggcccagatgagctctcagcaagccttagtcctccttagaggtgtgctccacctcacacctgcccttcccacattgtgaatcgtgtcagccccgaccgggacccctgcccgcttctgttgactctttcagtagtttatagaagctgttgcgatttttttctaatttaatgtttatatccttttatgtcctgaccaaaaaacaaatgacccaagaggaaggctggggagaggggacatctgagttgaggcttccagtcccaccactgtagattctgtttcttgggctcttattccacagggtcagcatgtggaagggttgggtcagggaagggcatctcaggcagaggcagcagcaggagcaggagctggcaagagcacagctcagtgctcctgctgcagtaaaggatggggaggtgcagtgaggggttggcaggggattggtcatggggtgtcctgagggtccctggaagttgcttggaatctaggctgcaggcaacagagcaccactgagggctttgagcaggtgagacctaagagagagtgccctgatggaaggatggacagagatttgctgggtaatagggagggtgtctgaacattcatggggttgaatctcctgctcccacagggtcctgttctgccctgatggagggatggactgaggagagtttgctgggtaatagggagggtatctgaacattcatgaggttgaatctcctgttcccacagggtcctattcttgcccactcacctccctcaccaccaacattcactgggcctgtttgcccatctgcccactccccacccagccctgctgccaggctgggagttctatgggaaggtagtcattcccggccagctgtttacctccagcaccctggacaggatctggctcagagtaggtggaattgtttccctccatcctttcttgctaacttcctacccctctcctcctaacttgaactttcttacctgcttttgtccctctctgcctctttgcttgaataacagcctgtgctgtgaattaatttctgtcctctgtttcccctacaccctcccccatatcccataaactgccacttcttttctggaaaagctctgaactccacgacacttgaagaacctaaagggaaggggtaaagaaccaataccagtcaaacagctttcatatgccaagaactatgctgggaactctatatggattccttcatttaacttttcaaacagcccaaagaggaatgtattagtgtcctaccttataaatgagggtcagagcagttcagagttgcccagtgtcacattgtggcagagccagaggcctcatcaaaagaatggttctctgatggtggaatctcaggcattttgagggggcagcgggaaagatttggaataaggagactcctggaccactcgcatcatgccctggtggtgttgcctccattgcttctgccttgggtcagggattcctgatccacagccctgctctgagctggagtagattccgtgaacctccctgggtcagatggtgctccaggaaggcagagagggcatcccacatcctgctgagatagtgctgcaatggtgggttggagccagcggagaaatgaagccagaggccagatccccggggctaaagttacaccctaggctgggaatccccaggtgggttctgagattttgtttccttatccccaaccacccccttttggatccatcagcctttgtttaaacccattttaccaagtcctcaatcatctgctgcccctgatcctgtgcatgactctggccctggtcacagcccttgggcaagacagatgagctccccttctgtgtctcaccatggcaatggagacctgcagccatccacatcctgagctagctctgaaagtcaaaccagcacattctactcaggtgagacagcaacccgggtcccttggctcagcatcgaagggttgggaatgatcagcaagttgctgttgagaatagagaaatgaaatatgtgaggatataacttttaacttaaaatgcggtgccccctgcatttggatgtcaggagggatcttgagtgacgtttgtggagctgctggggtgagcatgtgaggtcaaatatactcattagccatgcttagaggcaatggtggagggagcgaggaatacactggttccacctgctgggtttctccctatcaagagggaagcagagctcagattcagttcgacatccccaaagcaggcccacagccatgcacacagagagcatccgcacaggccactggagcgtcagtggagtccaaccaggctgcaccagcttccagatgcccttcacctgctacagaggggaggccctcccctcccccctggtggttcctttcgatggcacctgtgtagcatcatctctgcttggaataaaccaggttttggctgtcaggaatcttattacagaaggaatctgggtggatggccagactttgtgtgagattccctaatcggtggacttgggacatttatgcacttgtgtgtgtgtgtgtgtgtgtgtgtgtacacttgggagagggaggatctgtggatctactgaatgtcttctaaaagggatctattcatttatttaaataataccgtgtattatgtccctgatactgttccaggcactggggatatagcagtgaagaaaagtctgtttgtactctaacccaggagacagaaaataaatacatgactctaaaactgtcaggagcccttgtgattacagtaagtggactccagtctaagtgaggggtacccctggatccactgcaccttgcagaggaggtctgagtgtaggctggatgccctcagaagccaggccctctggtgctgggcatgtaccctggagagtgacacactgattcttcccagccttccttcctacacctagcctggggccagcctcctgaaggaaagggtgggagcttgcccagccaggggcagtctgagcagagctttgtgcagtggaaagtgcctggcttcagagtgttgtgaggtgaactgggtggaggcattaagcatctggcatcatggctgactcagggtggctgttccgtccatagagtaccctcttcatttgccttattagggacactcaaagatgaaaagtgtgcagtcatctgagtttgctcttgtagaaggggccaggaagctccagtcctaagaaggtcattccttggagatactccttccgttctgtgggacttggaggctttaatgtgcaatgtaggaattggatcctgagatgggccttatctgactttcaagctcatgctcaaacacttgccagtattctcctgcagtgtgctttgtgtcgagccctgtgctgagatgagtaactctcagcctctgactttgggacactcacagttccatgcaagcaaagcacctctgccactgactagccctgggacatcaagcaggttacttaaatttctctaggtctctgtttgtttcctcatctgtaaaatggggatcgttggagtgccttctgggacttttgcaatatataaagcacttaacacagcattcagtaaaacttgctccttggggacagacagcctgactggctcatgtctgtgtccctagtgcttggccctatgcctggctcagaggagcatttccagaagaaaggcagaatgagcacgcagtgggaggaatctcctctgtatgctgctgggttatcagtttctggaaccatgtgagatttgtgcgagcccatgtgaccaacagacagttcttcaggctgctataaagcagtctccaacacctgtccctgtgagccgctgcattgtgtatttgagcctttgatataccggggatgtttgccaagggagagaaatgttattggacatttttcgtggctgtaaggattacttcttgatgaaaacacacacaaagaaagacttacaagctgcccttaaggtaggcaaatgaatgatgtgtgtttacagcatccaggccattgctcagggctgtcagctctgcagactccttgcaggggctgcagcagaagaagggaagtggccagcacatccatgtggctgagcagagggcagttctgctcagactgcagcagcccattattctgattcatccgttgattcttcctacccctctcagtgtgttgacgtctttcctataaagactgaggcttttacctgagctctgccctggtcactccccattccccaaactagaaggcaccttctcctcagtgcatctgcctagagagcctgtccctgctcaggcaccctgggggctcttccttctcgtgtaggagtcctgtctccccagccagctcttacgtgctaaagggcagggtgcatggccattcctcttaggctccttctaccctcaagtgcattttcctgcactaacaggcaggcaagaaagagaagagaagaatcatctcaccaggtgcacttcaccttctcaatgcagttatcacacccagctaccttgtaccctgacctgggagtcccctggggcaggaagcttttctgattcaacccaggaccccctcagggtctgcaaagcctggggcagtgcatggggtcaatgaatatctgaatgaatgagtgaataatggaacccagctttagcttctatgctgacccttctcccattccatttcagaccccatctcctgtgcaggaagccccttggcctccctagtgggtagcaatgtcccctctcagctgtctgcactgcctcctcctccgagtctgcttactggcattgagtgttcttcctgctgtcaacacagcttggggacatgccagcgtgctgggcaataggcccagcacatcctaaggcagatagtgtgggcaggggaggatcctagcagggctggattctggcacggccaggcctgggatctggttgaggagagggttaaagaaagacagggcctgggtctggaggggtggctgggagctgagtcttggggtcagaggctgaggcctacttgcaactgggcaaccttggatggatggcttaccctctctgaacctcagccgtctctcagtctgcaagggagaagcctgaatggagactcatagtcttttagctgtgaaggctcatcctgctgcttcgggtcctgtgcagagccttggagaaacatcagtagatgagtcagttgcgctcgtgcaggtcgtggtctgtgtgttggtttcctatggcctttgtaacaaatctctacaagcatgatggtttaagacagcacagatttattctattacagttccggaggccagaagtccacaatcagactcactgagctacagtcaaggtgttggcagggccgattccttctggaggctctaggggagaatatgtttccttccttttcccagcttcggagaagccacctccttggattatggccccgtcctcccgtcactctgatctcctacttccacggtcacagctcctattactgactccaatcctcctgcccccctcttataaggacacttgtgattacattggacacatcaggataatccaggatgacctccccacctcatccttaacttaatgacatctgtagtctcttttgccatgtaaagcagcatatttccatgttctggaaatcagggcatggacatctttgggtgggggtgaggagtattattaagcctgccacagtgtggttgaatctaaaactatgaatcaattaatcatcaaataaatgaattactatgaactctaatggcaccagccacaaagcagcactgtgctgtcaaagtatcacagggacctggcttagcctcgaggacagcaagggctgggccacattcccctttttcttttctctgttctctcaagccctgttcatcccactgccccctctgctgtccagaagtccccagggagtccgtttctgcagtttcccaccacctactcccgcggtccctgccccagcctggaacatccttaaggggtggctgtcgtgaatgttagcaatgctttcacctcctacgcagcagtcctttgaggactagcttccctagggagtaccagtgatggaaatatcaatattataagtatttgtctcctgggctggaagaagtatcgagctgtgatttagtcagttgtgctgcctctctctaaccacccaaattctcctttgcctctttggaagacttacaggaatagatctcgtcaactctccatggctcccagggcactctgaggaaccaagctgggagggtgaagtcaggtagaatttgggttccttggaggcaccccctctcacccacctcccaaaacaggcacccgcccaacctgccgaaggcacttgaaccaatcccacatgaccctcccaagcttgcagagaaggcaaagaagtaatcagctgcttgccactgggctccacggggaaaacccagctctgtcctttcacgaggatgtgactccaagagctgctcggaagctgctggctctgctctcacccacgcacagcacagaaaagacattggaatgtgcctggctttgcacaaaagctgaagcaaccaggatcaggggaaagacctgagccaggcacgatgtttcccgaggccctgcagatctcccagcctgtgagcagtgtcagggctggacccagtggctgccccaccataaggccggaggaagattggtcgcgggcatgcatttccatgaagccgccacactggctcacccatgcacatgagacacttttgccggcctcagggagtctagaggtcacagctaatgtggcccaggtggggcctcaagggaggacaaaggctggtgttcatctgcagcatgttaatcgtgagtcctgctctctgggaaggtgtccttggccgtgccagaagcgttgaaggagatcctgttaactgctagtgacttcccaccagtcccggcagacaccgcaagggctgccataatgataatgataatggttctagtaatgatcattgctctcatttgctgagtgtttatgttgtgccaggcactgtgctaagctgtttatatgcattaccccaattaatcctcccagcaacctgattgttatcatcctgattttactgatgaggaaactgaggcagagggaattaagcaacaatgcacatggttggttgaggagagaggcagcatgggttacggtaaacagagcacacattcaggggttacacagaattggattcaaatccagagtttgccacttaccagttaagtgacctggaaaatcacctgcctgctctgaggctcagggaagcaggagggagcaagtggacacatatggacataggggcccctccccaggggcccagccctgtccctgcacgcacctggactcaggtaggccctgaaggctggggatgagcctcagaggaagccatctcccttctggggaaggcccgggctgggaaggagagctgccctgttgagtgggcatctgatctttcctgccaggaagggtggggggcaggaatgtgccaggagagcacctgtagtatcatctgctcctgggtgcccaggcctgagctcaggcttgggtgccattggatgtcactttgagatcccacaagctggcctcactttacgggagcagagacaatgggcaagatctggaatgagggtgggattagcgattgcggacacagggattcctgagggagggagaaaaagagggaggggattgagtcttgggcaccatcaccacatggggcctgctattgcctagaggtctggtgtgtaagagctgaaactgttccacctttcttcaccatctgaagcatacacactcactcactcattcattcattcattcattcatctaaggagccagccagcacagtggctttggagtcagatgggactgcctttgaatttctgccttttcttttctttttttttttttttgagatggagttttactcttgttgcccaggctggagtgcaatggcgtgatctcggcttactgcaacctccgcctcccaggttcaagcaattgtcctgcctcagcctcccaagtagctgggattacaggcatgcaccaccacgcccggttgaatctttttttagtagaggtggggtttctccatgttgaggctgatctcaaactcctgacctcaggtgatccgcccacctggcctcccaaagtgctgagattacaggcgtgagccaccacgcccggctgaatttctgccttttcatggattcttagtgtgatctgaggaaagccacttacaatctgaagcatacacactcactcactcattcattcattcatctaaggagccagccagcacagtggctaagagcacaggctttgcagtcagatgggactgactgaatttctgccttttcattaattcttagtgtgatctcaggaaagtcacttaactctcaaaaccttaactttcacatgtgtaaaatggaaataataatacctaattcacaaggctgcaggtagggtccaatgagatagtattataaatcacttagcatagtgcatggcatctgtaactacgcaataaataatttcaaaatctctatatctatctatctgtctatctatccatccatccatcgcactgtctagtagaaatgtgatctaaacctcaaatgtgagccatgtgtataattttaaatttctagtagccatgttaaaagactgaaaaagaaacaggtgaatcaaatccagtagtatactttaaccccatctgttcaatatattactatttaaaaatgtaaccaatgtaaaatgcaatattttacattgttcctttcacactgtctttgaaattggttgtgtatgttatgcttaaagcacatttcaattcagagcagctgccttgaacagtgtggccattccccaggatttggtccttgttttgttcttctctgaccatgttctttctcctatgatctcactgactcccaccgtttcaatgatcacctctaagtgaacaacgctgggagtgacttacaggacctactcctgggagctagagaacagacaggatgtgtccagaacatgccaagggggacatgtgactgacaaggttgaaggctagcagaggcctgaaaaagtagcatcaaggtggtaaagtcccagaacaagctgggtgtatgagtttcctattgttcccaataaattatcaaaattaccaacgatcacagttatagttaatcacagttataaaattgtcaccaactcagtagcctaaaataacacatgtacattctcagtttctgtgggtcaggattctgggtatggccttgtgggtcctcagtgcagggtttcaaaaggctgctgtcaagtgatggtggggctgcattttcatctggaggaggagttcaattccaagctcattcaggtgtctgacaggtggatgtcaggtggaggccactctgaggttctagaggcagccctttcatcccagaggccaacttcaattccttgccacatggcatctccaacatggacccttccttgatcaagcctgcaagcagatcttatctctaatctgctaagacagagtcttacacaatgtagcataatcataggggtgacatcccatcccctttttcatgttctgttggtgagaggcaaatcacaggcctcactcataccaaaggggatgggaatacaagaagccatgaacaccagatgctagaggattgttgggagtcaccttgggggccatctgccacctggaatttgtaaaaaactctaaagatggacagcaagaggttagcgggcttaagactcaccccagctcccatgtgagttctaagttaaggaagcatgagatgcaaagataactcacctaacatgactcaaagaaccagcttgattcatttctagacaggctccccgaagtgtgggactatgacagggccaggctggaaaatgggtcgggcttctcatcttcctcctaaagaggagaccactaggctcatggggcaaggctgaccagtgatagttagccaggggttgaaaatagtcgcggagatgggcagcttccatgctttagcatctaagaatactcctgcagtgatgggatctcatctgtggtttctgaccgccttgcagaaaaccatgtaaggaagacatggcatccttctgactctctgttaccctagaggatggggctcttcagacaagccctccttccttcatctcaaggtttatcctgccccgtggaggttcttcttcacagactggaggtcagaaagtgcaaataaaactgaagcaaagaatgtgatctgggctcttctcagagacccattgccccgagtgaggccccccaaacctattggccctactctcatcgggaaggccccgtgaggcattccctcccagatggaagccctgacttcctggttacaaagagttaatgtattgtttttcatgatacctctagaacacctgttgggtgaccatcatggacgtttggctgggatttgatgtggggagtgcagagggggacgtggatcactacggagataaagaaatcaatagagatacctttatggtgtagggaaagagggtgtgcacacttgtgcctgggttcacctgtgggtgcaggtgtgctgggcgattaaacaggagtgtacatgcatttgttcacgctggggtgtggatgtctacctgtgtgtgtagagccttgaaattcaagccaggcatatcctgagaacctgacattcccagatcctcaaatatctttatagactaccccccaccccccgctttaaaaaaaaaagtctgtgaagtgtgtacttaagaaaaagtgttttggtgacctcttcagacctttaatgattccataaatatgagatcaaagccatttataaaatattaaaatcaattctccactaaaatatactctcctctacctcaccccacatcattatgaccaacacattcgcatggagtttaactaaagcttctaagactaaatagaatcgtgatgaataataataccacgcccctattaacttctcctgtggcaagggaaaacgtttgcgaaatgtttaaaccttttctcgtacttaaaggtcagctcagcagccacaggactgcctccaccacctggtgctttatggaaatgttgacgtggctcccagctgttgtctaggcgcatttccacagagagtcatgggtttcctgggcatatactcacaacactctcaaccgcctttttagctgtcacaaaagtattcattcccactcaataagcaatttttgccctggctgaagcacttgctgaaatgatttcataaatcatctttttcttgttttcaaacacttgcaaatcagagccaccatcaaactcaacatccactccttaattcacccgcagcttctattttcttgctaaaaaccattacttccttagactccctcgcttacttttcagtttcatcaccaccctgggcagttggctctattttgggaaatgatttttcacaataaaatgaagattcttatcactttacaggagttgccacataagccccaacaacaaaccccctagaacccaagatcctgagaaggtcaacaaggtttcttcactagctgagtgtctccctcacatgccagcctcctggcacatgtgattcccatttaagcctcagcataattgggaattacgtcctggatcaaagatctactttatgtagaccaggccttcaaggatttgcaaccatcagggcagaaaattttcatggttgcttctagggatgggcaggtgagatcaaggttggcctagaattgcagtcaagaaggcttcactgctggtgggctggcagaatctggagtcaagaccagaggctcaaggctggactccttggattaggaaactccctggaagttcagggagccatgtaggtttcctgtcctgtaagatttgggtcttgcatcatttcttacgggaagtgatctctgacctctcccttgtctccccagagcaggtgagctacttccactaagctcatgccattccacctcgttccttggccactggacttattccctgtgctgtgcttactgctggtttctcccgtctctgcatcctgcattagactgtgattccctgagaagggactctgcctgctcattcattctgttgccagtcatatggcttatggaaaggatgtgcttctaatgtggctatccgcattcagggccagcttcctgggttcacaaactgtgaggtcacacaggtcaccgaggaacctatgcatggtattatgctctgctatgaccatcttgaaattctgaaccattttttgaaaaagaggccctgcattttcatccagcactgtgccctgaaaattaggtagccattcttacctgtatttaataaactggtagacaggaagtatttttagagggttgttgtgcctagatgtctaatatcaatgtagcattagatgagaatcccagaaggcaaggaccccagttatggagcacttcctgatagcacccagcatcaagccgaggcacaagggcatccttcaccatcacacttaccccgtggccttggctggagcaacttgaaagtatggagagggtcaccagcacccaagaggacccttcaacaagaacctggagattgtgtgtttatggcactaagtgtggcatgcatttgttctcttgcataatttcagagccagacagtgaaattataaagctaggaatgacaagaatgatgaggccctgcaaatcagggaagacacatcaccataagctctttatcaggccttcccccaagaggccctctgtggaaagtgggaagcaggagggccttcttcactccacggtcgaggggaagaggatgagtggagagaagaattctaaccccatcctgggtgactttgattcaagctccataaggtttaccaaggggaagcttgatgatttgaggcaacctagagggacagagtcagtccaggtgcctgggccaagcagccctctgcctctgcacctttgaggtgtgaagaagaatagtaaattcctgagtttcctgagtgctttccatgtgctacttgtcacagtgctaaatgcaagttctcatctgatcctctatagtcttgctagagaggtgttatgagcactaccatttcataaacgaggacacagagcacagagaggtccagtgatgtgtccccagtcactcagctgatagttaaggggagagtcaggatataaagccagatatacctggtgctgaaacctgaactcccagtgctgcagcgccctacccctcaaccatctagggccaggaaggcctcacttctggggtctgggagcaggggctttcatatgatgggaggggttgtgcatccatctgcctggacagatcagaaggagagaagaggcttggggtccccatcctcagaaataaaaacaaaaaagcagaagtcttgttgggagtgggaggatgagtcctaaaattatctcaaaacaagtcagaaacctggaatatacaaaacttaaggcttctagaacctctgcccttgtcctattccagttgcttatttcttcattcatccagcaattacctccaaagagcctaacatgtgccaagcacgttttactggggactaggagtgcagagattcaaagagaattacagatatggatgagatgctgatcatgtgccaggggctgatttaagtacattctatgtacttctttcttcacaatagccctgtgaggcaggcactgttattatcatctccatgttatagctgaacacattgagacatagagaggttaagtcccacatctaggaagtggtagagccaggatttgaacccggacagtcttgctgcagcgccttctctccaccactccatggcaccacttcaatctcaaagatcttactgtttagagcagttgttctaatccccaaccccacattagaaccacccaaggatcttttaaaaatctgcaccctcagggagactctcgtacactgtaggtgagaagacaaaatggcacaaccactttggacaaacaccttggcagcttggcagtttcttgaaaagttaaagacacatctgccatctgacacagccattctacttccaggctttactgcaaggaaaattaacacatatgtccacacaaagacttgtacccaaatgtttatagtggttctatttgtaagaacagaaaactagaaataatgcaaatgtccatcaacagatgaatgaataaataaatagtagtatatcccttcagtggaatactatgcagcaataaacaagaaggaactgatacaagcaacagcatggatggatatcaagtgaactatcctgagtggaagaagtcagaccaaaatgagtcctgtatgattacatttatatgaaattctggacattttaaactagttgagagtgagggaaagcagatcagttgttgcctggggagagaggatagagaggagaggagaaagggactgcatggggtgggtccagaggaaaatctcgggaatgattgataccttcattatcctgattgtggtgatggtttaagaggagtatacatactttaaaatgtaacaaagtgtacattttaaatatttgttgttaaaataaagtgtgtacactttaaatatatgccaattataacctcaacaaggctgtaagagagcccatgctgagacctcatccaagaccaaataaatcggaatctttgggagtagaacccagacatctgtattttaaagttcctcagagattccaatgggctgtcaaggtgcagaagagcagatgcagtgaggagactgttgcataagccaggggtaggtattcagattaggtgaggggccccataaggggctttgagaggagaatggtgtggctggggttgcatttaagacactgttgttggatccagggtgaggaagacaggctttagactctcaatcttttgacagcaagatctgcactctcaggcaggtgacacctgctcttcattcttcctttcccttattcattcattcacagatatttactgagggccaactacgtaccagacattgctctaagccctaaggacaagaatgaaggaaacagaaatctcttccttcatgagtttgcattccagagaaaataaacagtgtggttacaggttctgcatgatatgttagatgctatgaataaaaaggaagcagggaatagaggtggggagagatgggtctggatgcaattttaaagaggatctcaccgagcagcagacatttgcggacacacctgaaggatatgagggagtcaatcttgctgatttgggggaggaagattattccaggcagagggagctgcaagtacaaaggtccagaggctggagcaagggagggagtagagaggaaggcagggaagaagcaactcacctggggccctgcaggccattggaaggacctggcatttcctctgagtaagaggggaagctgttggggcattggagtagagaagcagtaataaattttttccctcaaggttccttgtaaatcagatgtttgtcaagtgaatcctgcttcaaatcccctatgagaacctgggctgaccttgcttgaaagtggctggattccacagagcatgtgtgtttgcacagatgctgcacatgctttactcaaatgaagtctttctgtggccccctaaacccccaactcttttgggtaagagcaagccccctaagtagcaacatgcccacatatagaactcgctccccctccccagggaccgctttcaggcagacatgctcctcatcattaaaaatggatgaagcctgaacagagggagggaagcatgcaaggaagatgtcaactgtgagtgaggctgctggccctgcagtacgagtcctgggcaaaggagcctgagcatcctctctcttgcccagaccgcatgaatttgctggaatgttttccattccatccatcccaaacagctagtgtaccatttattgagtccttactaggtgccagtgtctgtgacatgtgtttttcacatgatctatctcatttaatcttctcaacatccccaagtcttaataactccctgtattcttccatttgtgttgctataaaggaatatgtgaggctgggcaatttataaggaaaagaggttgatttgattcatggttctgcaggctgtacatgaagcatagtgccagcatctgcttccagtgaggcctcaggaagcttacagtcatgggggaaggtgaagggaagccagcgtgtcccatggcaagagagggagaaagagagaaagggaggggatttcaggctcctttaaacgatcaactgcgtgaactcatggagtgagaactcactcattactgccaggacagcaccaaagccttcatgagagatccacccccatgacccaaacacctctcactaggctcgcattcaaaccatctcactctcatctcactgatgaggcccctgaaggtcagagaggtacagtgtagttctcaaagtcacacagctaaggtggatgcccaggcctatctgattccagaaccgtgcttggaaccacaccatgacattaccactccctcccagatgtcactgagatactggcctcctttgccttccaagcaggacagggcatgcaaggccagaagactcctgtcccagtgagcgcagctcctcagtcttacacaggcctaatgggattttagaggcagaggcaggctgtgagaaagaggtggggtttgggatcaggctggtcttgaactgggggaagcacaggcccttgttaggatgcccagtgacatcagctgcaaagccttcgacacccactgatgcacctgcagggggctctggggcaatggtgagaccaggcagggaggctgccaagccatgagttgtgggtgctcctccttggaaagtgtgactacagctggcaagtaggggattggcaggggagggggctgatgcgctgtagcgcattgatggcctggatttcatataaggcccagtaaaccagaaacaatagagaatggtaggagatggagtcagaaattgtggcctggggttgtctgtgcccacacagggatcaggaaaaggatgggagatgtggcccacttcagaccccacctgccatggacatgcttcctgaatcactgcctcccaataactcactaattccagagtcgccctcaaaccagatatgtccctaatcagtgggcgctttctaaagacatcatatacatagacttctgctaagtactgagactgaaatgcaaaactctcatcccccagagagatcctgttagctgggagaggaggcgtctgattcctgagctcagaaaggttggcaaatgagagtctctgtttccatgggaaatgcgtgcggtgcccctgggcttccatggtgcctggcacaggcttccactgcagcacccccttatctctctgtaattgtttggctgcacatctgtctcccccacaacaccatgagccccttgaaggcaggacctatgtctgatcaatgtccctgtccccgatggctggcccagactgctccacagagttataaaataaattattgaataattaggaagaaactgcttccagagagcatcagggttccaagtcagtggtctgataatgtctgtgtgagcgaatctacctcccgtggattttgtgtgttgaataattgagtgaggtatgccaggggcagagcagatgtgagattgctcaaacctctgacaaatgaaagacagtttccagcacagaggaggtggtctgaggccgagacccatcccatgggggtgggcctctggggattcccaggaggtccacctgaggaagaatatagggtggggcaagaggccagcttgagttggaagacgacagtcagcacagccctggaggcaccagggatggtaagagtgggctgggggcaggagcagggtagggtcctcactgtggaccattgtgacctcctgagacccagagggcttctgtcacgtggggatcaggatttggaaaggggccgaaagtcaagttgccagacaaagctttattcattcattcatttgacctatgcccacgctgctaggatccagcaggaatgcaacaaagccgctgcccttgtagaggttgacttctggtgtggagacagccagggggcaagccaatcaaaaaataatttcagattgggataaatggcatgcagaacaaaagcagggtcagggaaagagagtggtgagctgcattacatgggacagggcagtctgggagggcttcctggaggagctgacccttgaaaagagacctgaaagatgtgaagccaggagtttttgcaaacaccgcaaagggctttgagtttggcaggtgtgaggagccacctgaaggcccctatggaaggagtcaagggcagcaggagggagagggggcagggtgagcaactgtgctgctttgctttgacagaggattttccgggacacgggactttcagtactaaacctggatatgtcccgggcaaactgggactaaattggtcacctagaggtagggcctgaggacagagaggctgctggggcgagaacacgcaggcccacctctgaggtcacagggaggactttgggttttattctacattgaatggaaatggaaggcaaaaactcgtttctgacttaaatatctgtgtgtgtctggcactgtgctgggcagttgataaggatgaggcatacacgatccctgcctttgcggagtttcaggcttttgtgttttctcacattggcaattaagccagcagtgtcacacgtgtcaccacacgccttctctgtggcattttttatctaggctcagaataaacaaagagaagcatccatagtcttcagagcaggcgcctttcctctccacctagatcagcaggttgctatttccagacatcatctcactgtgaccacgagggaagcacatgttatctgatctggaaaattgagcaggggctcacctttactgggcacctgtgtgggaaggtcacaggtcagcagggagtcgagataaataggcagctacaacacagcatggcgagggccttgtgtgggcagaggggtatcatatccacaagcatgaacatctcttaaacactaactgtttcagctttctttctgctgcataaaaaaaatcaccacgcacatagcagcttaaaccacatttactaccgcacagtttccatgggtcagaagtccaggcatggctgaactaagttctctactaagggtctcacaaagctgtcatccaggggcagctaaggctgaggttttatcagagacctgagggcctctctcaagttcacatgattggtggcagaatggtttccttacagctgtaaaatcaggatggcttccttcttcaaggtcagcagaaaagtctctactgcttcaagtctctaacctctaaaccctcagggcttacctgatttgaccaggctcacccaggagaatttctttttggattaactcaaagtcaactcatcagggacctcagttatgtctgcaaaaaaaaatcccttcacctctgccatataactttacctagtcatgggtgtgacagcccatcatctctacgggtcctattcacacccaaagggaggggattgtggagatgggaccaaggggtgggatgctgaggggcatttcagaattctgcttatcacactaaccatggaagaggtgctttacacttacaaactcatttcattctcagaacaatgctatgtgataggtactatcattgtcctcatttacaagtgaggaaactgaggcagagagggggtaagtaatcaagtcaaggtcccacagccaagaggacccagtgctttggaaaaacacagcctcatggaatgaggatccctgtggcagtcaggaaaaggcgtgggggtgggagcgagcctaccaaagttcgccttgctgtttcataaagcgttgccatggaaaccctgcatgaagcatccctcaaagagctgtttgattattttttcagggtggcatctgcagtcacctagcagcagcaccaacacacacacatgcgtgcgtgcacacacacacacacacacacacacacagtgactgagttaatgggtctagtacaggcacatggcaggagatctggaaggtctattgataaatgaattgcttattggcaggatcagggttctgttcggtgtctctactgcagggaacccagatctgggaacctttcaggtcctgatggtcatggtgctgtcggtcttcagtcactgtgggtccagagagactgtctctcagctgccccttctgtctcctcccactggcttatccttccagctccagccctgcctgcccttcctagaccttctcatgtcagcaatcttagtgtctttggccaacctgggagtgggataggattgtgtagaactcattgacattaagcctgaacacacagacctataaggcatgaaacttgttcactcacagcccctttgatgaattccagctcctttgatgacacagaaagtcctggacacttattgatcttgtcccaaatcttaaagcgaggtctagccttgcagatcaatgaggcaggaggcccagggtaatcattatgatgacaatgatgataataataatgactgccatctagtacaacgtcttgccaggcagcatgcaaagtgctctgtatacatggtttcattgctcatttgtcagttcattcaacaagtatttattgagcaatggctctctgccaggtactgggtctatactaatgaatgagtcagagaggctccctgcttgcatggagcgtaccttctagtagggaagatagacagtaaacaaaggggggaaagacagccagttgtgataagtgtcatgcaaagacttgaaataagacagccttggagagaggacctgtgggcttctgcctctttgatttgtgtggtgaggggaggcctctcgggggaggtgataggtgaatgcaagagccctgaggtaggaacttggtaagcctgaggaccagaaagttgggccacagtggctggagcatggtgaggaaggaatcaagggcaccagcagagactggccacggagactctgcaggtccaggacaggagggtgattcttatttaaagggagatgagaagatttaggggggtgttaagcaggggagagacatgctctaatttgtattttaacagatccctctagctgctgtgtgaagagtggctgtgggggcaagagtggaatcagggagctcagttagacctttggagacaccgggtgaaggagactggggcttgggccacggaggtagcacaggagccaaagaggagtgcttgggttaaggtatgctcagcagggctgactgatggtgtgggtgtgggggtggaacatagagaggattctggaatattcctaagattttggtctgagcaagagggtagatagagattccatcttcagagcaactctaagctgtgatgttttctgcactgcataacttaaaaagcagacacacaatggcctgacacctgctacagcatggatggctctcaaggacattatgcgaagtgaaggatgccagtcacaaaaggataaaaacgatatgattccacttatatgcagtgcttggactagtcaaactcatagagacagaaagtagactggtggttgccagggcctgggaggagggggaaatggagtgttattgcgtagtgggtacagtttcagttttgcaagatgaaaacagttttgtggatggatagtggtgatggttacacaacaatgtgaatattcttttttttttttttaatactttaagttctagggtacatgtgcacaatgtgaatattcttaatgccactaaactacacttaaaaatggttaagatgctacattttatgtatattttactataattaaaaagaacagagccaggatctcatagttggtaaaaggccaagccaggtttgaactcagatctggtgtgttaattgccgcatcaccctgcttccaggaacacaggccccagccttgatgtgagctccctcatggtaccagtgtcgaggtggagatcagcctacatcatgcactggtgtggccaccataggaggacaccaacccccaggtgtggctggtttggcacctgtaagtgggatgtttgaatggagagatgaacaatagaaagtagactgaacgccggcactttattttgtctaatagtgtcagcatatacaaagcaacccaatagaaatgatgatgatgatggtgatggtggtgatgatcagggtgacacaaagtcagcttccacacactggcatatcagtgccaagcccttcacacatgacattttatcaatcctcaccacaaccctacaatataggtactttcattattctacatttcattctacagatgagaagactgaggctgagtgactttcgttaagattgcccatgagtaagcgggagtaaaagatcaaaacgtggtctgtctccagagcctgaatgcctttctagtaatgacccgggttaaatgaggaaactaattaagaaggtataacagcactcactcctgagtgttctattttttgggccaacttgaagggacacgcgggtaattatttcctggaataagcatcctctgcacaggccccaggatgctccatgctcagcctcctgcgtggaagctgacaccgcgtttgcttggcgacaagtcacaacaaagctcggcacactcccaccccgccccactcaggcggcgcctcgtgggggaaaataagataaaacaaaatcaagctgagctcctaattcacattccatctctggcagctccttgatgatgaataattctggaattggaaatgaggcaggagaaaggcagatggggatccgggcagtgtggcccagcagcccgttctactcgggatcgtcctctcttcctccttgggatggcgagacagggtccacgggtgataaatgaacaccttgacctcctcctccttttaaaagaattattattttcaatcgtggtgaaatacacataacaccactcattatcttaaccatttttaagtgtggagttagttcattggcattaagtacattcacattgttgtataaccatccccgccatccatctccagaaccttttcattttcccaagctgaaactctgaccctttagtctgtactaactcctcttttccctctcccccagcccctggtaacctctattctgctttctttctcaatgagtttgactactctaggtgtctcatataagtggaatcatacagtatttgttctttttgtgactggctcatttcacttaccatgatgtcctcacagttcatccatgctgtgtagtatgtgtcagaattcccgtcttttgtcaggctgaataacattccgtcgttcggatgtaccatgttttgtttagccattcacccatcatggacactggagttgcttctcccgcttggctgttgtgatagtgctcctatgaacatacctccttctcctttaccggaggctgacttaaccctggctaccctcaattgtataattgtgggtatttggatggccggagttaagtcagtgttccctccccccaccaccaacagaactgccacccccatacccctcacttggcctccactagatcttaccctgggccctacaggtttccatagcaacccagtaccaatcagctgtggaaggcagtcaagtttaggggtttgagtccaggcttgttacttacaaggtttacgacctagggcaagttagttcatttctgcggtcttcgtttcctcatttgtagaaacaagatcatgatagtactatacctacttcgactctcaggggagggggttgaaggagataatactagccctaggtctgtgccaggtgccttgcatggattatctgcctgggtccacatagcaaccctaaggggtagttatattattatcctctttatagatgaagaaactgagtcttggggagggaaaggacttgctcgaggtaccatgatagcatgggggattggagaagggagtgagcatggcagggaaccagaatcactgggcagtggtactgggattctgagcactgggcttgtacccttatccatgggaagtgccctgcaaatgaaggctagtctgataaattttggacatgctcatagctggctcctgagtcaataaaatcaatccgtatctctcagggagcagggtcagcttgaacaggcaaggcccttttctggcagggacattttaagcttggaatggggctgtcaggtgagccatgctgggcaaaagcactaggaatctatgcctgaactcgggggcctgtggctcctttcttcctgggaggagggtccatgtgttttatcttctctcaaaagatccctgactccaaactggtaaagacccacttggattctagcccatggatctcagaaaaagctacagactctataaggactatgagctacagagattgggttctactgcaagcttagagagggcaggttcctgggtcagctgggctgtaggcatcatggaaacgttgcaagttggcacaggttgaggctgcaggacagacagactgtgcgaggattcaggggcatgtgagagaagctggttctggctgtgtagcagagaatgggtaggccatggctctgcaaatttaaattcatttattgctcatgtatctgtcctgggcaggtgtttaatatggtggggagctctactccacctggaaattcagggataaagcctccttccaccttggagacacacatccccttgggtctgatcaacaacatccagccaatgtaggaagaacatgcaggaggctgcatggaggtttttatgggctaagcctggccatggcctgtatcacttttgcccatggtccacctaactgcagggaggtctaggaaaggttgtctagctgtgtgccccaagaagggaagatggaattttggtggagctagactttttttgccacgtgcagccatccagcaaacatttgctggtgcccaatgccttacggaatgtttaaggaacagaagccctgtgacgtgagttcagtaaacatatggctgacaatctcacagaaagctaagttcattgaggttgtcatccatccactcatttatacatccattcattcatagagtcgttgattcaagaaatagtttttgcgtgtctactgtgtgctggccactgtgctatatgctgggatacaaaagtgaaaaaagtcagacaaggtctctgtttgcatggagcttaaatgtttgtgtgtgtgcatgtgtgtgtgtgtgtgtgtgtgtgtgtaaacaacaaaaacaagaaccacataaaatgattactcatgactgtaaatgctctgaaggtataataaagggtggtgaggcagaatagctgaggttggattaaatgtcaggattaaatgtctgaaggtataataaagggtggtgaggcagaatagctgaggttggattaaatgtcagggtaggcttctctgaggaggtgacatttgagttgagtgctgaaaaacgatcatgaatgagcaatgcagaatggaagacagagaacttctgggccagggaatattgtgtaaaggccctggggcagagaagaacttcatgtacttgaagattatccaccatcactactgttattcttattcagacctctacctctttgctctattagttttcctctgcttaataccactggttctgtaactggaccatcaaattcaacagctctgttcagtcctgttctggctttagctatcttggtggcatttcacacattgccagccaagttttcattctcaagatacttggggtcatcacagcctcttggtcagagtttcctaggactcagcccttaactgctcttctccttctctctaccttggctcctgtggcctccccaccatgctgagtgtccatggaggtgtgtacaaagcacactggaccacttggctccacggaggagagggggatgtcttcccagaggtgacatttgaactgagtcttgaaaggttgagaaggatttgccagatgatgaaaatcacaagagtacttcagaggtggggccagcaactgcagaggccaaggggcgtgaaagggcacaaaggagagatcacagaaggagaggtgacgaaggagcaggagtgtgcgtggttgagggtgtggtagggatggaagtagcgggaggaaaacctggacagatggctgagtccagattgtgtaggacattaaatgtcttgctaagaagtagacagtttcttctgccggcatcaaagagtcacaagaagcttaaggatggtgcctgggtttgttttataggcaggtgagtgttggagcgaggattggagaaggaagtgagcctggcagggaacctgaagtggaggacgggcgagggggtaggtgggagaaagccagggaagagattgatttttcttggcagtcaacgatgtaaatggctggcataattgcttgacacagagcctatccttaaaggtcatttggcctcacctcttcttaggggttgcagcccgggatgggctctgatagttttttaaatacaagagcaccttttgtagagtgtaagcataatgagggcagggaggacattcatcatcagatcccagcaaaccaccaaggtgtgaagacaccagttgaatgagttaatgaatgagcagctccagtaagccatgtgcctcttgaacagatgacagaatggagtgcaatgtccctaacatttagacaaattcttgtctcattgctcaagggagggaagagagaaccaggctggcttccgcagcctctctccagccctggagatgtgtgctaacagactggcctgggaaaagagggtggaaggttggagacttggccaatgtcagtcaggaatgactgtgggtcagattgtcagatagaggaccaaggggaaagagaaattggggttctcaggtgtctagaaaaacacccaaggttctggatgatgcccgactcaatgctgtaatcagttaggagctggaattaacagctttctatctttggtgaacaatcaccatggtggaacaatgaggtcaacagcagctcttcagagacatgaagacagacgcatcccaatccttggctgaataggaaggagggagacaagatacccagggacatggcataaggcttcttctatgcatatgacctgtgccccaggacagttgcaggccaggtctagagagtgtggagtgcagctccctctttttcacctggggagatttagggcctggtaacacctaactcccaggccttgagttcctgggcctgtcagtagcctagcctttgctgtaaatgtcatcttgcccaactatgccaaccactggcttctcaaccacgtttccctcaatgcccatcctcaacaggctctcctacctgaatacccacatgccatgtccctgcacatacccacatacccacacatttcatagttatgcagtttacatgcatatatagacacacacatgctcatgtaacaccaacacaccagcatgactatagacacaaactctcctctctctctctctctctctctctctctctctctctctctgctggaggagaaataaggagagccattgttgctggaacattgggtgtgaggaggagacgggtacgtacagttggagacatgggtggggctagctcatggaggaccttgagtgatattctagagcttgacaccaactgaagcgcttttaggagggaagagccatgatcctactagttgtttagagaatgggttggattggggcaagtctgaagacagaacaatgaggaggctatctccaagtccaagagaagaaactgagatagggtagggcctggtcctggagcctgagcaatggggtgggggcagatatgagagatggaaggaaggtaattcaagagactgggtgtgagaccagatgaggtctcagcttggatggctggctggatgatgggccagtcccagatgcaaggaacccaggggagagatgggtttggggcaagggcaggagagtaatttgggccatgtgcagttggaggcacttctgagattttcacttagagaagcccgaaagtagcaagacttggggtctggagtcaggaggaaggtctgggctgggattttgcacacaggaagttaggagtcactaaccctgggaacaagagcctggaaagcaagcagtgggggcttctgtactcttggccatgtgccacttcttgtctctggaacatccttccttctctgtcaagaccataccaaatgcctcttccaggaaacttctccaaattattccttcccctcatccctgaagttgtgagccactggctggtgagccagggcagcacagggcagctgaggcgaggatcagagaggggacaaggtctgagtccattgatacacagggtctcctcttgcatttcagtttgcagctgggtaggactattcacgaatgattcttattaggctgtacgggaggtctttagaattcaaagcaacagaccgctccctggctcaacaagagcagtgtaggtctaagggatgccgcctgcctggcagagccagggtgcatcccatgttctggctcctggggccatctgccctccccagccactgtacccggcttctctctttttcagctccagcctctcccacactgccctggcatcttctcccagggaatccaggggcttatatgtaatcacatcctaaacttattgagcacttcctgtgtgtcagacactgagataagcactttgcctggtttattggacttaatcctctcaacagctctctaagctgggtgcgattattacccccattttattgctgaggaagctgagatgcaggaaggtgaagtagcttactatttaagtaacagtgctggggtttgaccatgaacccagagtacagctccagagtccactctcctaatccatacctgttatacaaccagtaacccacagccaggagaggcacagatggaattcacacccaggtctatgggacaccagagacattttctggaccatgatgccctgtgtctccctgaccctgacagcccttgatccctacctctgaaatcacagactgagccagcagatgcttgaggcgtctctagggtcagatctacctctgcgcctctatccctgcattctgtactgtgtctgggaaaacaggagcttaaacacaagtgtcaggcaggccccatgagtgtgtgatataacactggcttctgagggctgttctggttgtataaagagatacctgtgcaaaagtttattaatccaaagaggctatatggaaatggatcggtatcttgagatggacgtggcttgtacataaacatgagtggtttattcaaatgtgtgggagagtaagtgtgttgtatccattgtcatgtgtgtgaatgtaagagctgtgttcagacgcatcctgaatttgcctgtttttatatatgcatgtttatgtgtatgagaatgtacatgtgtgcatgtctcttgtaaaggggaatatgtaaaggggatgtgaatggatggatttgtgcatgttgagtgtgagtgtgtgttagtatgcctgtgtttctgtgtaagacatttttgggtcttccaattaaggagcttgtccagggcagaaggcagagggtagagtccattctaccacctgcctctatgacttcagaggacctgaacagatggcttccccctgcacagggtcctccatgaagcctttggagaagtagttggactccagagatgagtgaaaattaatggatgaggcaggggctctcctttcctactgttcctgatcctcaaactgcaaaatgttcaccaagtaccatctttggcccagttagggagacctgtaggaaacaaagcctcaaagcagactctgtagccagcaagatagtcttatgactcaccaactcttccttcacttctacagcagctaagaaagaaggtgccaaagtcaggctgactaggtgtacaccccagttcccctggttccatgctgtgtgaatgtgagcaagtgactcaccctctctgcgcctcagtttcctctcctgtccaatgggcacagtatccacctcagtgctattatgagcattaaatgagaaaggattaagtgtgaagtttgtcatagaagtggtccgtaagcgatggtgcttatgctgaaggaggaagtgaggaggatgaggattcacaggacaccctacgggaactcaagtgcaccacacgttgaatccctgtcttttgcagtcgccctgttcaccatcatttgcagaaggtggttgatggtggtcagacgcctcttcctcagttcctctttgggcccctctgtctaactcttcttggaaggagagaggccgtgggtctggagccttgggaacatggtgcttcttccagtaaaatacaagttcagctgtctcttgccttaagagagatggctgtgaggtgtgctggggcttcagggccgtggacggggagccaagtggaggaaataggggctctggagttctgttgtctaagggattagttgatgtgtgggacatcattatgggcatcccaagtaatgcaggtcctcaaggcaatacttccctaccagccagcaggatataggggactaagactcagccttgggcaggggcagcagagcctggcccagagcagggctcccaccctgggggaggttaaggagataacaaggctagttatgcagtctgttaggacagccctggcaagggatagagtaaccttccaggtgtgcagcctcaccaatagttataaaccccagcctcaaggcaggaccctccagccaggttcagagcctcctcctctttgagctcctttgccaggattggttcagggctgaggccataggagatgacattctatctgcagctggacagggatgtgggccaaacatggcagccctggccataaacctcccaaagcctgagggtcattctgacccagacaaacagaaaacctatcctgctataaaaattgtcaggtggccgggcggggtggctcatgcctataatcccagcactttgggaggctaaggcaggtggatcacttgaggtcaggaattggagaccagcctagctaacatggtaaaaaccccatctctactaaaaatacaaaaaaaaaaaaaaagttagctggacatggtgggtggtgcgcgcctgtaatcccagttactcaggaggctgaggcaggagactcgcttgaacctgggaggtgaaggttgcagtgagccaagattatgccactgcactccaccctgggcgacagagtaagactccgtctcaaaaaaaaaaaaaaaagttgtcagatgaaaagaaagaaggtatctctttgtcctctttgtcctttcttaacatgctacattcctctggaagtgacaagtttacttcttttgtaagaattgattttaccaccacaagttactagccaatgggtcatagaagaccttaggccaatcctgcccccagaacaaacagttgtttgcatgttccagtgggagacatgtttgtcaagaaaaacattttcacattaacctggaaagttctatgtaaacgtcaagtacccttgctattgttgttttattttcataatgactagtacagaaagtaaagcaactcaggtttatcttattccagaatccaacacctcccaaaatgtgtttcgcagaacaattcagagtttattaggcattactgagagtaaagttccaaagtcagggcagtgattatgtagtcaaatttttggaaattctggattaagcaaggttaagcaggtttctcctgcagaaactctcagataaacttgtgagcactggtttcttcaagagggagggagtttctgttgtattttttaaaattacctgacacactgaatgtttttcttattaagtttatttctcagccagtgtatcatagaacacaccggaaaataattttctaccccactatgcaattaatcaaatttagcctcaaattgcatatttagctattctaagcctaatactaacagtatttagccatgtttcaccatagggtaccacttattttccatgtgtttttctgtctagatatatttgatcatccctgggctagggtgctgtcggggcagatcgggctgagcagggggcagcagggcaggtgctggagaggttcacataggccgcaggatgaaggacctggtgccagcctaatgctcttcctccaagggaccaaggcttgccacagtcttctgaaacaggggcagcacgtgttactggtttggaaaaactgaacttcccttagagagtgacaggagcaggaaggaggcaatgtggctccctgctcccctgcaatcttgctgtatcccaaaccttctcaggtcctaccctaggaggccctgaaacatccccctctgcatccactcttccagctcaatattaaattccttaaaggcagggtctagctcttccccttttcctctgccccatttccccagagaaatggccccaactttttaagaggttgaagtctttgacgcagaagagatacctcttccctctgggtcagggttgcccaaattggcaaattaaaatacaagaaacccagttaaatttgaatttcaaataacaaagtctttttagtataagcatattccaaatatcccaagggatatccttatactgtagaagggtttgtgtttttctgaacttcaaatcgaactgggagtcctatattttacttggcagctctattctggggcctatgatgtttccttcttggtggtgcttctttaaagaatcccaggtggaagagaggaagccatgggttctgtggttaggaagcagcaaggagagttctgttctgacagcctctctgtggcccctctggtgcaatgatggatgtctttgcagccccagctagtctaggttggaggaaaggggccaaggagagctctgactggatgtgggttgggaatcctctaggcctggcaaggagaggaactctgaagttaccaagagcatggactccacactggggaagcagtgaaacaaacaagggtcttgaatcctgggagatcaagattacaacatggtaaaaggcacagcccttagatcaagcagcttgggttttaaccccagctttgatcccaacctgcattgtagccccgggtaagagttagcccggctgttcctcagtttcctccctgtaaaaaggagacagttgtagtacctccgtccgcataagatgaaatagaagaatgctaagcaatgtgcccagctcatagtaaacactcaagccgtgactattattactttcactactcctactagctgtgtgacccttcggatctctaaattcaactctctctttggtaaaatgaggtcatctttaccaacctaaagattagctataaagactaaaaatgaatcctattttaatggggaagggtggaggctataaatacacaagcccttccctgcagtcagcacaatgcccacctgtccccagggccaaatggtagggaaaaggaaatttgatgtaggtctcaatcttcaagtgccacctgcctgtctcttccagtacctgctagtcacctctgtccagcaccttccctggtgcagcccactcgccccacagtcccttcccatcgttgactcccatcaaaactgagctttcctcacttgcttttatcacaggagttggggggggggcgttcctgagatatgaatcatatgcctcacataagtacataactgaataaacactagttcagggtcagcaaactgtggtctgtgggtcagctggctatttttataactaaagtttggttagaacacatattgcctgtggctgctttcacactgcatggaaaaaatcaggtccctgtgacagagaccatatagcctgcaaggccaaaaaatatttactatctggccctgtatggaaaatgtttgccaattcttacactatttattgcttcgtgtgtgtgtgtgtgtgtgtgtgtgtgtgtgtgtgtaattctgattaatatataatatatattttattatgtatacatatatatttaattcactcaacacattccggcttcaactaagcactcgcttcctgccagacatgaaatcaaatgctagatatataaagaatacagcactgttcctgcccctcaaggagtccagagatgaaaatagacacctaaagaaacaattacaacaagcaggctcagctcctgtttggaagccagggtgttataagtggatgaatgaatgaattacaatgtacaacaaagtgcaggaattgaagcgcaaggaaacccccacgtaactccttagatggggtccaaaaaaacccaatcatgtaaaatgtgggcttgtgagattgcaacattaacaaaatgaacagagggagcctgcctatttcatgggccaggagattcaggattctaacagccaattgccaatgacattgtgacagtatttatagtcaatcaagatgtgttcttgtgggatcttatgggttatacaagacacttagggtatcaaggagggctttacggaggaggtgacatttaagtgtggctttgatggagtttgccagatgaagaatttgagagaaaaggtagagaggacaagatgagagaaggcagaaaaaacgtcagcaacagtcagatcacaaggatgggggcagcctaggcctaagctttaattcgtactgatggcaacagagaggttcttaaggttttctttttatttcctttttttaaaaattaatctttcaaattattatgtattctcatgagagtcacccagaagaccataggttctgtgtttgcctgtgccttggtggtaaggaacttacttttataatgtgggctcctggcagggtcaatagggcatggccatggtgaatttgtcattctagaatgctggctccagcattgctgaggacaatgcactggagagggcaaggccagcagtgagaagatcagagttgggcacagaagtccagggaagagaccatgagggtcttcaaatgagaaggaagttatagggctagtgtggtttatggaggacaggaaactctaggagagaggccacatttgctgctgtcagaagtaaaaacctaaaaacaagaaaggccctggagattgagcagttaaagctcagagagataaacccagctgggccagtggaataacttacatgaataggttagtgggagttgttctcaatctcagcttttcagtctcctggagcagccgaggctctgtttctcacgttatgattcagcaggtttagggacagggtctaagcatcagtatctttataaaactttccacataaccatgatgctgaaggttgcagaatcacaaacatgagtcgagagaataggcttatggcggagggcttctgcctgacaatggttagggcaaagcccagcagggcggggccctctgactagttgtgggtggcatcctccatctgatgccctggcacctctgcctctatttgattgacaggtagcaggaaatatacaggaccaacctagaggtcagcttgcctggttgtcaccccaaatcctctccctcaggagaatgcatgtgaattccttgtgagaatgtttcaaggtacagtagtcactatggacttcctgtggaatggactgtgcaagaatggcctattgcaggcagaaatgtggaatcccagacagtgatgtgaaaacctgcctctgcccctgcagtgagctacgtggccttggataaatgctccaacatctctggcaactatgcttatctcaacaagtgatgataataatagcacctctctcgataggttgttgggaggattaaataagatcattaagtctctcagtaagcttttatgaagttattattatacatcaggcactgttcttggaactgagaaacagcgttgaacaaaaaagaccaaaaaatgcctgtccttatggagcttacactgtagcaaggtgagactaacaataaacagatggatgtatcaagcaaaaatacatatcatttgtagtatatgaagtatattaactttatatatgacatatataaaatgtataattatatatctcatgtataataaaatataaatatatatcagttgaatggagaggaaatggagacagcaagtatagaaaactctttggggatggaaatatatgaaaagcacttgacattaaggatagcacagagtaagtatgctatgaattatgtttaaaaggccaaaccgctaaaaataagggagtcgtaaagattaagtaagctaatatatgatgcagaagtgcctagcacagatctgggactcaaaaaagagtagtttttattcttccctccctgatcctgcccactgcccccagatcacacacatatggacacacgtacacaggcatcaccttctcttctttccatgatgaggattgtgggaagactaaatccttctccctgaattcttcttcccaactagcctaccacttggtatcaatcgtatggccatggagatgaaacaagttacttgatggaagagaagaaatcaaaacatatggagggtgcttgtccagagagcataaatgactcttcattataataagggaaccaaagtctcaaattaaaaataaaagaaggcatgatgtagcttttgctgcacttcagccacagaggagattcattgtcatgcaatcactgagaatattacgttgattggcaagagtcgggctttgtagaagagacaaaaattccccacagctaatctacaatggaattgttcaatgtcaggcactgctttaataatattgttctgggctgcgttggatgtaaatatccccctcttcatttggtaagcaatcaaagggaagctttatagatgggagagcatgaacggttatagtatctgtgctaaaaaatacacggacattctaaaaaaaaaaatcaaagaacacggtgccttagaaaggattcgctttgtagcttatctccaatctcctatgtctgtccagcaggttgcacattagacacataacaaaagaccacactttaaatgttgcccttgacattattaaaaagtacaggactggcaaatcagactgggaaaaaaatcagactattaaatctggacagtcgggtaatctctcttcatcttattgcagtgcctagaatgatgaaaggagtaagggaactcttgtttattaagcacccactatgtgcttggatgctttgcctctgtcagaagcagtctcacattccagagtgctgaacaatggaggcagaaagaccgaggtcctcaacctagctctgccattttctagttgtttggccttgggcaagcaagtgaatgaagctctctgtgcctgtttttttttcacctgtaaaatgaggatactccatatcccacaagataaagtgcctggtatgtttcaggtcctggactaaaagtaaaataagcttttagtccaggacctgaaacgtactaggcactcaggggtaggtattataagttgaattttaatctgcgcaacagccctgtgatgagttgaattgtgtctccctaaaagctatgttgaagacttaacccccagtacctgtgaatatgacctcatttggaacagggtctttgcagatgattaagttaggatgaggtcattaggatgtgtaccctatccaatatgagtggtgtccttataaaaaagggacattcagacacagaaacaaagcaagagaacaccgtgtgaagacagaggattggaatgacgcatctgcaagccaaggaacaacaaaaattgccagcaaaccaccagaagctaggaagagaaaaggaaggattcacctacaagtttcaaagagatcatggctctgctgacaccttgattttaaacttctagccttcataactgtgagaaaataagtttctgttgttttcagccacctagtttgtggtgctgttacaggagtcctagcaaatgaaaacacccttacaggatgaaaaagtatccccagtttctgaagaattgaaggccagtgagggaaagtttacagctcaagattgcgcagccagatcggggatttgaacccatgtctctctgagcctaaagtctggcctttctccatccactgtgggacctctcaggagtggagcttggcataaaaaagcaggtggggttggaaatgagccccattcattacacccaggtcccaatggaagcatcaggtcagagtggtctgattgtgaacagctcattaagtaaagagcagtgagcttttgagagtgactttttaagaagaatcgacttttatttatagtgatgttccagtcattaatttcgaaggaagaaagcccaaagcagaagcaggttcattaaaaatttgacattagtaatttaattaaattgggtctttgcgtctcattgcggaaaatgacacgttagttctacaccagttctcagctcatttcccctagttggctccctcccctcaccttagcttgcttttttctccaaatgtttacctgacctgcccttcccaccccacactcataagcacacacacatcacagtcattgcctctgctgtaagacacctgcataggattatgggaaacaccaagtgagccagcagcagggcatcatgggaaatgccaagtgaaccagcagcagggactgatcatagaagatgctaaataagccaggagcatgggatctcatgggatacaccaaataagcaagctgcaggggatcatgggaagtaccaagtaagccagtagtgtgggatcatgggaaatgttaagtaagccagcaacagtacaggatcatgggaaacaccaagtaagtcagcagcagatcatgggaagtatcaagtaagccagcagcatgggatcatgggaaatgccaagtaaaccagcagcaggggatcacgggaaacgccaagtaagccaagagcaaaagatgggaagtaccaactaagccagcagcatgggatgatgggaaatgccaagtaagtcagcagcaagggatcatgggaaatgccaagtaagccagcaacatgggattatgggaaatgccaagtaagccagcggcaggagattatgggaaatgccaagtaagccagcagtgtgggatcatgggaaatgccaagtaagccagcagcaggggatcatgggaaatgccaagtaagccagcagtgtgggatcataggaaatgccaagtaagccagcagcagtacaggatcatgggaaacaccaggtaagtcagcagcaggagaccatgggaagtaccaagtaagccaacagcaggggatcatgggaaatgccaagtaagccagcaacatggtatcatgggaaatgccaagtaagccagcaacatgggatcatgggaaatgctaagtaaaccagcaacatgggatcatagggaatgccaagtaaaccagcagcaggggatcatgggaaatgccaaataagccagcagtgtgagatcatgggaaatgccaagtaagccagcaacatgggatcatgggaaatgccaagtaagccagcagcaggggatcatgggaaatgccaagtaagccagcagcagtacaggatcatgggaaacaccaggcaagccagcagcaggggaatatgataaatgctaagtaagccagcagcacaggatcatgggaaatgctaagtaaactagcagtgtgggatcatgggaaatgctaagctgggccaatggacagggcaatagaggtaaatcttttcatctagatcatctcacttggcacaggtaaagaatgggcaaggaagagctcttcagtctttaagattcactctcacaaaaatataagcctctgagggctggccccactgtgccaagcacggtaagcccacaatgaatttttgttgcatgaaggaattaatacatgaatgagtaactctccaaataactaattaatgaacatgcacatatgtccctacaagtgccaggcactgtgctagtctcccaggatatacctatgaaccagactaggcccacgccctcatggccctgtggcccaatggaatgagaacatttgccattttgtgagcacctactatgttctgggcgttgtgccaggcatgcagcatttatattggtaactccctcaaccgctaaatattattggcctcactcctttctcatttgaagaaactaaggctcagagagttcatgtgactcaaggtcacacagaataagacatgatggcacctggtttcacacccagatcaggctggttccaaagtctaccattaccctctacactgagctgtttcctctcagaggaggaagagaggaagggggagggaataccttttttcagagggttctgagatcatcagagctggtagagggttctggaaggcagatactaacagcaacattggcaggaagagggtattgcaaggactaggggggccatttagagtccaggcctgcccacttccacttccccatcactgccaccccactcttttactccaggctccctcagctcctgggttatctctggcctcagggcctttgcacatgctgtttgctcttttttgcttagctaagtcttactaatctcccagggttctgcagagatgtcacctcctccaggaagtgatctctgacctctcccccagctgggtttggttccctacctgttcctgtcccatcataactcttagtgtgccattaattgtgcacagcacccactgtaccgagggttagattcacttgcgttgtactcactgtacatcaggctctgtcctaagcactttgcatacctgaactggcttaattcttgcaacaattattttgatataaggaaggtgctgttgagctccctatcttacaaatgaggaaactaaagtgcaaaaaggttaaaagacttactcacggtcccacaggtggtaagatttcaggctgggaagtgaactcaagcacggtggcttccaagtctgcacttaccaccatccggctgcatggcctctcagagacagcctcaataagtcattgccaggtggattaatggagaggtacttaaacggtagtctgggcatgactaagacccctactcctcaccccatgggggtatcctagaatgataggaggtgttgacctttaaggcacaggcagttctaactctgggggacaaggcagagggcagggggaagctgggtcagttagaacaggtgactgacttatgggcacagagaatctgtgtcctccctccctccttattgccaggtcatggtgctcttgcaccttccccaagaccatttcctctgcctcatgagagcacacttgcaggtgaccatgattgcttggctctggccacacactgtgcatggtgtttcctggctcccaattttccccctttaaaccagtcaggctgatgagaacccgggttcttgttttcccacttcactgcctattctgcctaatccaaccctttcaactcccctgaacctgcggggccaaagtgcccctctggctgccagggtggatcacacatgaaagaaaggacactggatttaatgagcacctactcttatgccatgccttatgtcccttccatggtatttagtgaggagtgtggagtctgaaatcaggccagccatgcccaagaggttaaagtaatattcctggaattgcatctctagtgatcaggatgaacataattcacatccatggctgcgcattagaaaaggcaagagacctggacatccagttgtaaactcatgtgtgagattttgagtaacccttgtctcttatgagtaacccattcccagggaatctacagccttgagaagcgggcagatcagcagtgggcaatgctgttcacagaagaagaaatgagttccaggaagcccgagtggcctagggagttgctactaggaagcccggtgtcagggctccagcccagctcacggggtacccgtctctttctctgtttctcctcacagttctccccagccacacatgtgggaacccagggaggctgcccaatggcatccagcagggttcaaccttcaacctcggtgacaaggtccgctacagctgcaaccttggcttcttcctggagggccacgccgtgctcacctgccacgctggctctgagaacagcgccacgtgggacttccccctgccttcctgcagaggtaggtggccagcaaggggtctgacagagtggggcagtggctgggaggtgatgctggagcttccagtgacatccagtctcaaagggcaaagctacaccccagcagggaggggggtacccaagtctggacagcacagagggttttcagggtcctcaagtgttctaggggtatttcaacctcacctgacctcctaaccctcaagtgtgcactccctcattttttcccctgtatcaacaaacttatatgtagccagtcttcccttacctctagccctcctgtctcagaagaaacatcatttctcttcctattgcagaccctctctcctcttgtggaagccagatcactttcccaacagctttcgtactgacctcactgtaggaattattcttttctctttcctataaattcagcctctctccctatctaatagtttcttcctttcagcctccaaatatgctcaaaatctctttactccaacaaccccctcccccagaaaaacacctctcttctatgctgtgtcggcctcagcctcccagctaggttgaccaacttgttcatatttgcccaagaccttcccaattttagtcctgaaagttccgcatcctggaaacccactcagtttcaggcaacagagacatttgtcactctactcccagcctattccttacacaatcttcttttttttttcctttcttcctttcttttttctttcattctttttcttttttctttttttttttttttttaattttatttgagacaggatcttcctctgtcctccgtgctggagtgcagtgacgtaatcatggctcactgcagcctcaaactcctgggatcaagcgatcctcctgcctcagcctctggagttgcagggaccgcaggcatgtgccaccatgcccggctaatttttttttttttttttttttcatggagacagagtctctctatgttgcccaggctggtcttgaactcctgagctcaaatgatcctccggccttggcatcccaaagtgctgagattacaggcataagccaccatacgtggcacacgatcatttttaaaagcttagaaaatacagaagggaataaagaagaaagaaaatttacctgttttaactgtgattttaatgtatgtcctttccatcttcttccaatacgtattgcacatatgcatatattacaaatatgtacataaattgagattatgatgcatgcagacaatttttaaccacctttgaaaaacaatcaatcacatcacactgtaagatttcccatgccatcaacatagcccagcatcttgaaagctccatccagccttgtccctccttttcccttctcatttactcctctgcagactggcctttgccctcaatatttgcatcattttgccaaatcagatgggaattgttttggctcttgtatttcttgacctcttaagaaacctttgcactattgaccactcttttcttctagtaacgctcatctctaaattccatggatcctgaacatccatatatcagtctgggaggaacatttccaggagttgagaagtcattggaataactagctcctcctttagttcaaattttatttttcttttggaggaagattttctgtaattactgtaaaagactagctccagggataagcaactccttcttcctgccacatgcacacactttttgttattgacaccaaggataaaaattacatggcatgtatacctattccccttcttcccaatcccatggcagacataattaattgttcattgcaccctttctgcttgggtccagacacagctgtgaattccctcccaataggcaagccacagccaatcaatctgagttgccacttgacttcacctttgtttacctctcctcaaccaatagaatgggccttggccatgttgagccttcttggtggaccacaagggaactagagttccctttcctgctttcctaagtcccatcttcccaggccccattcctaactcaggaactgcctctttccatgatggacttcaggaattaccaaaccaatcaggtgagaccttggcccctacacaggtgtgtggcctaaccacagcctgaaagctgctgtatctgcccttccttatagcatccttacccaccccctgccttaaggatgttaccgttaacattctgatcttccaaggagggtgtcagagttgtgacacgatgatagaatatgaaatatgatagtaaataaaatcaagtgtctaagttatgaaatataaactgcagttctttttctttttgcagcactataaatgccatgctattttgttcaagataaaaaccagaaacaaatgtaatccaattactggatgcagcgggggtatcactctgcttggggaagtaaaatactcagcaatatccaatgctaatatggtggaaatccactaaccctcctaatatctccaggaatctgtcagctttagcttcctctgaatcttgaactcaatgccctgtctccctacccctgcttctgctctgccaacttaggttgggaactgggtccatttttcttggatcccctacttctccaaaagacaaaatacaagccaacaaacaaaaacatcaacgaaggcgtctgcatgtagttcaggctttatggaaggtgtggcaatgcaaggagcttacatcttagcaatgcaaatgacttaaaatgaaagtatgagcaaccaggagcttcacagtcttttggcccctcctcccgggaagcttctccctggcttctgtcttggcaggctccaggttcccctgtgatgtgcattgtaccctctcttctttctccagcctcttccaccttggtgctgcctgcaccttgagcccatttcagaatttccatcaacttcttaggcacaagagcctggtttcctcttggttttgtcatctccttgcagtctaatgtctcccctcctcctccaagctatttaggtatagggtagtattttcctgaacaaagagaactctcattctataagacactctggggctggatgttaacatatctttttgttaccccaccagccagagataagtgatgaggggcacctcatggaggtcttctacctcttggatgtcttcatgtccaatcaaggctcacaacccagtgtctttgtgtccaggcacagcgggcagcaagggctggcccttccgagggaaggagcagggtggagagataccactcttctggcattcacaccacacagtaattcatgggcctgggcgggggtggcatgtcttttggtggcacgactctctgaagtcttccaattcttttttcgtcgtctgaaatgatgatgattctttccctccttctccttcactgactttccaccctcattccccttaaatactggagggcccagctcggcctcttctctggggatttcttccatctcttggaatttctcatctactgtgttgctgtaattgttactagggggcaactctccaatccccacctccaaccccattctctgtcctgagcttcaggcccctgtggagagtgaactatgctaaagttctcctcagcttgtttcaaacttggcccatgaaaacctcactcttcctgctttccccaaacctgctctttttgttgccttccccagctcagtgaaaagtgtccccaccaacagtggccaagctgaacccctcagggcatcttacattcttgcttttcttgctgttcacatcgcatcatcggcccccatgtccctctgcaccagcctaccccctccacatctctgttgctcttcagatgatggtccaggctctctcgtctctcacttgcctcactgaaggttgaccctctgtaggcaggtgtgccccagttctctcctgctcacaccagcccattcctacctgtactgctagggagaacttgctaaggcacagatctgacaaaactgagtggctcagtcccttagtggctcttcatcactgacggggtctagttcagattccttagcatggagcagaaggctcttccagaaagagccccaccccaatctttccagtctgtctcttagacttattttaagtagcttccactttagccacaccagagaatgctcccttccaaacgccctagggaagccagctgaggatgtcaaatcctgcttctagaagggcttccagccccctgctgcctgaggggtctgagatgtggttctgctcaaaggctgggagagaataaaatgactttccaactctcagaccccctagggcttccccccacccccagtcacctccctaccttcaggttcatctctattataatccccacaagctacaagaatatcctaagaaacatcctcaataatgtcagtgattttataaaagtgatttcccaaactgttcttccttaggaggccaagctaaacaggaacaaagggtacccaccatacacccatcctgtgccaggagtggtggtcatgccagagtgaacaggttcatacttgggaagcattaaaagccttttggcctttcttcctctcgtgtagaactctcaagagctggcatctgcgagtgggtaaacctcatccactgggcagtggtccgtaaatatttgctgaatgaacggctgtctggatgggtctaattcaccatcagaatcatgctagcatacaagcccgaaagggaaattactagcctgggttaccccacctgcccagtagctctgagtgacaatctctttaagtccaaagcttcccggagcagactggaaagccgtgtgtgtctgttttatctaggaaatgtcatgtgcccagctggagggtggacttggtctggggacacagcacagactaggagtgggggaatagggaacagctgggaataggggggagccaggtgtaaggccgacccccaaggaggcccatcccaaagatcctgacccatcaaggcttggtccagctgacagagggaaggagatggggcctgtgaccccccttcactttgtgtcacactgggcacgttttcaaaagcagaggtccctgggaggtgctgagctttgtgtcatctctttgatccacaagagggaagatcatgtggatttcagcaacaggcctctgatttatgagggccattggccctggatcaaagaaggctgcatggggaagtgacggaattcatatgcactggggactgagaggcaggtggtagggagaaagctggccagagcaagaagtgcttagcctctgaggttcaagccaaacacggcaggctgtcaccatacctggggaagacggaatacggtctgcagaagcttggactgcaagcgctgagctgtattccaaattttctggccccaggggaagaaacctgcagaatgtgaaaaagaagcagtggtgtcgggtatggacagtgcatagagtcagactggcctgggttcaaccctaggtaagccagcccctagctgtgtggttgccaggggtgctgctaaacccctctgagttttaaaggtgggacacaagtagcagccttacagggctgattgtgtcctcattttattcacttggctactcaacaactttctcttgagtgcctgttatgagccagccagtcattaattcaattatcatttattgactgcctatacagtgccaaatattgttctagactcagagaattggaatgatgagcaaatctgaccaaattccatgatctcttggagtttacattctagcagccaggaggcagaaaacagatacacacgccaaataaacaggtggtggtaggagctacgaggaagtaaagtcttagccagtgatggggaaggctactttagacggagcagtcaggggaggcctctgtggggaggtggcctctgaaatgagtcctgtgacaaggaggagcctgttgtgtgaagacctggaaaacggcattcctggcaaaagaagcagcaagtgcaaaggccctgaggtgggggaaagtactggacacgctagaggaacagaaaacaagcccctgtggcaaaagtagagtgaggggtgggtggagagggcagggatggggtgaagcaaggtaagaaagcggaggctgaagcgggcagatcgcgagatcaggagtttgagaccagcctgaccaacatggtgaaactccatctctactaaaaatacaaaaattagctggacgtggtgtcacatgcctgtaatcccagctactcaggaggctgagtcaggagaatctcttgaatccgggaggtggaggtttcagtgagctgagatcatgccactgcactccaacctgagtgacagagcaagactctatctcaaaaaaaaaaaaaaaaaaaaaaagtataggcttggttctgagttcaggaggcaaccaggggagagttttaagcagaagtatagtccaatttaacttaatttttttaaaagatcactctggatactagctgagcaagagccacaataagaagatcagttaggaggcagctattatgggcaaccaggctggagttgctgcatcttggtcgagggtggccggagtagaggtggagggacaggcgtagattggggctgtgctttggggatacagccaacagaccttatagatgggttggatggctgatagaataaagggccaaagttgactcctaggcttttcctggagggctggtgggtggggatgccaatgaccaagatggagatgactggcacagagggcaggaagcatgtgccctaaagggaagcaagacagctcactttgtccaggtaacgtttgagacgcctgtgagacatccaaatgggggcattgattctgcagctggaaggagtcctaagctagaaagagatctgggaaaggcataagagggcaacactgtagatagcaaagagggtctgggcactgcatgctggacaccattgtgttgatcaaatttaacaacatggagaaggcactaaacactatgccgggtgcagtgtgcaccttgagtgattctgagcactggggcctcaacagcgaccacagctacccaaggccactctttacgatagggtaactctactgctactgggataactagccttccatcacttttgcaattactgttactataccagaacgtttcacgatatgggctctggaggccagtcacctggattcaaatcctggccttgccacttacacccactggctgagtggcttgggaccagttactcaacctctctatgccccagttttctcatttgtaaatgggaataataatggtacttaactcataagttggcagtgaggttcacattgataaatgctaagcacatagcagagggccttgttcatagttatgactcagtgaggggtatctatcattgtcattctcactgccacagcctcactggccaccatattgagccctaactaagtaccaggtcctgcattacctgttgtaatcctcacaactcccaaggaggttaaggtaatgttatctcctcttacaagtgaggaaactgaggcccagagaggtgcagtgctttacctgtgattacacagcttgagagtggtggagccaggattcagcgcaagtccacgtgcctaacagccatgatcttgaccaccaccctccactgcaggcaaggatggtggcctctggcccacagcaggagactcacaatgatgctgtgatttccagagcttctccagcctgatggttcagggcctgagagcttggcctgcaggtgcaggcatcccctgcatggctccaccagtcagggactggcagtctcttgcggtttccccttgaccttccatgcattcctgaggagagaaacctctgggaaagggcctgaggtcattctgttggacagatgctgcttcagggtgggggctggaaactacttttccatcctatgaagaaagccagacccaaggttcacccacctccacttaagcactggtagctggaccagcacttttgaggcagcacaaaggcccccaggcagaagagaagggagcaggaggaagcgtctcatgcctggaaaaccccatctccagggtctggtgcttccaggagcctgctcctagcccatgtcaggaacaggattatagtgactgaggcccaggaggcagacaaataggtgggtaatggtgtgggcctggagtcacaaggtcttaggttcaaaccctagctccaacatttagtagctatgtgaccacaaggaagtcttaaaaactcactgagcctctgtttcctcatctgtaaaatgtgcacgataatacctatgctctcgagggtttgaagattaaaggggaaaatgcaggtgaagcattttgcacaatgcctggcccataatgaaagctcactaaggagtgtcatgtaatcaaataccatgtcctgtctacattcttcccctcagaaggataccttaggtggctgtaactataggagtctgggagcaatagtgatgttctcagaattggtcatttcttcattttaaggagtgtcattgataaagccaaggataaatgggcagagtccaaagcccccaggaagaggggactgaagaagttgagcaagttctgggggccccagcatgtttaggcacacgaaaccattcaccacaagaaaagggggtgggccgcaactttggggcactcctgccctggtgctctcagtcttgcactggaattggaagatggtggcttctcctttggggcctgttggcatcttcatttccacagaggctgaggggtcctggggaagatgatatgaacagaagccaattccaaggaccccaaatcttctaggcatgcaagatggtaccctagagctggcctgaagtagagaggataatgtcctgttttctccatttcctgcctgaaatttgtcagtcattgtagagttaacagaaatcaaagaggattgagggagagttctctaaaattatggctaattgaagagatttccgtagaacttaaagtcgatcataaataaagtcataaacttggaaaggcaactatcagcataacacacctgcacctgagaatatgcatgacttaatggtggtgcaaaatgcccattgccagagaaggagaaagtgtaaatgaatattttaggactatggtgtcagctgaaggttatattttatgactctggagttgtaaccatgaaatatgatgccttgtctaaagtgggagaaaacctccaaacagcttttgcaggatcttcaatcaaaacaggatgatgcaagggccagggtgtcggatgagcccaagaggcagggatggctaaaatggtaaaggtgccgccttcagaggagactggtagctctggccagaggatctcaagttctcaagtcctcagttctagcacaagtccagaaatcattgcctacagttgggaagtttgaaaatctcgggatggcttaccaaaccactatcaagcagggatgtggaggagactaccatcctggtaccagagacactcaactgaaatcttgactcagccactccctatgtgaccttgggaacattacttaacctctctgagcttcagttttctgttacatttatttgttcagcagatattagtcaagtgcctgctgtatgccaggaaatctgctaggtgctagggacagaacagacatggcctctgttctcatggagtttgctatctacatgttaactaagtaatgatataattgatcaattaattatggaaaatcattaattatggcaaaatatgtggtgctcagaaagtatatgatgggggagggattattctatttctgtaaagatcctcgaggaagcagcacttggatcgggacctaaaggctgagggcgagggggcagtcaggcccaacgagatagggaagaagtttccagaaagagaaaataacactttcaaaggccctggagcaaggcaatgcttagtgaatcggaagagctgggaggaggccagggtggctgcagatagtagggacagagagactggcatgaggcaaggccctgtaaggtccttgtgagtcatcgggtattccactttatcctgagtgacaatgggggttattgatggttccaacagagagagtggtgtaatcaggcccatggtttcccgtattactctggcctctgtgaagaatggacagaggctgcaaagcaacctacagattcaatgtaatctgtatcaaaatacccgtgtcatttttcacagaaatagaaaaaacaatcctaaaattcataaggaacaacaaaaaagcctgaaaagccaaagcaatcttgagcaaaaagaacaaagctggaagcatcattctacctggcttcaaaatatattacaaggctataataaccaaaacaggatggtattagtataaaaacagacacagaccaatgaaacagaatagagagtccagaaataaattcatatacttacagccaactgattttcagcaaaggcaccaagaacatgcattaggggaaggacgcttgcttcaatagtgctgggaaaactggataaccatatgcagaaaaatgaaactaaacacccatctctcaccatatacaaaaatcaacttaaaatgaattagagacctaaacttaagaccccaaactataaaactactggaagaaaacttaggggagttattccaggagattggtctaggcaaagattttatggctaagacctcaaaagcacaggcaacaaaaacacaaatagacaaatgggactatattaaactaaaaagcttctacacagaaaaagaaaccatcaacaaagtgaaaagacgacctgttaaagacgagaaaatatttgcaagctattcatctgagaggggactaatgtccagaatgtacaagtaactcaaacaactcaacagcaaaaaaataataataataacaatcccattaaaaagtgagctaaggacatgaatagacatttttcaaaagaagacattaaaatggcaaacaggtatatgaaaaaatgttcaacatctctgatcatcagggaggtgcaagtcaaaatcacagtgaggtatcattttaccctagttagaatggctattattaaaaaagcaaaaaacaacagatgttggcaaagatatggagaaaagggagctcttatactttgttggtgggaatgtaaattagtacagccattatagaaaacagtatggagatttctcaaaagactaaaaatagaactaccatatgatcaagcaattccactactgagtatttatccaaaggaaaggaaatcaatgtatcaaagggatacctgcaccccatgtttactgaaacacaattcataacagcaaagatatggaatcaacacaagtgcacaccattagataaatgtataaagaaaatatggtatatgtaatatatatgtgtgtatgtggtatacacatacatggtggaatactactcagatgttaaaaaatgaaattagctaggtgcagtggcatgcgcccatagtcccagttacttgggaggctgaggcaagggatctcttgagcccaggagttcaagtccagcctgggcaatgtccagcacaactccatctctattttttttttttagaagagtgaaatcctgtcatctgcaggaacatgggtggaactggaggtcattatgctaagtaaaataaaccaggcagagaaagacaaatatcacctaacactcatacgaggagttaaaaaagtggatctcatagaggttgacagtagaatgattgatagttaccagaggctgggaaggctgtgtgtgtccaggattggaggatgtagggcatgaagagaggttggttaacaggtacaaatacacagttaggtcagtggtccccaaccttttttggcaccaggaaccaatttcatggaagacaatgtttccatggacaggaggtgggggatggtttcaggatgaaactgttccacctcagatcatcaggcattagataacttgctcaacactcacctcctgctgtgcagcccaggttctaacaggtcccggtccatggcctaggggttggggacccctgagttaggtagaaggacgaataaattctaatgttcaatagcagactatggtgactatagttaaaacaacaatgtatatttcaaaatagctaggagagagaacttgaaatgttcccaacacataaaagtgataaactcttgaggtgatggatgccctaaataccctgaatggatcattacacctactgtgttaggcttttcttgtattgctgtagagaaatgcctgagactaggtaatttatcaagaaaagaggtttaattgactcatggttccacaggctgtacaggaggcatggcattggcatctgctcagcttctggggaggcctcagggagcttttactcatggcggaaggtgaagtgggagcaggcacttcacatgaccagagcaagagcaagagagggagtgagggagaggtgccacacaattttaaacaatcagctctcgagatgactcactcactgtcacaaggacagcaccaagccatgaggcatccatccccatgacccacacacctcccaccaggccccacctccagtattggagattacatttcaacgtgagatttgggagggacattcaaactatatcacctactatgcatgtcaaaaaataacacgcataccccataaaaatgtacaaatattttataacaataaattttttaagggagtgctccaagataaagttctcaatgcaaaaaaaaagtatgtgagttgattgatatgctaattagcttgatttagtcattccacaatacatacatatatcaaaacatcacagtgtattccataaggacatacaattattgtcaattaaaaataaaatttaaaaaactgaaaaaccaaaagaatggatgggctggaggaggaaggaggcttggagaccaggagggggcttcatggctgtggttaacttggagtgtgacatggcttggggtacagcaatggcagtgatggcgggggacaggattgacagccacctagatggactgccagctgagtccctggctggatgtgggggtgtgggaggagttgaggatgtcccctgagcctctgccatgaggaagtgggtgaatagtgctgaccctccaagatgggaaagtctggaagaaggctaggcttctgggaggaaaggatgagagtgattttggttgggttgggtttgagagcaatgtggaatatctagttgggtttctaagactggaagtaggcagaaggctctggagtcattgtctttcccccaagacctgcttttcttctggaattctttgttgtccacctggatgtgcaggccagattaaatgagactatgtggaccaagggcctgattggagacttggccacacagagtggctgtgcctgctcctgagccactccctccccctctaatgtttctctttggcccctgcttactttccacctgagtgcccctcccttcccaccttctcttctttcaggtatctttgcttctgcctgctccatacaggtctgttcagtccccagccttctccactcctgtggtgggagcttccctctctgtcctgctgattccctgcctcacagtctctgggatcccaggcccataggtatccccatctgtttattccccaggatctcacactcagcatgggagtggggaagagcagggaggaagggccgtcacttcctgcagagctgcgtctcctctagcgtccctgtctctgctctctccttcaccatccattttctgttggagacttcaccctctcattcctccacagtctgcctcctaaatcccttcctgctgcttctctttcctccctgcctagttgcagctttgatgatgggaaaacctcttctccattctctgtctctgatctccccaccggcaaccttccctggccaccaaaccatatctttcatccattactatgggaccaaatcatctttctaaaataggtctggacttgtacttcctgctgaaaaccctcttctccacacctaccatgactcccctgcacctgcagaggaaagtccaaacacctcggcagtgctgtcaaggccttcccccaagcagcatgcccttccaggccttcttgcctctgagggcctgtttgctctgcctggaacccctctatttcttccccttccagcacactcctgtgcttttttgaaggttcgggctaaatgtccctttcttcaccatgatccctttccccagtacagtcaagactcagccattgtgcccagggcgaagacagttccacctggtgtagtgagggccagtgacaggactgttggggaccagtgggcccggtgcttgctcggaacaatattggcaaatctcccacttgttggctggctcctgtggcttatctccctggtaatgttcatggtgaatttatttacatcagaaggcgacaaactctgcctcagatgtcagacatcatagcctcctgccagagagatactcaaggcagaaatactgtgcaacttgataaaacaaatcaacagcaccactgaactggatttaaagccaagcaaggccaatcttgcctaccttccctcccttcctgctttctggggcctgggaagctgggttgagggtagcaaaggaggaagaggggaggagaacagaacctcagctcctctactcggcattcaaggaccttcgcagtccagctcttgccttcctgtccagcccagctctgtcatctctgcatgtccctttcagttcagacggtcctgcctaataagtccctaaacatgccacactccccaacttgaactgtccttgctgtttttctgcctaaaacaccctctcccctgaggcctaccaggcaggcaccctcagctgatgtatgctgccagctcagtgttggaaatgaagccagactctgactatgtctcactgttaccacctggtcttagccaccatcacctctcactggattattggggtagcttcaagaggcccccaccttgttcccttgccctctctggtctgctgtctacatggcatcccaagggatcctgttaatacacaaatgacatcatatcatcctcagctcagaaccctccactggcttctcaactcattccgagtaaaagtccacatccttacagcggcctctcaggccctcggaagccctgcctcccctgccactttcctccttcttcctgcattccagccctttgggtctctttttttttttttttttttttttgagacagattgtcgctcttattgccctggctggagtgcaatagcacaatctcggctcactgcaaactctacctcctgggttcaagcgattcttctgccttggcctcccgggtagctgggactacagatgtgcgccaccacacccagccaactttttttttttttttttgtatttttagtagagacagggtttcatcatgttggccaagctggtattgaactcctgacctcagttgatccgcccacctcggcctcccaaattgctgggattacaggcatgagccactgcgcccagtccttgggtctcttgatgctcttcaacggtgccaggcctctgcaccctggtgacctttgcatttgctgctctatcttccgtgaatgctcttcccccaggtaaccatgtgtcttcctctctcattccttcaagtcttggctcaaatgtcaacttctcagtggggtcttccctgaccaccctttctgaaatatccacacccccactcccaacaccagatagcccattttcctctgcacttaccagctcatttactatagagttaattatttatcttggagttgtctttatccttctgaccagaatgtaagctctgggaggataggaatttttgttttattcacagctgaatccccagcacctagaacagtggctgacacatagtaggtgctcagttagcatttgttaaatgaatgaatgaataagtgaatgaatatattaacacaaattctgtctcttccataaagcccttcctaactatgtgctatcactgcgccttgagcatccccatcataactattctgtgttgccattgctggcttgcctgcccacctcctccctcagaagcatttgaaggcagagaggaaatcaagcttttcacattgtagtgctggccctacccagtatttggcccacagtaggtgctcagttaatgggtataggagggaaaccttcataagcacctactctgggagagtaggtgtatatcttacatttctgcactcatagaaacttagaagttagcattgagaaatgctatgagttggctcatgattctcttgaccctgtaaagaacattagtaagaatagttcagagctgctaaacaagatcacttttatctctagcccagatggctcctatatatctgttaatctgatctcaccattggaggccccacagacatacccacttctgcgtgtccaaaactgaactcctggttgccttccataccacaaggagctcccttcctgggttttctgcctcaggaaatagcacctttcatccatccagatgcttataccagcaacctggattttatacctcctagttgctgaattctggagattctgcttcctaaatatctctcaaataagtcctctcccaccctccacacgaccttagctcgatctcatccagcctcacctggactgtggtggttttggtgataccaagagcatcccatgcgcttccctgactcagacctcctttataccatagccagtgttctttctaaaatgcaagtttaatcacatttcttcactgcctttgatccttaagatgaagtagaaggaaaaaggagaatctagcattagcatctacccacatgtcagtcactggctaatgctagttactgtcacattaactatctaattcagttatcacaacagagaagcaaactgagccttaaaaaaaataaatttcccaaagttatgcaggtggctgggaaattgtggagtctaaattcaaatctagaccttccttaccctaaaatccatttcctttccaatgcactcccctgtctccaaatctttttggctcagtgttctctgccatgtgacttctcctacatgccattactatcttatattattcatcttttttaccctgtgatgagtcatctagagctgtttatcttagacatgccttgcacgttcatatgtctctgcttatgaccatttggttccttcttccctgaaatgtccttccccctcttctccatctagtgaactcctactcattcatcaaaacccagctctaatgacacttcctctgttaggcttctcagatggacttgtccaaacaaagtcatttgctgctttatctatgtccacaaactgtgaattgtactcttgggagacagaaggatgtattgcaggtatagcccatggtgagtgctagggcttgaaaaccagactactcatgtaagcctcttctctctgtgcccacagctgatgatgcctgtggtgggaccctgcggggccagagtggcatcatctccagcccccacttcccctcggagtaccataacaatgccgactgcacatggaccatcctggctgagctgggggacaccatcgccctggtgtttattgacttccagctggaggatggttacgactttctggaagtcactgggacagaaggctcctccctctggtaagcacaacatcaccttcctttcctaccctattctctgcaactgtgaattactgggatgcttgcagtctcctcagtgcctggacctgcagccagaggcctcttagccacttccttatacctactgttagagtcctttcatctcatcctaatgaaaaagcactgcatatttttagagctggggtaatttttatagtgattttgatatctgatttgaaacatgttcttgctgaagatttttatgatgggtcttggttgaataacttgcattaagactaaaaatgttctggtctcaggatgtggacagggtctagtaaaatgattcaaaatattgttccatttctggaagacatatgcatagcatccaaaaagggactagaaccataagtgaccattgctgagactagaacatttttagtcttaattcttcccactccaagggtcctgatacatcagaaaggcattatgtcccagtgtctgaagggtaggacttactttctccctcttgttctggctttgctaaaaaagtgcaggctcttctgtagtgtgcttcatggagagtctcagttgttgatgggttagggaggatatgagttattgaagccatcgttgcttatcccagacttgggcttgcaggatgtgctcaaattgaggatggcttgaggaagtatctggctttctgtttgggtgagaagcatcacaagtggtattgtggcatttggaacactctcttgtattctcattgtggctgtgttatcaggaggacttttgttagcacatgaggagccaatagaaggatatgtccaggtgtacttcaagcaaggatggggcatcgttggagccttagttgctgcatagtgtcaggtgaaggtggggattccacttcctgatgtcaggcaggagtcacggcgttggctaccagggggtgccgcagtgggaatagcgttctggtggaggccctgggtgcggggctgggcccggccaggtctggcggggctgtgctccaggagtggatggacggagggcataggggtgggaggaggtgtcactgaggattctgagcggagcagaaagtgggtgtctgcaagagtcagagaagacagagacgtggcagtcagtgggagtagggaggaggaagatgggaaggagaggagaaaaggaggggaatggggcacgtttattgcacaccttccctgtgccaggtttcatggcggtaggaacaccagttgagtgagacatggttttttaaggagctcattgtctatctatctgttaggtaagaaaatcagacaaacccatggtaggagccaagtgtgactattaaatatttaagagggataaagggggaatggattcttcccaagtataggctcagatttgggaactagcataagcagaaaactcaagtttcctggtgcagtggaaggtgagccgacatgggagtcagaagaccctggtgtcaccatgagcttctcacaggaagctggccaggtcatttcctaccctggtcagagggctgagagaagcacaggtgagtgaggacaacctgctctgtggaggatgacattctataaactagtccaagaggaaaagctggtgattttaagctaggagttgggttgaaggttaaggtgagtcttcactcaactggaatcctgatgatctgcgcagtgtgaagacccttggacctctgcctcttttgtaaaatacctgtttactgactgtaagtgtaatgcatatgctccttgtagaaaacatggaaaatctacaaaggtatggaaaaattaaaattattacaattttgatgtactcccctttgaccttttttcttggcctagattaagctagctggctatttatatatatttaatatgaccaaattaggatctaaaaatatctgtagttatatatttttagctaattattgtgtcatgaaatgttttcctgtaccatcacagatgcctccaaaatatacaaggtctgataataatatcatttgttgaccctttactaccaatatgtgccagacaggttataagctctttagagctataatttcatttcatcttcataaaaattatatgaagtaagtagcatagttttcctccttttacagaagaggaaaatgaggcccagagaggttatactacctgcttgagatcacaccggcgagtaaggagcagagctgggattcaaccccaggttaatctgatactaaaggctgtcttccaagccatgacagcatgctattatgacatgcgatatctgtgatgagttttccgggctatgtagcattcccttgtaagactgtagcatagtttactcatcagacctcttgttaggtggttcccaagttttcacttctataaacaggtgccaagacgaatacccttgccagttccctgtcttccagtcccaaggccttttcgactcacttgtttatccatgggccaaatggtctcctacagcttctgccctccaggtgtgagtctacacgttgtccaaacttttggagtgaaacaaatctgaaagagttccttttcctattaagtcactcagtggggaaggaattaagcagaggaaattattaggggagtcactcagaactctttgctataagattacattataattatttacagggttggtgtcaccactgccaggatggatgcatttgttgttctaatttatacttgcatagcaattatggataaacaaacttggagactcaggacgtatgtgtgggaagaatcagctctctcccttgcccctctcctttatggatccctggattcctgtaaaaatttgatgctgctggtttatgagtatactgcttttgtaagcatacattaagatttcaggatgttctcttgcattctgtgccaaggcatagaaaaacaacagatcctgttagcaaagatggatttggacaactgggcacccccttcacctatcaagaagacaagaattcctttgagagaaaaaaaaaatccactacctcccttaccagataacaagttcccactgattcagaagggagagtggcatgcaatgtccctgactcagtttccacactcttcccctccccctaaacgggatagcaacaaattagggcttctggactagtaaaatttccaaacaattggagaaacataggattggtcattttttattttgccaagtaaggatgttagaagaaaacctgccaactcctcagaatattattcataaaacaaaggacaattcaaagccaaaactgtggcaggaaataatcaattggaagtgttgtcctgacatcatgaaagataaggtgcggggagcacacataaataacagtatgtgcccatcactggagtggccaacagtatacatgcagcaatcagtgggccagttctccctgttttgctggtcccggtccagcctttgggaatccaacaatacatgttttgaacaggaaaaagctgttactgtggtgagcactgaaccctgtagctctgacatgttgagctattccctagtattttagacttactccccctaaaagttaattgcatttttgtgtgtgtgaccatgagcaaaagctgggcttggactgactgagggttacaacccacagagaagaattggtattacaccctgactacacatacatgtgtgcagccctcacccaacatacacacaaacacacacacacacacacacacacactgccaaatcgtctctgacacatacctttccaagtcactgccaaattcacatcaccaagtcatccctcacccccagaccaccttaagcacatgtacacacctgtccccccttacacacagttccatttccagttcaatgtaggagccagactttctctcactgaccctgctggagtgtgggggtggtgggttttctttctctgctctgctctgacccagtcacttggctctgaccatcatggagctccattcctttccatcacgttctaagaaaacactctcacctttgataagcttcctcatgaagccccaggactttttcaaaggactgggactggggatacagaagacccttttaacaatatggggatgtaggtccctgaaggatatcaggatcacgttatactgagtagaagtgatctccagcccatcacagaactgacctctccattggttgagaaaatcagcaaagtgaagccccctgagaagccactagatccagaatctgtctcctctttcctctgtctcatacccaacactctccatctgagtctctccagaaccatccccagattaaaagagaggagggaaagccagacatcctctcctagaatataggagaggaagtttgtgcagtttctctggaattagatatcgagcctgcaccatggcatcgaactgggaagggggtaggcttgggagtcagcagagacacttgggctcaaaaccagccacctctcagtagttgtgtcatcttaggatatttaccagcttttctgagcctgtttccacatctgaaaaatgggtctcagtataccaacctacaaaacactttgagagggtgaaacgtggcaactgctgcctggctcaccataagtacaatactcctggaatgaggctttgagaggaaaagagtaagatggagcaaccccagcaattcagagcctcgttggccctatttttggtggtcccactgaagccaacatatgagctttccagcccagtggcatctcaccagcagaaaggcacagcctggctgccctgactctatctagcctcaaggggaattgcctggaaactcagataaggttagtgtggggagagtctctgggtgagactggaggatgtccttgcaaaagttagaagaggggacagtgattttgttggaactatcttcccagagctgcacttggcaagcacattatggatagcatcacttctgttcctggatctagccccacactggccagttagctgctttgttaagcagaagagggccggatgcagtgactcacacctgtaatcccaagactttgggaggctgaggtgggtggatcacttgagtctaggagttcaagatgagcctgggcaacatggagacacctgtctctacaaaaaatacaaaaattagacggatgtggtggcacacacctgtagtcgctgctactcaggaggctgaggtgggaggatcacctgagccctggaggtagaggctgcagtgagctgagattgtgccactgtactccagcccgggagacagagtaagaaagactctgtctaaaaagcaaaaagaaaaagaaaagcagaagaggattctaccaattcagctaccactaagagctctgtgcaggactaggaaagcagaggtactccacagtgagtcaggcacagcccctgtactggggtgctcacagagtaggggggcagggaccataagtatggagaaggcattcaggagacaactaccagagatgggaggggcatctctgcttgtgccccctcgctctctctggaccatgtggttggagggttctattgggccttcttctctccttctttcctctacccctccccaaggggcaaattcttcctacaacagggaaggcagacagagtctgacctgcactcagaattgaagccactcttgtcttgggggccagtggaagtgccagcctcaggagtgtgtgtgggggggtgtatgatgcgggggtcgtccaaagctcctttccacccgtgggatttctgtgtagatcctggaacaaacctctgcccctccaatttccttggctgtgactctgtgggttagttttggccagtggttcccagtctctcttccttgccctggccactgtatattgattttctttttttatctatttcactcggatcaccctggatgggctctgcctgcccattctctatgtccccacactcccaggcccagtccccacaaaactgtgtgctaataaactccaccaaacattcaaagtaggaagagaaaggagagcaccttccagggctcagaggaggacactgtcctggggcaggagaccaaggcctcaaggcagaggctgcacttgagacaggtcgagaaggatgcataccattttaatataggagatgaggtggtgggaagcgcattcttctagggcttctgcctagtcctcctggccaaagtgtgggagttccttgatccctgggacacagtccaagaagaaatagtcccagaaattctctaaggaagatgctgtccagcatgcacccaccccggggctctggcatctacctttgagcctaggcatctccctccacctgcagaagaataggatgcctgctctatctgtctggacttcccagatcctggccctgtggccactgggtagactttggctgtttttggaaagagaatttccctgggaagcaggctcaacctactctctaggtccagcaagtaacccttttgagtttcaacattaaatttccttaatttcatccctccttttcatgtccttagagctttgacggatttgcttcacttcattcccttcattcatttgcttttgtttttgtaggtggcgatacaaaaactgtctactctgcagacgttcactttgaaaattttgctagcaacactctttctcctcttgaatgatcttgctttaattattaggcattttacccatggaatttgagccaactagaaccatttgatctcagtgacgtttaactagatatctcatttaagagccattagatccagatatagttagaatgagaattgcacgccaatggagatttgttaataataactatccacttatttatttattcacatatgctttatcaaaccattggtttagctcattcatgttctttgttacttttcccctatttattttctgtaatcatttattgagactcttctatgaacgaggctctcctaggtgctagagggacaaagccacagtctgggttcctaaggagttatttattccttccacaaatgtttatgtaatagccaagcactgtgctggaccctgaagctcacagtcggggcaaagaggcagaatataattaaatgctttgcaatatcatgtgttaggtgcttttctaagaggtataaagaagttcccctaggaaataaggagaaatgtaatagccaggattctttgggtttaagaaatagaaacccacctccagctaactcacgctacaaagggaatgtgctggcctctttaactgaaaagtccagaacttgacttcaggcagtgctggatcaaggtatgcaaataatgtttctccccatcccaaggctttgctctcttgtgtgttagtttcattctcaggcaggctttcccaagaggtggcaaaggggaccaccctcagctccctataacctacctctcttggcaatcccagcagaaagggagcatatctttcctaatgggtcctacaaaagccctcggataaaccttggtggaccagcctgagtcatgtgcccacccctcaataccagtgtagccaagggatgtcctcattggctggatccagatcatgtgactgtctgccctccccaaaactcaggctgggagtggaagccctggcaagacaaaaactaagactgtccttgaaacaagtcatcaaccttcctgtaagagggcggtgatgctggaagggctcggaaaaattagtcccacaggatgatttttgagttgaactgaggggtaagattttgccattggcatggagccgaaaagagccctggtgcatttggggcattgcaagtcaggtgcagggagcaagagaggaagtgcaggatatgaggcccaaaatgaacacaggaggagcatggaccaggagcaagaaccctgccccttgttcataagccagagaggattccataagctgtggaaagctattaagagactttaagcagggaagtaaaataatcattctgaattttaagtgggttaaacaggaaggcccagaaatcagctataaaactttttttgtgactctgcaggcaagagaatccagccttgaactgaggcagctatgaaggggtagagaggaggaggggctgatgattatcaagttctggctgaatgactatggtggggccatgtattgaagagaggaacacaggagaagaagtgggctggggtggagtggggaatggcaatgcccattggtctctccagcacaaaatgagcaccaatagggaagtcaaggctgcaagaaggaagaagataaggctggatgtgctgggacacagctgcccttggttacgaattcacagtcattgggataagactggtgaaggtggtcagataaaatcaacagctacacctgaaagcttggtgttcaataccctggcaggaccatgagcggtcatcttcacaatgagcaccagcatcgtctttcatagggaaaatctccttcattatggtcactgtcatcttaccatttcatcttcattaccagcatctctccatcatcattcaatcattcaaacaaactactcaggcccttctcctgcttgacattgaacttggcactgggaatgcaatggtggagaagacaaggcctctgcctttgtggaacttacggtctatttgggggagactgaagttagtaaaatattcaaacataaatgtagaaagtatgacacatgtcataaaggaaatgaacaggatggggaataacagcagtggggaccctattctaaatctgacctctctgaggagggtaggatttaagctgagacctgacttttgagaaggagccacaggggaagaactcaggtggcagctttccaggcagagggagctgcacatgtaaaggcttatcatctcaatgtcctatttgctcctgaacttcgtacatggaggtagcataggcctggtacctgtcctctgaggtttcctctttgaatgtcaggagcaaggcagagtcaaggtctcaagctagcagagacactcagaaaacagctcagatggtgcatgactaaggatgctgaacccatgttggctgagctggtaagcgaataaggcccattctaaccgagcctcagacctcctgccttcctgtgggcttgtgacgcctttgcttctctctccttccttgacacatcacaactctttaagtcacactaagtaactgtccttttttgatggagcccatgaaattgcatctgctgtatccatcaggagccaagccataaataaccagccctttaaaatctcgtctcctgtatctcttggagttggaaatagcattacaagctctgccgcggagcagtaagaaaagattagtgccttagcatgctgctggcacaaatgtgtccggaggagtgaaggccagggctccagcactctacatggagtatcaatgtgacttccttgcttccactagtgagaacttgctctcaaaaagagaacaaaagtcacagctgggaggagcaggaagtgaactggtgttgtcgcagtgggcacagcggctctgctaaagcttgtgacttggcaaagttctgtgcatgggaagctgaggtcgggcagctggcctgccccccatgggtctgactgcatgcaacaggtttgtactaagtgcctcatctgcgaggcggcctgtgccaggactgtgaagggcaccagagaacaaaatgctgtcctcgacctctcttgaggagctgccagatgcctgatggtgccgctaagacagatggaaggagttgttctgggtcctccagagccccttgttctggcaagacctgtcttctggaatgatgttgcttcattctgaatgttcaaggccccctcctggtctctgttttcatgtttggccatgaatgtttgttccactcactctcagcttaacctacatgttgtttcacgttggtttgcgtctctcctgctactgcaaccacttcccaggttcccaagactgacttaagtcttcagttctatcccttagtctgtacttttttcttttttacttttcttttttttttttttttttttttgagatggagtcttgctctgtcagccaggctggagtgcaatgtcacaatctcgctcactgcagcctccacctcccaggttcaagtgattctcttgtctcggcctcccgaatagctaggactacaggcacatgccaccatgcccagctaatttttgtatttttaggagagatggtgtttcaccatattggtcaggttggtctcaaactcctgacctcaggtgagccaccacgcccagcccagtctgtacttcttttcatcctagtttctctttatccagtggctgatgggtgacatccacagactcaccagagaggcaggattcacacaaaaaactagcaatgacagtccgatgaaatggcaaaatcaccatttcacatatggtgaaactcaacagttcaaattcacatatggtggatctcaacagtttgggtcatttggggagggagaaggcagagtttctttgaacaaaatgaggtggcttcatggacgaggtagatctctagcatccctgggaatttctcacccaagcttcttgaagagtggtctacactggctaccctcaagtcttctctccccattcattccttacctacttcactcccactcttcaaccctccagcctcctcctgaaatcactcacattaagatgatgatcaaagggccgggtgtggtggctctcacctgtaatcccagcaccttgggaggccgaggtgggcggatcacgaggtcaggagatcgagaccatcctggctaacagggtgaaaccccgtctctactaaaaatacaaaaaaaaaaaaaaattagctgggcgtggtggcagacgcctgtggtcccagctactcgggaggctgaggcaggagaatggcgcaaagccaggaggcagagtttgcagtgagccgagttcacgccactgcactccagcctgggcgacagagccagactccgtctcaaaaaaaaaaaaaaaaaaaaagataatcatcaaataaccaaccccacccctaccccattccaaagactaccacttccaattaccaatgccagaaggcgtttttcaggtctcaccttctggacatttctgcattactttacactgtcagtcattttctcctctgggggctctgctttctgcttgcctccatgccactctttctgattcttcttggatctctctggccattccttccgtgtctcctttgatgtccattccttcttgctgtactgctctgctcactccacacatctcccagggtagtcttacctgctctcaagatttcaggtactacctatttcctcccaaatatggctccctagcccagcctacccactgagccagtcaaactgtagagccagctacctgatggacatctccactttgatggaccaccaatatctccaacttaacttgtctcaattttgctcataattgacccataaaatcatcagtctgtgtcctttcctagtttatggtaccattccccacctagttatccagaaatctgggaatatccctatttaatccctctctctcaccagccacattcaattaattgctaagttctcccaatatactgtacctttccatcctttctaccactgcctgaattcagcccatcatcttttcttctttgagggatgtaatagcctccttactgatctcccagcatcttggcactgtccaattcatcctcctcactgctacgagaatggcttaattaaaatgcagatctgacatgctaagccccaggcaaaagctttcaatcatcttctgttgtctacagattaaaattcaatcccttgatagggcacacaaggcccatctggatctaacccttgcctaagtaaccaccccaggctcacatcttgccacttccttttttaaattttattaaccctaaaactcagtggtataacaccacaaagatttccttcttgctcatgttacagatttgtgatggaccagtgggagtggctctgatccacatcatcacacatgtgggtacccaggctcgagggggttgcaccatattctaaccacaccatctgaaatatgtggccttctttaataccatgacagggaaaatgagtggagaatccagcatggctttccaccactctagctcagatatgctatacataatttccaactcatatttcattggccacaaacagtcacacagtccagctttgctgcaagggagccaggaaacggggatgagcagatgagatgcttggtgagccgagttctctgccacacctcatgcttctgtagacaagatgccgtggttcctgtcaaaggccagccctctcctgtactccagagctcatcttcctccaaaatttccctactatatgtatctccttttccttgcattccacaattgttctctctattgagcacttctaacaccataaaggcatgttccaatatctgccacctaaaatcaaaataaaaacagcacccatcaaacccctattactccatcccactcagctaccacggaatggctcagccactgccaattgctgagacagttctttctcagtttctgccctgctttgtcactaaaactgaccttgctaaaattgacagcaacctccaggttgcccattccagtgtcgtttctccatcttcatctgactcagcctcttggcaacacatgacactgatcaccagtccttcttgaactatttccttctcttggctcctatgaaaccatgtagctggttaccctatggccattccttcttagtctgttttgctgtttcttccaacgtccactctctgtccagcctttatgcttggactacccagagggtcctgggactctcctctcttttattctctttcccagctagccccaacaaatcacacatgggctttcaatatcatctagatgccagtggctcttgatttaaattttcagtcctcaagggtcttctgggcttcatgcatattaacaggaatcttaaaatgaacatatcgctgggcacagtggcatgtgcctctagtttcagctacttaggagactgaggtgggaggactgcttgagctcaggagttcaagaccagcttgagcaacatagggagaccctgtctcttaaaaaaaaaaacggaaaaatatatataacataaaacctatcggctggacacggtggctcatgcctgtaatcccagcactttgggaggccgaggcgggcagatgatgaggtcaggagattgagaccatcctggctaacacggtgaaaccccatgtctattaaaaatacaaaatattagctgggtatggtggtgggcgactgtagtcctagctactcaggagaatggcatgaacccaggaggtggagcttgcagtgagatcgtgccactgcactccagcctgggcggcagagcaagactccatctcaaaaaacaaaacaaaacaaaacaaacaaaaaaacctatcattccatttttaggtgtacaacttagtagcattaagcacattggctatttagtggtggataacaccactatctatctctagtaccttttttgccttcccaaatggaactccatgcccattaaagaagaatacccagaatagtcagattcataggcagaaaatggaacagtagcgacaaggagatgggccgtcatttctttttaaggctgaataatattcccttgtatgtctaaaccacattttgtttatccattgatctgttgatggacatttgggttgtttccatccagtttggacttctcatcccctccccactcataatctgttctcttagccttctccacgacctcccacatctgttttcctaagaggaagctgcttctgcccatttggttccgccagcacctttgggctgctcgggggccttgtctccctgcttctacccctctgtaatccattctgcagatggcacctagagtgacttgggtttattaatcaaatcatgtctcccctgtttaaagcctcccaatggcttactatcacatttagaataaaatcctacaagaccctacattgtccagccactgcctacctgtctgacttccctcctatccctcactcacacccattctctgtgctcttcatcctgtccctagggtgggctaagcaggttccctgctcgggcttctgcactagctgttcccagggcttaggatcctcctccttcacagtcttcaaatcttccttccaagttaaaaaaacaaaaaacaaaaaccactgtttttttgaaatatagagttcaatgtaaatttcctatctttagaaaagactttcccgtccatgcagcctaaagtaacccttgctgtctatcagaggatcttgttttattttaaacattcatcaatacctgatattttcttgcttacttacgtatttctttttcttctgtgcccttcccctcccctgccattgccagcagaaccgtgacaagcccctaatgtgcatcttggcacttagtaggtatccaaggttggtttgtttggaggagagatctgcttctgccttgccagttacaatgtcctgtggctaattgcaaaggttaacatggagcctctccaccaagtattttaagtaataaccttcctgggggacatttgcaaattagcactgactcttgctgattactcatcctaaactcagtctgattaataattaatcagcaaactgcttggccagagcgggctgatcagtgctagaaaggatcttaaattatgcaagtcacttggccagtctttaaaaaaaaaaaaaagctcagcagtcgacaacagaactggagaggtttgattgcaatgtgagatctctctcagttgtttgttttttcctttttggcttttttttcttttgactaagaaatcaattaggctcaaacttgcaacctcagagagagactgtgtagcacagaaatagaaatgtgttaaatatcactttctttttgtttctttccttccagagagttttggtctgtgaggcagaggttaaaattagccaatttgctaagcaaatgcctgtctggcacttgatgtcaatttctgcagccacgtcagtttcagctattcactcacttcctctgagctgcagtgccctgtgtctggcaggaaggaggtgagagatttgatgggtactgtctgcttgcccaccctggggttggggtgaaatcaatttgccagcaacctgtcccaccaggagtccatatagtgctctatgtctctggcctacaaaacccagagagacaggaggaaaggcaatcagagggtgatgaacaggcttcccactctcaggagtgaacttggggaccgccagggacccctcttaagccttatctgtagcctccagcctccagagccagtcctgcatgtggctttatctttcttctctagatacctcttctggtcactggagatatggctgagggggatacttagcgaaagctgaggggtttgtggacattaatctccgggccagaaaaaaaggtgcagggataaagggtttagtgcagtccatgcaactcggatcctgattagaaccagcagggtgacaaggtgattccccagaccaaataagtcagcatgcccagggagggacccaggcatcggtgatttttacagctcactgtggattcgtgtgcaccaaagaggagaaacatgatgtgatagagcatgagaggcttttgggaaagagattatgaaggacatcaaagagtgaagtagaaaatgggcttttcaggagttgattgtctttctggaaatagagggacatctctctatgttgtgtcaggcagggtaagggaagaagaggcagccagatggggcggtttccaggagccctgcagtttctgatccatctcagttacacccccaacttttaaaaaaaataccctgtgtttcctttaaaaaatgccctctaggacttatcctgtgtttctcaaactgggttgcactgaccaactccctgcttcagaagacttgcttgaatgctctttggaagaatgcagattcctgagccccacctctgtaaaatcatggattcctgagaatagaactcaactaattcagtatttttaaccattttcctgggtgttctgaaatagatttaagtttaagagttaccctgggcctaaatagaatactttccagagtgataatataaaggaagtagattctgcccattatgaaatgatttgtctttttatgaattgattcattattgaatttctccccagttatgtttgacgtataggtttggttatggcttatgcgtgagtttgggcaagcacatctattccataaaatgaagcacattgactcctagtaaactttatttatttatttcacaaatatttttccttgcctactctgtgccagtttctgtgataagctttgtgattacaatgctgaactaggaagtctcaacctttcaaggagctgctaaagtttagccttgaagtctagtctcacctccttgtctacctggtataagcctgtgcaagggtctccctcctgaaacctttagatgcattgggacctgtgccctccctcagccccacccacactgggcaaccccaggctcctacgacgcactggcacaagccaaacttttctagaatacagagtcctcctcccaacatgaactctttcagagcatggacttggcccatcatctctgaatcctcagggctcagtagagtcctggcacagacaggtgtaaagattttctgacaatttgttgaataaatatagcctctgagatcttagagtctcagcaccttctcacagccaaccgcatctcaccagcatcaaagggaaaagcatatggcacttggctcacctcgcctggtgtcagagccctttggcaacaggaccaatgtcaagataaataaacaggcaaatattcattgtttgcctctatgattgaattgaggccatcacatgtgtggaatgccatcttgccccattgggtcttcacccccaagtttgagttaggtattggcatacccatcttgcagataaagaaactgagcctcagagacttagcttcctcctcacctacacgtggttctccccagctgggttttcccattttgttccctctgcagatcctaggccagccactccaggatcatttctcacccttaaagtaggctttgatgcaatctgtcctctttgagtctctatctgccttcctcctgccttaatataccttcaacagtataatcactttgagagctaccatgtttcaggcactgtactaaggtttttatatgcatggtctcatttaatgtttacaaaactcttttttttttttttgagatggagttttgcccttgttgcccaggctggagtgcaatggcatgatctcagctcactgcaacctctgcctcccgggttcaagcaattctcctcaccttagcctccccagtagctgggattacaagtgcctgccaccacacctggctaatttatttgtatttttagtagagacaaggtttcaccatgttggccaggctggtcttgaactcctaacctcaggtgatccacctaccatggcctcccaaagtgttgggattacaggcgtgagccattgcgcccagccacaaaactcttgtaaaataataatattatcataaagagattaagaaacctgatgtaatatagctagtaagtgtccgagccagaaattggatccccatcatctggactctaaatcctgatctacccctctttctcttctgctcctctgggatctaattcattttctttcctgacaccaaggagggcaccatggagcatagatagcatttggactcaatgttgggttcaaataccaattctgctaccaactaatcgtgtgacctcagttaactttctgaccctctcaaggcctttcatacagttataagaaataattgggcacagaagactttgaacagccccagattcccagcttgtaaatccagcttgtgtccttcttctgccctttcatggttacagcacctggaagggctttcctcccctcctcccctgcccctctcaccctgctcccagagcctcccagcatatgctccgtgcagacagctacacacagcttctttcagaggtttaaggtcctgtgggtcttggcctctgcagttgataagtcagggaggcagcttcaggctgaccgaggcagaggccacagcaagaggttgtcatgtctccttgggccaggcagccctgaggtcccagggccatttggcagtaccctgaagggcacatggggaaagtcggggttgaacaataatggcttttactcttctctcacagcaagtcacttagctttctgaacttcagttgccctagttttataaggcaggtgatgggtcctcaccaccctcactgtaacctgctgggaacatgcagattggtgtacagagacctcctaatttttcacatataaatccaaccccacagattcccttccagtgggatctgcctcctaaggtgatttttctggaactgagagggttttaaggaagaaaatacaattactatgtgtagggtaccaacgacatgccaggagtctacactgatttttcctttgtgcctttaagcaactctgagaacccgagactcagtgaggtcatttacccaaggtcacagagctaggaagttgcagcctgaagccagggccctttgcctcccaacctctgctctttctgcccctctggattttggaggttggaaagagaccttgggtatcctggagagatggccctgggcctatgccattggcttcagcttcttccccctggggctgcttttgggccttgggctgtggttggttgatgtgggctggcttcacagatagccaggctcatcgaggccttggctcccacatcctgccagctccctagatgccagccctggtgagcgtgggacagactgccatcagcgttcccctttcaagagagccctgtcaatgcagataaatggcccgtgtcatttagccacatccgtcacgtccttctcgttgctggtctgtggcctgagttgtccagataacccttttcatttagtgttgtctttatggatgccacagaggtctccgggcaatgacagcccagcctttgcaccgaccaggaagagtcacaggcaggcctgcttcctgacttctgtttgctgtctgtttggctctcacaattattggaatctgtcaagctccatcaagtgacatttttcacatgagggcaagtgtccttcaggcctcactctgagctgggaatgacatcctggacgctgacgtggcctccatctttccaccagcggtttccttcacagttgccaagcttccttcagccctggctcaacagtgccctcctaagcttccccctcaatgccctcagtccctctttttgtaattaccctttccccagccccacattcccctggtgccttagcaagtaattaccttcatagggaagttgacaagtctctggcgactcctagccccggctggaaaagattcattattctgtgtctggaaataaccagccccatcagcacaggggctgagataacaccagtgtaaaagttctttattcagggggattaattaggattccttattaaagatccaattaggcaaaagggcatttttatctgtgatagtcagctgctcctatttttctaaagctgtaactcttaagtttttttaaaaaaggaaaaagcagggggttgtgtttttgtctaaaacaattcactctttcattgtcagctatgtcttcatcaggatgtgaaaatagattttctcattcaatttgcagtgctttatctcttcggagtctggcaatgactccacgatatcccttcaacaagaaccgcaactcagatgggctgttggggagtgggatgtttggttatcatgactgcaagagaaatagtaatagcattttttagcaacctgactccatgagctggcaggaaatgccatctctgccatgtaatgtctgtgtgaccttaggcaagtcccttcacctctctgaacctcaatgtcctcctctctcaatctaactccaaggatcaggataagggtttaattggggcaatattacaaagtgactaggaacccagggtcttgactgagaccaccttacacccacactcacaagccatgttgacttctgaaccttggtttcctcatctgcaaaatgggagggaaatacctcctccgtcgggtctctgggagaattgagggagataacatttgtggaaccaccttgcccatggagggcccttgatacatgtttatcaaacctgaatcaactcattttgtatttccctcaaagacgctcagtgaggttccctggagtgagctgttgccgctccccatctcaggtgaattgagctcattttgtccctggtagtgcctgggtgattccacagtacagtgaggctgagactcctggctctgttgtcacccggctgtgtcctcagttgctccccacggaagcagtgctggctgcaggaggggtgacctcttgacctcagtcatgatgtggacatacacagtatgaacccacaggtttttacttgcattgttaaagacagcagcagcagcttgtttaccccaggaaagaaagccctggagaaataaaataatctggcttccagaaagttcaacagaaagtgttttgtccagttgccagattccacagatgaggaaattgagtcccagcatcactcagcaaacatgtggcagagccagggcagaatcgaagctcttcatgtctgatccagatctgtttccaccaccttcaatgtttgctggccacctagcactgagccggcgtttgtagacttcacatgagagggtcacagcagcacctggctccagcaggatctgaatccacataaaccctacttcatgtggtgttcctcacctgtctgcctgtcctggctcctcattgcttgtgcctcagtgcctcagtttaccccatagaggagccactttagcttctggttcatcttctcacctttccacaatactgttttggcctgaataccctcttttacaggcttgccccctgtaaccctgccccctccaccacggcctctgtgaccttaccttctcctaccctccctcttattcccttccccagccacaatggcttccttgctggtccttagatgccacgcgtgctcttcccacctcagggcctttgcacgtgctttcccctctgcttggaatcctctccccctgagatatccacacatctgactccctcccctatttcaggtgccacctttaagatcatatgcacagtgaggccttccccaatcacctatttaaaatggcagatgcctcctcccagtcagtagagtgtctgcccatgtttgctccttctcagccagatcctcacacttcaaagtgtgcctagctcatagggagcctggaagttgggagttcaacccctcttcttggttccagtcctgaaagccctgttgctccacagccatcattctccttcgccagatgaagaaactgaggcacaggtgggtggcatgtgacttgccaaagtcacccagggagttagtgtcacaggagggactgctggggtaatcttaaaacaatggtaaaaatagttgtacttgtggggttatttatatctctctacctggtttgccctgaatcttggtgtgacctcaccaggtgatgtcctcaagcttcaccgaggcctccagtatgtggccatgtgtaagacccatgtcacagaaacaaatggtcctactgcaaaaatgtgctgatggaagagaacacagtctgtgctgagaaccaagaaatcctctccccctcgctactcccctccttaccctcctaccccctctgccaattcccccatcaaataattcctgataatgaagttaggatgattcattggttttctgatgagcatgaattcatcatcaaaatctacatatttcagtcccctgatatgtgctctcatattcctaacctgattaatatgtaaagtgctttatcctgtgacttaacaaaagaaaactcagcttggatttagggacctgcaagcctcccagactctggggttctgggaagcgtggggagatgccactgcttccgtcttggaggagatgacggtatctcatcagggactgggtcaaggtgccagcaggtgctacagttgagaggggagttggttgctcaggaccaggccctgggatgcctgagcactgcggcttcagacccctcatcccataacccagaaagacctggctgcaaagttgtttaatattcacaaccccacaaactcatgggggctgggaacagcctgcatcccatgcctagggacccggatgagatgcggcatccccctctcagcctttctggagggcggccagtgtagcctgccacctttctgccaaggccacttaagccatatccctgcaccaagtccccctgcctctccagagggcgggctcaagctctgcatgaatgcctcaagccgcgcttccccagccaccacccgtggggtggccctgctgctgctaaccttttgtcttacccatgattccctcaatataaggtccagcctcccaaacctctgtcacttcatccaccatacatccccatccgctctactaccaattttggcccacacctccttggactcagaccatttcccagtacccccatgtagggccaatccctgcctctttcacccctgacccacaaacccatacaccctgcaggcattcccaccaggtgctctgtgcctgtatcatgagaagctgtttgcctagagggctctaaggtcagatgtggattcaaagctctgctccgggatttggggaagctatttaacctctctgagcctcggtttctttagctttaaaacaatgctatcaggaataataatttatatttcttagggctgttgtcaatttcaaattagcattaagcagagaatctaacatacaacatgtaggtaacactcaataatgtagcgattattgatattcatcctcatggccactgactgaggtgggcaagaattacttcaatttttctgatgtggaagtggaagctcaaagatgttggggttggatgtggttgacaggagcaaagcagcacctcttctccacagaagtacctggggcatcttgggggaaaaggatttgggaccctgtggaagacaggatacctgagaggagacttgccctgcaggagatggggacccagtcagtgacccggatgccccaacaagacagaggtcccagaagagggctgctcctaggcatattatgtgtctgatgctggagttcttgcccctctggaaccagggtattttccaagtttgggttccccaaaagcaggcctgagacaagggttcaagcacaagtgttctattaggaagcacaggtgacactagcagataagagggacataatacagggaagagactgtagctaataaagggtggtcataccagctaccacaatgggggtctgggccataatcccacagggacactctaggaaacccaggtctgcagaacccagatcttagaattatcccacccaaggaatgagggagctgaggtatttatacaccaattcctgaaagtcattgaatgagggctgctcctgaggggttattaactccctagcccttccagcctgctgtgcacatgggcaaagtggcctagcattgggggaaaaaagccttcgagcacagggatgcagacactgggagcttgcagtcagctggcccactctgaaagatcgagtattacaggaaggacactggcaccacctgctacaggtgtacgtgtatcaaaaggcagtgttactgacagagctgtaacactgggggcctaggcagctctggagtgagacccagctcactaaaagtgacccttggaaggaccaccttcccttcagccttggggagccactgaaatttgagtgaatccacagaaacctgtggtgtaggcagtggtcctagcaagcaggcacagaaaaaaagaagaatccattatccaggtggccccattaacagtaatccccctgtccctgtcaccactgtcagacaacagctgtagaccccacatcgggatatgtttgatctcctgcccttctagcaggctgcagccagtgagcaagaggactgcctcaaagtccagtatcagccaccccagcatcctggaaaaaggcatggctgcctgctagcttggcaattaaccattgagatttggaaaatcagggctatgaaacttactttgtatagccacagaatggtaagttctgtggatttaggtcacacacacactcatacaaaccaattattcactggaatgcaagacagtctgctgtcaacattcaaatatttttggaaagtttgtatgtttctggctgtgctctgagtgaagtcgtgcttatttcacaagttgtaggctgggagatgaagtcacaaagagctcatgcatagctgagcaggaactcccacttggaggctttatttagatgtgccccagcattccctccatcgctctcttgaactgccaggagaagtttcagagctcagcctggggaggaagaaaagggctcagagttcagatacattcttctctatgtaggtgaaagctgctttgtgcttcacttccccatcctttcccctctcctatcctctgcctggaaggcccatgggaagaggccaggatctggactcagataaaccaagttccactgggcaatcttaggcaagtgactaatctttcagtgctcctagctgcaaaatagatagaatagtgccaaaaattgtgcttacgaggtaagtagcacagagcaagtactcaatgatagccactccccctcctttcttataagtaattttagctccctttctgttttaatttctttcccctcctcttccattcagattgtaccaggcagagctgtgacccagatgtttctagtgatgtgggaattggatggatgcaaagcatgatgatccattcacagtcataatcaagcatcatcaatttattatacagatactattatgctaggaaatcccattaatcatttttgataggataacatgaaccctttcaccagacctgtttgctcttgagcctgtctgcatttggtcattcacctcctacgaatgcactcaagttggtgctgagggcccagggatgcccagcctcactttctgcttcaaagtcacccaaccagactcagagggaaagagaaattattttactgaatttgcttacagcaaaaagtaagcagaactttaaaagaatagagagtattagtagcacaatttgcaattgcaaaaataagaaaccaacctaagtgcccatcaaccaatgagtggataaagaaaacgtggtatatgtaccccatggaatactactcagccataaaaaggaatgaaatagtgtcttttgcagcaacttggatggagctggaggccattattctaagaggagtagctcaggagtggaaaaccaaatgccgtatgttctcacttataagtgggagctaagctatgagggtgcaaaggcataagagtgatataatggactttggggacttggaggagaagattgagagggggttgaggggtaaaagactacatattgggtacagtatacactgctcaggtgatgggtggactaaaatctcagaaatcaccactaaagaacatgtccatgtaaccaaaaaccacctgtacacccaaaaactattgaaatgaaaaataaatcaataattttttttaagattaaaatttttaatcctatttttattttcaatttaaaatatccccccatatgaaattaaatatgtctgacatggtgtcctccagtttgccaaaagctaaatgactttaaatgcaaattatattttattgaaaaactcactagtgtatatactatagttgtcacaaatatacatatttgtgacaaaaaataaatttccattttttttttgatggtgtctttagggttttctttttattattattattattattattttactttaagttttagggtacatgtgcacaatgtgcaggttagttacatatgtatacatgcgccatgctagtgtgctgcacccattaactcgtcatttagcattaggtatatctcctaatgctatccctcccccctccccccaccccacaacagtccccagagtgtgatgttccccttcctgtgtccatgtgttctcagtgttcaatttccacctatgagtgagaacatgcagtgtttggttttttgtccttgcgatagtttactgggaatgatgatttccaatttcatccatgtccctacaaaggacatgaactcttcattttttatggctgcatagtattccatggtgtatatgtgccacattttcttaatccactctatcattgttggacacttgggttggttccaagtctttgctattgtgaataatgccgcaataaacatacgtgtgcatgtgtctttatagcagcatgatttttaatcctttgggtatatacccagtaatgagatggctgggtcaaatggtatttctagttctagatccctgaggaatcgccacactgacttccacagtggttgaactagtttacagtcccaccaacagtgtaaaagtgttcctatttctccacatcctctccagcacctgttgtttcctgactttttaatgattgccattctaactggtgtgagatggtatctcattgtggttttgatttgcatttctctgatggccagtgatggtgagcattttttcatgtgttttttggctgcataaatgtcttcttttgagaaatgtctgttcatgtccttcgcccactttttgatggggttgttttttttttcttgtaaatttgtttgagttcattgtagattctggatattagccctttgtcagatgagtaggttgcaaaaattttctcccgttttttaggttgctgttcactctgatggtagtttcttttgctgtgcagaagctctttagtttaattagatcccatttgtcaattctggcttttgttgccattgcttttggtgttttagacatgaagtctttgcccatgcctatgtcctgaatgataatgcctaggttttcttctagggtttttatggttttaggtctaacgtttatttaagtctttaatccatcttgaattaatttttgtataaggtgtaaggaagggatccagtttcagctttctgcatatggctagccagttttcccagtaccatttattaaatagggaatcctttccccattgcttgtttttctcaggtttgtcaaaaatcagatagttgtagatatgcagcgttatttctgagggctctgttctgttccattgatctatatctctgttttggtaccagtaccatgctgttttggttactgtagccttgtagtatagtttgaagtcaggtagcatgatgcctccagctttgttcttttggcttaggattgacttggcgatgcgggctgaaaaaaagagcccacaaaaaaaaatttaattttaaaagaataggcagggcacggtgtctcatgcctgtaatcccagcactttgggaggccaaggcaggcagatcacaaggtcaggagatcgagaccatcctggctaacatggtgaaaccccgtctctactaaaaatacaaaaaattagccaggcgtggtggcagacgcctttactcccagctacttgggaggctgaggcaggagaatggtgtgcacccgggaggcggagcttgcagtgagcaacgatcgctccactgcactccagcctgggtgacagagccagactccatctcaaaaaaaaaaaaaaaagaaagaaaaagaatatgtatattcttttatatatatttagatccccacaaaagcagacgagtattatattttttatttccattgtaaacataaagcatggtcattaaagaaaatttagaaaattgagaaaaactgaataaagaaactctatgcatgaacattttgattcatttctttctcttttttttataggtatggctttgtttttaaagagctgtgttcatagagtattgtgtgagtgtgtgtgtatgtgtttaagtatatacccactttttattatgagtaatttatactctttgtgaaaaattcaaagcatacctgagagtacagaataaaacgttaaagtcgtctatgtgttaaatccctaccctaattccactgtcttccctaagcattattaagttggtctattagcctaggcattacacacacacacgctggcgcatgcacacacacacacacacacacacacacacacaggataggaggtgaaacataaacatattattctacagcttgcttttattctcttaaatgtctacgttaaatatgtttcaatgtcagtatatatatatatgtcagcctcattttttttaacaatttccctaataattgcatttttcactatttcaaataatgttatagttaacatcatcatgaatatacctcagtgcacattggagcattaataggatagctttctttaaaatagaatttctgggtcaaagtatacattatttttaaatttagactctgctaaagtgtactccagaaagactgtgccaatttcatgtttccatcaaccatgtataacagtggctatttccctaactcttttccaaattaaagttttgtttttatccatctcagtgggtgaaaaacattcctccaattattagtgtagttagtaatctcttcatatgtccatggtcacttttattttctggattgcctgttcatattctctacccatttttctatcaggtcatgtttgtttttcctattcatttataggagctctttgtatatttttaacatgtattaaaatcaatatatgttgtaaaaaggttttatcaatcagtagcatgtcttttagccttactttgttgtctctcacagcataagttttattttgtgtgtgtgtgttgaaatcagttgatcttggccgggcgcagtggctcacgcctgtaatcccagcactttgggaggctaaggtgggcggatcacaaggtcaggagatggagactgtcctggctaacatggtgaaactccgtctctactaaaaatacaaaacaaaattagccgggcgtggtggcgggcgcctatagtcccagctactagggaggctgaggcaggagaatggcatgtacctgggaggcggagcttgcagtgagccgatattgcgccactgcactccagcctgggcgacagagggagactccatctcaacaacaacaacaacaacaacaacaacaaaaatcagttgatctcctgatttgatcacataaaacttctcagttttgtgtcttggttaggaataccttcctgcttggaaattatagaaatagtcttctctatttattctggaactctcagaatttttatattttacatttagctatttaatctgtgtgaattatatttttgtacgaggtttgagctatagatctagctttattttagttataaatgaataatgaattaactccaaacctgtcctttctgatttgaaatagtcctttcatcataaactgagttcagctctattcatggttctacaactggactttttcttctattttatttctctgttaatctatttctgtgtcataattgtatcatttgaattttgccatagctttgtaataatttttgttttctacccagaaaagacctccttcattattattactttgaaaatatttgttgacaattgttgtgcgtttacttttccagatgaattttagagtaaatttttcagatttcccccaaagaaatttcactgtgactttcgttgaaatttcactgaatttgtagattgatttggagagaattaaaatttttacagtaaatattcctatcctggacgatggtatgcctcttattttccaggccttttttaatgatcttgaataaaattttatagttttcatcacataagtctagtgaatttcttgttaggtttttttcctaggtccttttatagtttttattgttatagtgaatagggccatttgtcactgcattttttttctagttgcttattgctggtaaataagaaagctattgatttctgtacatttcttctgtaaccagccatcttactgaactctctcatcagccctaatagttttaaagttgattattttagattttctagattagacaatcatattagctgcaagtaatgtaattttatttcttctttcccacatggatgctttttttttggcttcttatatgactactgcctccagaattattatattaaagaggagtgataggtttggcagctctagaatttctgaataagagggacttaaaggcaagcatagcttttactaaattctatattacagatcaataaaaacagcaaaattagttctagagttttttctcccattatataacattaagaaattatgtgtttttcttattaagtagtgttattttttaaaaactctggagtgatttggaaggagctgatagaggttggagaggaaagttctctaaatggaaacccagtggttctgtaacaccatcgcttgatgaggctaagtacaattttgtatcctgattattctgcacttataacattagcattttctctgttattataaacccttgacctcaaaatattcattaagtggatatatcacagcttacttaaccattcctctttctgtgaacatttaggctgttcctcgttgtttatgttataaatattgctgcaaggaacatttttgtgtgcaaagcttttttttttctgaatttatgattatttctttaggagcaattcccagaatgaatattttttaagatacttgattcttattgccaaattgttttctaaaagcatttgatcattttacactgccacagtatgtgaatgtccgaggaaacagaccttttaaaattaaggattataaaatatgtcatagaagaaagagaacggactttggagtcaaagagatgggtttgaattctgattcctccactgaaaaatggtcgtatttaaataaatttaaaaaaaaaaacctctgagtctcagtgtccccctctgtaaaatgtgcagctaattcttcttcagtcatgctgaaggctgagtgagaacaaactagtgatggcactcagcacaaagtagctctaaacaaatgggagtcactttccctttatttggactgttttcagaggttttattttctaaacagctttggagacttcccctgaaaaacatgctgcaattaggaatgacttctgtcccttagccgaggcctgtctgccaaggggaaaccctttcctgcggctggctgctggccccagttgtaagctctgagatctgttatgcagaagaatttcccatcggctgcccactgtgccccacgctgtgtgcaggccacacatgaacctctgctctgtgctggggcagaggaacaagcagcactcagcattcccggtgaaaacagtggctgggggcttccagagaggccatcagcttctcccctgattccctaactggattcttcttttctgacattgcacagagcagggtggttgtcatctgctcccatctcttggttgccaagtcctgccagttctgcctcctaagtatctttccaatttttccctttctctgcaacaccagtacgcccgactttgtttaggtgctctcacacctggaacactgaagcagcctcctgcttgtctccagaatttctccctcctgcccatcctctattctggtccagtgtgacctttctaaaccaaatctggctgtgctgtttccttgctgaaaactctttgatggctcctgtcacccatggaatatagtccagagccttagctcagcatccagtatcctctagctatctgtctctcctaagttgtacattccactcatgcattcttttattcaggagacatttattaagtatcagcgaccataagaattgtattcactaacactttttgcaccctttctaggcactttggggccaggctaagcactcgatatgcataatctgtcttaacccttttaataaccctatgaggctggtattattttcattcccctttgacacatgaggaaattgagcccagaaagttaacctagcctgcccaagatggctcagctaggaagtaatagagccaagactttgtctcccaagcccatgctcttaaccactcaccagtcccaatttctttcatatatattaggcctgagaatacctattagactaaactggtggtatctttctccatacacatattttgtaagaaatatgggcacagaattcatactacttaaaaattatagagcttgctgccaaccagacactggcataggaatttggcagattcttctcctaagtgctccagggctgaccacaagattcctgccttgaaccccagatcccagaacccccattcctgcttcctcatgtggtgcccatgcttgggttagttataatttcccaggagggacccctgcgtttctctctggaccagccctatggggtatgtggtgggcactcaataactgcactgaattaaatcggattgaattgaaccaaattgaattcacaggcagatattctccagcagtggctgggtcttaagttcattgttgtcttaatcatcttgtggtagattgcattgcctcctccataagccaggctaagcacttaggtttttgagaatagtgtatcttaaggggtttccattcaagcagggtagctcttctgcataggccactggaaataggtctgagttgtgcgtgttctttgacgtagttttctgatatgtctcggaagtcaaacaatgtgggcttaagaatcacccgtactgcttacactgctgtgtgacctttggcaagctacttaaactctctggtctctggttcttcatctgtctgtcccaacaggatactgtgagaattaaaatgaggaatttaatgtgaactcttactatgcacaatgcatagtaacagaacacagcttttggcaataattataacagttgtttttctttccatgtctctcctgtccatgctgaattggacagtgagctggattgggagcagggacaataaggaaatgacagaggcagaaatcagaaagcatggtcttcagtggggcttggtcagcctagggctctggacaaagggggaattcttagcttctatgcctgggaaagtacctgaaggatatggaaaattgagagaggatgagcctggagagatagatggaggccagatgattcgtattttattctgaaggcaataggaaaccgctggaaggtttacagcaggggagtaacattatcagctttgcatttttgaaagaccaccctggctgctgctggagtacaggatggaaggatggatgcaggcacagacacaaactgctcattgttgcagttgcccaggtgagagatgatgaggcctgaattaacacagacagtattagtggagactgagaggagggagaggtttaacagacttaaaaacagcatcatttggttagcaatgcaattaacctgagggacaaagcgggaggaggaataagatggctgtcagcccttggtttgagtggccagtgtgtgggatggcaggaagtggcaaagggggtgatcatcttaagtttgaggtgcccctggggtgatggcatcttaagtttgaggtgcccctgggatgccagaggtagaaggatgtaaggatctaaagttttggggaggagtaaaggttgaaaatagatgtctgggagccatcagcttaggtgtgaggagagagcttacaacggggacacaacagggaaaaagggaggatgagaggacaagaggacaagcagaataaattagagtattaggacttcctgggagcctagactcatccactagagagggtgggcatggagttgattgcgctgacatccagcatgtcagggaaagccctgggaattccactgtgtgtccactgtgtgtctgctatggtcatgggaggccctctagcttcctgcctggcctagagagtccactgaattccagtctgttgcactggcccatgaaccccagccccgccctgcccagctcatcctccttctagggctgaccctctccttctaactccttctaagttatattgaagagccctggtcttcattggccattgccaatctcttccaagtccaaattccataataagagggaaggcttctatctgagagtgggcaaaagaaacatcttgaaagtggggccttgtttcccaattcaaggcatgtgtcccagggatcatatgggtctttgactgtagactccctgagaaggcttggagagttcccatatgtgttaaggccttctaacttcttggctccatggatacttctctgaactaaacaaatgaaagtgtctagatttcacactcacagactataactcggttgattaggagttgatccggaaatctacattttcaatactcaccctaggctatctcgatacaactagtcagagaccaccttggagaaatactgacttaaaaaaaaaaggcaactgtgaggggacctaacatctaacaaccatccacaatttgccctactattgacatttcatttagtccttactaaatgaggtgaggtaaatgtgtcatcatttattctagaggaaatcatctgaggctcggagatatttagcaacttgcccaactacacacagctggttgctggcagattcaaaattggaagcccaggtcttttttactccgcagcctaagacatataccaatatatcacctactgagaggaaaatggcccctgtttttgggtagctaaatgtccattctatggaagaaagtttaaataactgggagaaactgaaccaatgggtagttgcaggagtcaaaccttgactcagtgcaaagatctttgtaataaaatggaatagcttccttggggagaccattggaagagtcaaggaggggctggacaaacaccagcctccagctggtgtggtagagagaatttatgaagtaggctggagtacatgactctgaatccctttcaagcctgtgatgagtaagatatggagctttgataacttgattgcctgaatttggtgctcctgttggctctagactgcatccgtagccacgaagggaagaaaaggaggaagagaagggaaggaaagaaggaagaatggaaggaagaaaggaaagggggaagttagctagtaaattcagggtatgaggattgagaaaactatggatcctgaatcttccattctttattgagtaatttcttaactaggaaacaactgagaaagcatgctgtgacctcaaagagataggtacctccatttttctttatggatgattgaagtgtatgcccagtgttgacctctgcagtgaactcatggcattaatggggaatcctccttgaaccaaattttagagaaacaggcaagttttcacatgtgcccttatcactaatgccagcctaatgccctattctacaaaggattaacagtcaatagaaaggtagatatgtttcatttctctttggtctgaacattctcaagtgggaagagtcgtgacataggcagctttagagaaagtatgaaattacaaatgttgtccattgacagcctgtcctttgaagctgtctcattagaccatcagtcttcacctaagtcactttcagtcctccagactcaattacctctggccaccccactcccatctccccactgaagttctgccatagccccgtggataccagtactcacatttgcctccagttctccattcatagctgtttaatcttagacaagtcactgaacctcttagaacttcatgtcctgttggtgggattataaatggcacaacttttttggaaggtaattttcatggtaggaattaaaacgtgaaatgtggataccacttttagggatttataccaaggaactagggaatagtgagaggctggtgcaaaatgatatgtgcaaggatgttcactgcagcattatttattataatggggaaaaggaaacagtatatgtccaatattaatggttccataaactggcacctgtggctgatacaacacatggggattaaaattataatttcagaaactttcgaataaatttgaaaatgcttaatataggatattaagttaaaaaattaatatacaaaactgaatatgtagtttaaatacacagtactaatgcattttattatttatgttcttttgtatttctaagttttataataagcttatattactttctgcacacagaaaaacaagtaaaagttaaaatatattttgaaagctcccaccacctacaggattaggaacaaattttctaacagaagattttataatccgactccatcccaactcagctccttcattttctgtcacttcctccccatcatcttcagttccccacaccattccctcccttgcaccttgctttaactaccccacgctgcttggcattctgtaaacacaccataactatgcatactgccatgctgccatgccttcatgcttcctgctttccctagccaaaacgaccttccccacatttttcaagaactaattcaggcatctccacttcttccttgacagttaattatttcctgcccctttctcctacagaacagtttttatatacttaataattacttatttagtagctgttattctcattttacttttcttcaacatttgtgggaaccccaaggagggaagactgactgtctcagaggatcaggaaaggattcacagaggagggttgcaggaaaatgaataggagtttgtccactagacagaaagacaataaatgccctgacagaactccagaatgagttcccagcttgtatctatttctctcataactcttttctccctgcgtaatgtgttgcttatgggtacatgtctcttccctaccagcgaggtcattaagagcagaaaatgtgccttgtttgccttgtggtgtttagcacagtgcctgggcatcataaatatatttttgtcccagagcatgaaggtccaaaaataacaatacagtaattacctttctccttgtttcagggtgaatgggggaaaatcatattcttattgtcacttatcactggtttcaagtatgagcccagagatgctgaaaatgctttatattttgctaatttgaaccaaattgaagaagttgtccccttggtaggtcttaagaggatattctgcaaaatttgtactttctttgagtataagaattgtaccaatatgagctttgcttcccctttaaacagcatgccacaagaatgatgcctttgaaataaatcctgtttgagtaatgtttctcttggactcataaaatctttatggaaatcttttctcatctcatagactatgagaagaaagagagagccaaaaccactgagctgtaagtgaagagcgcagtcttttctcatatgtgggtcacactttaatgtaaatagtttttaaatgcaaatcccataccgactacacattagctcaaaaatcctagctctgtccaagtgctgaatctgtgagttaagatctcttaatctctgattaaagagtaggtggtatggaaatgtatccattcagatagaaagtttgaatgtattaaaagatccagtaatagccatactagggataagaacacaaatgctggcagaaataaaaacagctttatgtcctccctcaaaaagagagagagagagaagcagtaagttggcagagctgagctctcaacccagctatgcaaaggggcactgacttgggagccatacactcattcagcatacatttttggggtgcctggtatataataggcattatacaatgacattaaattagataaatcatcatttttggtctccatgaggtcacaatcagtgtttgctcatccactgactagctgttaactttgagcaatttacttaacctttcaagcttcaggtttttcattttaaaattttggataataggatcttactagattactgtgcagattaaataaggtaatgtttacaaagcactttgcatagaacttaacatattataaactctcaatgagtgttacatattagtatcaggtgtgatgcgctatgctaaattctttatattcatgctctcatttgttctctcatttgctctacacctgtcaccttgagtaggttttaattcaccctttacacggacaagaagaaggaggatcagaagaatgtggtttgctaacttgccaagttcatacagttagtagtgggaacagcattcaaagccagttctttcttcatctaaaaccaatgctcatgattatagtggtggtggttagagcaggaatgggggagagacaccaatgcttgctatcagccacccaatattgtaagacaaaatctcctaccctcatcaggactggcatttttgggaaggcaaagtctaagggaatgaggtggtcacatgactcaggtatttgtgtgactttcaggtcagggacatttgtgggttaatagatatggggaagataaatcccaacccttgggagagtaggcccaaagtccatccatccagaaacagtttcacaaaactgctagcccatgggggagcaagaaatgggaccagagattgaagcagaccaaccagacagatgggccacacttaagtggagtggttaatgatcaaggctgcagggattccagggactaaatccctggctcctgggatcttagtgggaggtggtggggaggacagcagactatttccagaatctactcgacaagtggaaaaggggctcataatgaatttcctgctggagacaattgtcactgggacagggcaggttgaccctgaatatgtgaccaagcaaaggctaagcaaaagctggcaccatagaagccaccaactcacacattccagttggaacctccagccgagagaactctttgattgtgttggtctgcatcctgtggcttagggacagtgggagttctgaactagtgaccacacattgttaccgcggtaagaagaatgtgctttttcttttcgttcaagagcttatgattcagtcctatggattcatataaatagatattctctttgctttactacctgtggcaaataggactacaaagcacaatagcaccctgtccccctccccagggctgtcccataaacagtgggagttatctgagttcccttgattgaaattggaaaggtcatatctcaatagtatctttagggcttgcttttcccatttgtgacaatcttggactgtcctcaggcctccctaaggtgtccttccagctctgaccttccaagggtgtctttcggacacagagagtttggccagccatcaagcaggtaaacagatcaatgagggctgttcactgaattgtgctcctgggcctctactactgctttcagcccttgctgccactgtcagatcaatgcggggagcagatggctgtgctgtgtcacaataatggctcctttgaagagactttgctcagtccttctcctgtaagctagggaggtgaggggcagctgcacccaacacctggcagctcaagggaggcccatgttggcttctaataaaagcagcgggggtgtctggaatggaccacatgtgggtctcccactcacctgtgatgctgtctgtccccgtcagaggggaagtgtggttgctcacatctcatgtacatctagcccatgtggtgctggcctcatcgtctactgaagctgaaggaaagcatgttgtgtccaaaagaaacaaagcaggattttcagcttgtttgcagtaacggcctcacgggatggctcctggcttaggaatcagagaatttgctgaacaaatacatgggcagaaagtgctgaaaagcaactctcagatattacatggtctattccccttctctctgcttggtcccaaatggtcactccagcccctgagtctgcctgaccttcaaatccaggaacccaactcccagtttccacatctcttaattcaaactatcaagagagagaatctgattggctccactcatcagtcgagtgtctccactccttgtccaatcagctgcagctagaaaggggcaagctcagcttgtaccagtatagctgcaggagcccctcccttcagcagcgcaatcctgaaaagagggcaggggcttggcagcaaccctgggcatatcttcgacattaacttaacatctctctcttctctgtggtctctctcagaaagtaatagggaaaagtattcttttcaatttgcccccttgagctacacaaaataatacagactaagggcctggcattcagtgaagagaacttgagagcaatttcggggtgcctttaccactacagtattgtcttgtctgcctttcacagtctgcaaaagggagctctgtaaataccagggattttgtgattattatgaatcctctaagcagctaaatttcccaaattctcagagttgtaatgcctcgggatttagagatataattaagaacagatgagcctcacaaaggttgatggtgaggatctgggattgcatcaagccacagagagaattttgctgtgagttccaggccctcatctcccccagtgcgacaagggggacaagtccagtgggacaaggactggagggggtgatggcacacaggacctctgttaacgagccattgggcccaggaatcctgacctctcattttcccagaacttgtgacacaatctataaacccactcaacaggttaggaagaggcaatgctgagtcagccctgggctgtgcgccatagccatcctgaacagctttctgccattacaggatagaataagaccagccaggtgtggcccatttcctctcagcagccatttgccttctgcccacacatcgatcttgccaaaagagggcttgtgctgcagcattgagtcattctcctaccctctttagtttatactcatttttcagggttttctctgactctactacttactgaaaggtgtagaaatactaataaggcaatactatgttttatttgatctatagactgcagcaacctgaatctatattatctgtcatgccaagaatgttttgaccttctaaaaggaaatgaatgctctccggaccagagccaagcaagcagcttagacccattcacaagcaaaagtctggggccttgagagttccagggcattaaatcaccatcagaataagactagggtcttgaagctcatgatctggagcacttagagtggacaaggagcaatgaccccacagctactatgacacatggtagagtgtgggtgctgcagccaggatgcctgagttctgctacttgatagctgtgtgacctcaagcaagtcgcctaacctctctgtgtctccatcttctcacctgcaagccacaggttataaagggttgctgtaatagatgagtaaatacatgcgagggacttagaacagtgcctggcgttcagtaaatactcagggcagcatctgtgtcccaagtggtacgtaagttctttatgccatgtcttctcattctattcccatatgaccctgagaaacagcttttggtgttgccattatacataagaataaagtgaatttctcatgttcgacaaattgcccagggccacatggctagtaagtagcaatgacagattcccaaggtagagatctctgactacaaatcctgtgttctatctcttgaccagttcccctcatggtcaggctggcttcccgtaattacaaactctcccctttagttccctctgttgtctcttgatgctcacttgactttcagggactctggaatctctgctgcttcccagctgtgagacaactaagaccaggcaatctgtctttgcctcaatttctttatttctgtaaactggcatagtaacagggcctgctgagaaggagaacagcagcccctgatggctgcaagctggcctggcactatcagtaaggccttttgctgccgagagctggcctggcacctacacctagaccttggggttctcctgttgaccataaacaatttcactgaatgtcaatgccggacaaaaccactctaggaccctgatagatgaagacaaaaacaagaccatttcaacatcatgaattcagacaaaaacaagaacattattcaaaatacaaagatgacttaacagcccccctccctccacctcttggctgatgtgagtgatggctgcttctttaccaattacaactcttatcttccttcattcctcctgccttgtaaataaaatttatgaagtacccaaccagagaattacacctacctccagtctccaatccagggcaaagctctgcttccttgaaccctcccccaattaactaacacaagcccgaatcctacagtgaattatttcttaccttcttactgagacactgcacagctccctgtggtgtgcattctccctcactgccaccagtcagcaaacccaactttgttcaactacagggaggtccatggtggtcattggccgggggctgacactgcctctagaattatacgtgatgatatctggagaacacttagaaatagggcttagtccatagtaaacgcccaaaacatgtcagtcatgagcatgacatttattataagaaatacccttcctctttggacagagctaaggagcatacatttgctctcactaaccagcccccttcttttctgaagtccatgcagttcccccgccccttatgtttgccctgggcactgaagcattctctttttgcatttcacagatcttcacactgcagacctcaaacctagaaaaatctgttttgcccatgacattggaggctgttgtctgccctgtctctgggatcccaatgaaggacatcctctcagggtatttagacagcatagaggggtgggagtgggggctagatgagcagtggactgatgatcaggccttggcggccctttcccacttcctggcagagtagatactttgcacatggaagttccctcacccacttgccagggctgtgcgggccagaggagcctggccagattcttcatcacaaatgtactcgcagctgcatcagtgagggacagccccagggaccacagagttcttccatgcccactgctgctaattagagataatacattaaaaatacagagccgcatctgttcgttgtaacatgggtatcgaggaatttacgtggtttataatgacagagtgtggggagaggaaaatgctgattctgtctgggagccagaggcacagctgtgggcgaagagctggaggtgtggtttctggtgcccatcaaactctctgggtgctaaccaagccctccctttgagacacccagggatagatccaggtacttatctggaaataccaagctaggtaacatgaccagtcaagcacaaagtggatgtccagatgcccaggaggccttctggcccacatgcaaaatacatgtcccttccacacacaaaatacaaatactctggtatttgcaaagagttcttgagagaagggagacacaggacagaagaaaaaacatgcttctcatgattcaattgttcattttccatcaaacatgaactgagcacctaacctgctgttcaagttgtctgtaaaatggggtgtttaaagtaccgctctcattgaatgtttttcttaagtaaaataattgcattaaatggcttcaaacagtacccaaatcatctaacacaagcccaaatcctgcaatgaattatttcttaccaggtatgatgtaggcattcaataaaagtgtgctattatcattctactccatgtgacgcattgtgttaaattttagagcactgtgatgaataaggcaagatcccttcccttctctaccagttgaggggacaaacagttgctataatgtgctgtgcattgggatggcattgtatgaacttacataagctattatgggaacacacaagggagttggagcatcaaagacagcttcctagaggaagggatacctgacctaagtctgtagaacaggttgaagtctaccagacctaaaaggtaggagagatgagaagtatgtgcaaaggccctggggaggagagagtgtaatgtttctggggaaaatgcagtgtagcccgaccttagggcaggtgcgttaggtgtctgttgctgtgtcacatattactccaaagcttagtggtttgaaacaacatttattagctcatattttctctgtgttaggaatgtaagcgtagcttaattgggttctctggcttagggtttctcataaggcttcaatcaaggtgtccactagggcggcagtcatctcaaagctcaactagaggggaggacaagcttccaagtttcttcacataattgtttgctggattcagttcctcagtgctattgaccagagacagccctcagttcttctccaaagggaagctttcaacccagctgcttcatcagagcaagccagagagtagagccagagagagaggataagacagaagtgacagtcttttataacctgatatgagaagtgacattctatcactttttctgtattctattctttagaagcaaatcactaggtccagcccacacacaaagggaggggactgcacaaggacatgaataccagaagagaaagaaatttagagtcatttctgaagctgcctatcacaatctaccctctggctctccaatgattcttgtcccttccacatgcagaatacatgtcccttccacacacaaaatgcaatcatccttcccaaggtctctaacatctcctcccgtgggagcaccaactgaaagtccaggatctcatcatctaaatcaggtgcaggtgtggatgaggctcttgggtataattccttaagtacaagttctagaatactgttactacagatttggtgatttgaaaagctaaggagataaattatctgccccccatatgcccaacatacaatggcaggttaggtatagaggaatggctataaacactgctactcaaagggaggaaaatgtgaggaacaaaggcgtcactggtccgtaacaattttgaaatccagccaggaaaagactgcaagtttcttggttaggtttcaaagcctggggataattctccatgactcttagctccaccttctaagctcttggttcttccctctgagtaatccttcctttttcatgaaaggaaacctgtgtttaaagctgacttgttttctcagcctgtttcctgctgagaattttaggggtccaatggcctcattttattttgtactgtctctgttcctttctgtcccagctgtgtttcttctcataggttttctcagaaaccttctgggtcttctgtaaattgcactgagattccctctattacacaaaaaaacaaacccacaaatttctttgagaactaaacttttcaacctgagcctcttgaaaagatggccaagggacagccccttggcttcctagagtccctattgtttgatctggaggatctatgaggcctaccctaatctctttaaagggcctttgtatgactgaataataccatgatcttttgatctttctgaagtcttaaccaaaggcccacagtcacacccacagctttatctcagaccaccatttcttgctcaaatgccatttcttaattttagcaccttttgctgacttgggagactgagaattttcaaaactatcaggtcctgtctcactttaacttttttttttctctcttctcacataagcagtaagaagaaattattttcaacactttgcttggacatctccatagctagatcactaagtttattaggtacatattttgctttccatgtaactgcagacaatagtggcactaagctttctaccactacctaacaaggatgtccctcctccatgatatggtttgcatgggtcccccaaatgtcatgtgctggaaagttaatccccaatatggtagtgttgaaaggtggggacttaaagaggtgattggatcatgagaaccctgtcttcatgaatgggttaatccatccatggattaatgggttatcacaagagtgggactggtggctttataagaacaggaagaggccaggcatgatggctcgtgccgtaatcccagcactttgggaggctgaggcaggtggatcaggagttcgagcccagcctggcaaacacggtgaaaccccatctctatgaaaaatacgaaaattagccagatgtggtggcacacacctgtagtcccagctacttgtgaggctgagacaggagaatcacttgaacccaggaggtgagggctgtagtgagccgagatcacgctactacactccagcctgggcaacagagcgagactccatctcaaaaacaaaacaaaagaagagagacctgagcaggcacatcaacatgctcagtcctctctgcagacagtcctcaccaataagaaggctctcaccagatgcagccctttgaccttggactcctcagcctctgtaactggtaactgtcaaataaatttcttttctttacaaattacccagctttagatattctgttacaggcaatagaaaatggacaaagacattctagtttccaataacatgttcatcacttcttttaagcccccaccagctgtatcctcaaagtccagatttctacagtgtcttcaattgtctttgaggcaattgaagatttctctaacaagcttctcagaatacttctcacctctgcccactgcctggttccaaagctatctcacatttttaggtatatgtcatgatactatccttctcttgatgccaaaatctgtactcatcatttcagtttgtaacaaattatctgaagccttagtgccatgaaacacctattagtttctatgggtcaagaatcaggtacagtttagctgagtccgtcacaaggctgcagtaaaggtgtccactggggctgcaggcatctcaaaggggagtgatccacttccaggcttacttacggttattggcagggttcagttccttgcaggctgtttgactgagggcctgagttcctcactgggtgttggccagaagccaccctctgttccttgccacatgagcctctccatagggcagctttcagcatgtcagtttgcttcaagtgagagagaagaggcagagagagcggtcacagcctttcatagcctaacatcagaagtgaaatcctatcactttggccaccaggtctagcccacactcaaagggaggggattacacagagtgtgaatttcaggagttggagatcactgggagccatttcagaaactgcctaccacggtgaatatcagggacagcacaactagcaatgccccagtggcctgattatgccatgtcagactcccataggtgatggacaaccactgaaatatttcaccgttgaaggggagacatagaaatgtcacccagcagcctgaacagagaaagcattggaaatgcagcactgggtagggagagctgttgcaatgcaactacctcaagggatggcctcataatgaaatgttcattgtgtcactggtaatccaacccagaggtcagggccaacctgaagggtcgtatcccctttgggccctgggccaagctttatctcctgcttgaagctatcttcttgtgtgctgctcttgccttttgaacccatcctttagagaccaaggcaggcaaccccattcctagggcactgcttatgcatcagatgccacttaacgatgatgtcccaggcatttcatttattccctagcacacctaaggggcaggtactgtttgatggaagtgtgacaagtggtcacatgataggacaaaggggcatcaatgcctttgtgacctcatcctggtgacctcaccccatccacagacctgacttcctatcttaaaggcccaggaattggacattttttgccctcaaataattgatattttagtggaagctaaaaccaagattcctatgctgctgtgtggcccggatgccagttgattgttttgcaactgataccaacttctctgttggaatttgagggaaacccaataaataaatatacttattcccctctcaagtgcagaatcaattggcagatgcaagagaaaaacagatgaggatcagcatgtcacctttattactgatgaactgattggagagctgtctgaatatgctctgcagctagggcgatggggagagagagaaagggagagtggggagggctaactgagcatggtctgctcctcctcccaaacccaccagccagatgagccatgcctcctacgcagagtgaatgaggggctacaagaaggagaatttgtctgtggtcctgggaccaggagcatcagtatcacctgggaactttcagaaatgcaaattatagatccaactcccagaaatactaaatcaaactctgggggtaaggcccggcaatctgtgttttaataagccctgcaggtgattctaacacaggcttaaagctgagaaccactggccttttgggagttgttccccacaaggcccaggaagaagtattcccctggaatattttgccacccgtgcccacccatttcctccatttcctgagaaaacatatcccagagataggattcacagttcccacatttggtttttagcttccagctgctccaaggaataccaagtggaggcttctcattatctcccttctttcctaagggaaaaaatgccatggatttggtgtcttctttcttgcaatcctttagaggggcagaggggtaatccccttgttggcacttgatagtctctgaagaccctagaatgatgagtaacacaaagtcagagatggaagcacgtggttctccactactgaaatctctctgtggctctcagttgcacttagatttccacataaaccccttgccaaggccttcacccttccaaacacatctcgcccatttgttcacacctccagttgctccggcctccctctgtccctctaatatgccaagctcgcttctgcaaggacctttgcacttgcttccctgctgcttggaggactcttctcttacaccttggcttgtctggctccttcttgccctttaaatccaaacccaaatgccagctccgcagaaaacttctgaccatccatttcaagtgccctctatcctatctatcatcatttatctcattacccacgtttattttctagtgagtactttaccctatcaaaaactgattcgatatatgtatttgtgttgtttgtttgtttgtttgtttgttaagatggagtctcactctgtcacccaggctggagtgcaatggtgcaatctgggctcgctgcaacctccacctcctgggttcaagcaattctcctgcctcagcctcctgagtagctgagattacaggcacgtgccaccacacctggctaatttttgtatttttagtagacatggggtttcaccatgttgatcaggctggtctcaaattcctgacctcatgaaacacccacctcggcctcccaaagtgctgggattacaggtatgagccaccgcgcctggcctatttgttgtttttttaattgtctgtctctcctcaccggaacgtgagagatgaggaaccttgttgtattcccagcaccagaatagttgctgttatattgcaggcataagatttatgtaaatatctgttgaatgaatgagtaagtaaattaatgactacatgaacacagaaaaacggttgaggagagaaggatcagagttgagtgattcagtcatcaagatggtgatgggcctgccttcctcttctcaaggacaggagcacctgaggccagctgagtgggcctggaatgctggcaccacaccagattgtccatctactttttctctcacccattatcttaggtccaggctcccccaacttctcctcctccttccctccctctctctccattgtcattacattacagtcattagaagccagcagattcagaccctcctattgtctttttcataaaggactgttaatggagttagttttcagcaggggaactgcaaactcttgtcaaaactctgacttggccacccacattcacataattaatcacacaggaaaccagaaaggggtggcatgagagctggggcctagctgtgtgggggccctcttcccagagaggagtgtggtacatcacacagctgctgcccaccaagagcccacatttcaggctggaaacaagacaacccaactggaactactactgggtaatacaaatcaggatctaattagcactggacggtgggaggtggccctccaccttcaagatgttggtaacaagagattggtaacaaaggaaaggaaattaaatggggaaggtagaggctggagatagaaacaagattaaagacagtctcttctagaattataaggaagagggcatttattgagtaatgtattctctattgctgtgtaacaaattaccacagacttagtggcttaaaacaaaatacactcatatggtttaaacatttatagttttaaacttacatttatacagtttctgtggggtcaggagtccagtaacagcttagctgtgtgcattgcttcaggccttggtcagccagggccaagttctcatctgctggcttgactggggaaggattcacctacccacttgtgtggctgctgcaatattaagttccttgtggttggtggactgagaacttctgtttctcactggctaatggtctgaggccaccctcagcttctagacatttcccacagttccttgtcattccttgccacatgggcttctcaaacttgaccacttacttcatcaagcagcaaggagaatccctagagcaaagtggctagcaatatatagtattatttatcatcacataatcacagaagtgacatcccatctcctttgccacattctatgggttagaagaaagtcacctgtccagcccacacttaataggaggggattatacaagggtgtgaacaccaagaaaggaggaaaggattatggaacagccaccctagagtatatccgctatattacctattagatttaggactgtgccaaatacttttacatgtattacctcagttaattgctaaaacaacctgtaaggcaggcattatcctccttgcacagataagaacatgaggctcagaggaatgagaacttgccctaagttctgccaacattaaggtggggaccaccatatcatggcatcaagtgaacttgtatgagtgtacaggctggagggccagcacccttatagtaaggagcaagggccccagggaggcagggagagggcaggaagagcaggagggggatagctctccgtgaggggtgagaccaggaggaaaggattggtatggattacatttcaagaatgaaggaaactgagagcacttatatctgaggatctctattttctcaatgaagcagaaaatgcgggcgtctcctgagagggaagagaagcagagccaagttggaatagcagctgtggggaatgcggaacgggaattttgccagcatgcctacaaagttgtcaagtggaataaggctgcttccttcatgaagactgcagcacaggcttgctgggtggtccccagtccctcccccattactttctgcattcactttcatcatcttgctttgcagtgctgcaatttatgcccaagtccatctctcctgtcagaaggaaattttttatagggcgggaacttagcagtagtgcgtaatgtgcctccctgtacccagcaaatggcctggcacatgaaaatcctccacaaatgacctgtttgattccagaccctgaatttctaaatcactgtattacctctcatcccctaaaggctcatgcagttctaaaagactgttcaaaaatatgtatttttactgttcagcgcagtagagtagaaagtgtaggtccctctatcatggaataggggtccttagaggtggagttagggagatctgttgcatgtataaactggtgacaaaaaagcagctttgcattttggcccagtatttttgatgtcaagaagtcagaagaaccatttcaaaatattccatttcaatctttattgattggtatggaatgttgcctacagtatattcttgcctgaaaaatctagttaccagacagacacttacagcacaatcccatttgtgtcaaattatagtcaagtaggaaaaaacctaagtcaaaccatgtcagggaaaaaatgaaatgtgttgttcatcttcaatgaaaagtttaggagactgttctgatgccacagggattctagcatctcggcctccttcttgggccctatgagatggcaaatggctgtccacattccctggactgcggtgtcccccaggactccttacacaggtccagaggtccaccctgataggaccaacttgggtcacatgcccaccactgagccaatgactgtggccaaggcgatcctgccctcttatccagccttggtcacgaaagggagtcagagtgctatgaacaagaggaagaggagtggaggccacatattatacatctatccactgaaaaacgattgatctggttccccagccccctgctttttttttttttttttggtaaaatctgccccttgcctcctcctgattagggaacacccctgggagttcaccctggccccactgagcgtatctaagtgttgctggaaatcctgggttccctcaggcctgtctcaactcagatgccatatgtttctcctggggcctcaagtgtgagcttgaactctaggccttctagccctggcagtcttcccagtcctgccactgcttagcagagtcagacgtcatgttcctgaacctgacactgagtagggtcctctcacctggatcaccactcagaaccacggtgcttctacctccatgactgctgctactttacacctggaggctcccacccagtggcccaagtcacaccttttgtttactgctgacacttctctcaaagccagcccttccctccctttccctcccctccattcccctcctttcccttcccttcccctctcttcccttcccctccctcctctcctcccttccccttctttcccttcccgtcctctccgttcccctcctcaggatcagtctctcctctaccaagccactccctcctccacaaagcatcagtcacagctactctaatgccacacatgagaccaggaacaggaaatacggttgaatggcattttgttttttcaaactggatccatcagctctgcctgactcttttccctctgcaccggtttctagctgacattcggtacttcttcctggcattacattgtttacggtagagttcaagttcctcgaagtacttagctctcaggagagccactctttgctcataagggtgcttctccaggtctgtcgctgttgaccacatcttccctgtggccttggccacctgcaccaccgaccagttcgggttctccctcttcagctgagcatagtggtcttggcagaagagtaggaaggatgatggaggccgtctgggttcctggggatcccgctttctccgtttcttcctcttgccaacataattcatcatttcttcctggtatcgggctttgtcgagtttggccagggcttcatatttggccttttcatgctttgagatggatctccatttttccgaacactttctagagaactctttaaagccaacataggtatttggctgctgctccttgaatttgtttctgtaattcagcaaaaagtgaacgtaagaagagacatttgccttaggctttagctggatttcttttcccatgttcgtaagttcaccttttttctggattcagtaacgtggacaggagagactgttgttcccacactccaggagcaatctagaaagtgctgtacttgcagcgaatttttctgtctgcaagagctgtagtcagggctcagccttttcagtgctgatggcattgttgagtcagaggagggaaactgtgacatcatccacaagccagccaatcccagccaacacctgtgggcatttgtgtacaggtgctcgtattggttggttacttgagggtcaatgtttgcctctcatgaaagatgatggttcattcatagtaggctatgaggcagctatgtcccccagaaataattctccttggcttcctggaggcagtgggttttgctgcactttaggggcttaaaatccctaggctgtagtgacaggccatggggtctgccttcctcactatacgattttcaggatgcctcatcatcccttccaaagacaggctgagcataatgaacatggggaggtggatagatccagggctgtcatgataaaatgtgaagtgtttctgtttgccttgaacagtggcagctcatgccatacaaagggtttagtagtaactctaaaagtaatcaggtatgacagctgtgacttggttcctgtcaggacaaagttgtctaatttaaaacctgagcacttgggctatgagttggaactcttcatttctctgaagaaatgtgaggcgaaagaggggggagaaccttgagattttattaattaacactggagttcatgaaaatgaaatggaatttgtagcacatccagaagcctccccactctcatgtgaggggtccccatttcttaggtttagaacacaaagctgtaacagctacactcaaactggccggcttctggcttttggtcaaagtaattgcagatattccactagtctttcaattggagggaagagaaaagatgaaaaagtgtcattctgggggcctttggacactgctaggtacttgcctgtgtggcactgggtttaatatcacttaatggttgatgatagccccaaatttataggactagaaaactgagtttcattaacataaaaagtaacatgttcaaggttgaacagccactcacaggtgagagtgtggattttgacggctgattgcttgacctaagcctgtgcttcatcctgcctgcacagagctgttgccagggcactgagggtccagatatgtggtctcagcagctgagccggacaaggaaacttgcctaagactagaccatattttgaatttttccaggttcattcccagggttccaagacttcagtgttcatcttctgtaaaagaaagatggaaactaataagagtctccaatcctgaattcttgcccagctctgctgcaaggtggctggcctacctaagccatccccttcctccctgtgagccaatgatctctcataaattgagcattctggactggccagggaagcccctccaggggacaagctgtagttgtgtggcaggatttgggggcctataagatatcaggtgccatcaaggaagtctgggctagtagggggtctcgcaaaggaacggattactctggggacacttctcagcctaggtagcctttttccccctggctctttctcccaaggggccagaggttgactcacacattttttggacatgagcagggctgcctagatgaatgggacacagctcctttctgagatcaaaagatgggacatgaggaagaactttaatgaaagtccacatattcatcagactctgctcaggctcagacacacacacacacacacacacacacacacacacacacacacacacacacacagagtagcttatctgtgcctcttaaccttccatccctctcatgataagatccaggaagattaacccacaatagctatcgggaagctagcagatttaagaagaaaaggcagtaaaagggaaaagctatgtcaaccttttggtgttgtcaaagttccaacttggaggatgaagcaggggaagtccttgtttaggggagcttaggaaaggtaaataaatctggcttcctaaatcaatgctgtgtgctgggtatctaagagttgcccttccagatcccctttccagccttctccaacctctcttcaaccttctctggcctgggaagctggtctgtatgagccacatcagaggatcccataccctctggtttccatctcactttggtcaatggggccctcaggagatcagagatggaggaaagttaagtcaaggcatttattctcctggatccccaccccagggtcacttggagctggttctgtgtccctggactgaaggtcactggtcctcataaggtgtcctctctaaatgactctctccttccagtacaggcattgccccctttctttatctcctcctgcctagggtggtaaaactctacttttatgagcctctgaggtctctgctactttcccacactctgccctcaccaatcattttaatttgagtggccatctgtttcctgcggggaccctgaccaaagtaccatggttttagcctttcaccatgtaggcatcagtttaatagagaagagtaatgagcttctggagatccaagtgcctggcagtcacacagcctagagcaagcatgcctgcaaggacagtagcatgaccagaccacatgcccgggaagaggtgtccaatattccctagattatgagatgacctccaggcaggagcattggtctagagggccaggtagtaaatatgataggcttggtgaaccacagggtttctgttgcaggtacccagctctgccactatacctcgaaagtaaccatagaaaatacctaaaccaatgagtgtggctatgttccaataaaaccttatttttaaaaaataggctgcaagctgggggtcgtaaatctgccaactcctcgtctacagatgtgagttcagtattttcaaacatcttgattgcagtctgcaataagaaatacattttacatcatgactcgtttacatacatacatacttaatatttatataatgcttaatatgagccagtctctcttctaagcactttatgtacctcattccattcagtcctcataacaagcctatgggagggctatttttatctccatacaaggataagtgaattcagatgaaggtagcaaagcacagagaagatatagagataaaaaatttctacttgtgtgacatactcttattttctactctgttgtagtcacctttactttatgttgttatttaaaatgccacccacagactgacctcatgacccactgatgggtcacactccaagaatggatttgaaaaacactgtccagacaagctgagagggagcttccgcctcagagactgtgagatcctctttacttggtggcagtaacatgaagtggaaagaacatggccttttaagccagacacatataagttcaaattctagctttgccatttactagctgagtaactttgggcaagtctagctcattacaaccatatctctaaaaagtagtgaggtgataataaagccatgaggattaaacaaattgaaatgataggaataaaaacagatggcactccccctctccagtgtgggctggacttagccacccactactaatgaatagaacatggaaagggacaaatagtaactttacagcggggaaatctggcagacaccactttaaccaagtgatcgaagtaagcatcatcaataacaggtcatgttgagatcacagaacccctttctgtgttgccataataacagcatctcaccgccatgatattcttcccaaaaatccatagccaaggtctatgaaaaaacattagacaaactgaaataaagaacattctaccaaatacctgatcagtacccttcaataatgtcaagattttaaaaaaccagggcaaggctaagaaactgatgcagattggaagaaaccaagaagacaggacaaatgcaatgagagatgctagactgaatcctgtgacagacaaaaagtgggccactggtggaaatctggggaaatctgaataaaatgtttcatttagttaatagtactgtaccattgctgatttcttagtttttatgcatgacccagggttatgtaagatgccaacattagggaatcggggtgaagggtatacaggacatttctgtatgatctttgcactcttatttcaaaataacatttttttaaagaaaaatctttccagttgatagcaatgtgcagccagggtaaagacaccctgctcttgatccatcatctccaggaatcacagggccagattttaccctcaattacagcagcatatgctcttagcatatctctgtcaaagtatctctcagattttgcagcatgatggaatcacctaagctttccaaaaccctcagtgctcaggccacagcaacaacagcaaacatacctggcataagcatgtgtatgtcaaatgctttgaaacttccttcatccccctcctgccccttcctctgtggagtgggactcactggttgcatttaccctctgaacaaggcatctgcaagtggcagaagaatgcctctccaaagatgctggcgtcctaagccctgaaacctgtgaatttgttccttacttggtaaaagggactttgtagataagattactctaaggatttagagctagggagatgatcctggattatcaggtgggcctgatagaatcacatggcctttgtaagaggaaggcaggagtgtcacagtcagaggagatgtgatgagagaagcagaggatcagaggtggagagagatttgaagatgctacactgctgatattgaagacaagggaaagaggccacaagccaagaaatgcaggtggctactagcagctggaaaaggcaagcaaaaggattgtcccctagtgccaccagaggggctcagtcctccccacaccttgatcttggcctgctgaaacccattttggattctaacctccagaattataacacaataaatttgtgttctttaagcccttaaatgtacagttatttgttaaggcagcaataggaaactagcacagtatctttctcctctggctgctggtctgtaacttttcttctgccattcttaacccctgcttgtgttaatgaagaagacacatttgagggtgaaagttttataccacggcatattcaatttgttgagggaaaagaacatgatatattcaatcctgcacactcttcttcactcgctgactcattaagtcactaattcactaattcacttagcagttaattcactcttacgttctttcagttcattcactcactcatgtactcacacacccatctcaataaatagctgttgagttgctggagcagtgtggctgctgctttgatggccagtgatgaacagtgtttgagggatggatgtgtcccaggaaggagggtggtagtccagggaatcatctgaattcacttggatcgctacatagtaagaaaccagatagggaggccaggccataagcagtcagtccaaggctctttggcactgacctcgtgccaggaactgttaatcaatcagatgtgagcacaatattttaataaaaatgatgatcatactttgggtacatcatctctggaagcctggaagcgtgaaaagagagattaatttatccaaggccacacagcaataagtggcagagccaggcttcgaactcaagcttgtttgaccccttggctcatatgtttagcctctactggtagtctaggaactcccttggctggggctagggtaaggaagcaactgggaaggaacaaggccaagtattgcaggaggagggaagaaggaaggagaaaaagttatctaaatttcaacgtttaaaagattcaggtgagtcttttctaatctgggttgatcctcattctggatagatctagtcaacttatctctaggtcatgggatgttctaagtccaggaggtcaactgacttggatgacccatagaacttcaccagcatctgaagataagcacggagcctgcatctactcccaagggcagaggcttgccaaagccaggcgaagtgtcagcacccagcccaatggactagtgggcaggtgggcaggcagtggtcagatgattagacacagaatgggatcagcctggttgggggatgcctggctacctatgaaaggatacaggacagatctagaacaagaccaactctgggttgataactcacacagtgatctatggatactcctcacaggtctttaaaaacctactcctttatagcataggagagtggccctgattattcagtccacctacttctctttcatccacagtagacatcttttgttttgtctgcctagcactcctcacttcttttgagcacattccttcttttggagaattgtccccaaactagtcatggggttctagtggaggctacctccttggccccaggaatgggtacattccccagctaaactaatcagaggcctctgatgggctttttctaattagagtcacggagagagattgtcatctctctagtggtgaaggtgagagagtgaatcacagagctactaagggtggtcatggctccagcctcaagcagccgccatttgcagtagagagaatgatgccagcaggcagagcacaacagagatggggcaccgagagagggcctttgtagcatctgagttcttggttctggccatccctggggccagctacaactctactcttcctatggtttagctacaatccatagcagccaatcatttcttctgtaggtggatgtgatctggatttctcccatctgaaagccaaagtataaggcattaatccaggtggacggcagcaagcaatacaagaagagaggaattctcctctcccccatttttgatgctttttgggcacatgctatgtgccaggcaccttttatatgcatcacctcacttaaaccttttaaccactcaatgaagtgggtgctgttattatccttactatatagatggggaaactgaggcctaaagcaggtcagttacttgcccaaagtgagacagtaagtttagagctgatgatacttgaacccaggcagtcttcttctagggcctgcgtgctaagtctctaccccaaattagtttctactcagtaaatattattccctttgcctacgagtctaccttgctgtacagagatatggcagggccaagaattgtagatgtcgtgtcttgaggccttagagggaactttgtgagcgtcactcacaatcgcactatgagatataaactggggaaagaagggctcagagaagtgaagccacctctccaaggtcacatggccagcagacaatgaaggcaggattagaactcagctccatgggactctaggaccacttgctcactagccttagtgtgtgtgagatgtttagcccacccatcctccagctgttgggcagctcactcattcttctggacatcagagctgctgatctctggcagggaccactagctgcctcctaacaggggaagggacatacatgatgctcaaactcagagtggcagttaagtggcaggcacacactgatgtgggcagctcctcaagaagccatttacaacagtccctctgggtgagaaatagtactaattacaagcagcggaggcttctgcaaggcaagcggtgccaccctctatggcaggaagcaggttccttctccaagtcatgtctgccagtgacaggtggaaagtgggcaaggctgggaaagcaggagccagtggaggccaggctggggttccccagagaaagagggaagttgatggccaggtgtactggctggtctgggtaccacagagtgccctgtccttctacccctgcactgctctatcaccagagtagatgcaggtgcctcatttccctggagaaaactaagccaggctgctctgcggtctactctgaagggttgggttcaaggcattggtaagatcccaccacctcttctcaaaccccagcaaggcagggggaaaatagttcacatttgtgaggcacctactgtatgccaggcacagacttggacacattatacacatgagcactgctgctcagaggaatcccattgcacagatgaggaaactgaggctcagagaagttacgttgcatgcccatgttcacacaactaggaaacagtagaacgcagattcaaatatagcactgtctggttccgaaggcctggcccttaacccttaacctttttaaacctattgcttctgtgaggaacaagacaggtgatgagccagataggtgtcatctttacttaggcagagactccagtcaggaagaagaagagggttgagtagagttgagtgtgaatatgctgtagtcaccacgctcttgaggcctgcaccctgtttctgggccaagcctgatggggataggctttaacatcctagagcatggaggctgccagtcctcaggactgccttcccggatctcagatctgacatataatagagacttgggctggggacaggggacagccagctaaagcctcagcagctggtcagagtggagactgctcttagattctgtccagtcagactgactcctggaggataaatgtacaaggttcaggacatcatataaaagtaataagggcaagttggggaggcagcaacagaagtggaagaaatgatgctaggacaccatttcccaaatctcccctgggaaagccaagcctgtggggtcttctcctcattaaagtgagtactcagcccttctctccatccaaacctcaaatgggggccatagggacctaccttcctgatagaagttccatcagctcattggcccagcttgggacacatgaccaccaggatccaatcagctgtagcctatgggtcatatgatgtacatggctacccctgtcaggagctgtgggttgagggaaggagactgatcttcaaaggcttctggtcttcataagagagtagaactgcctgatttagacctggagacagtaaaggacggagtgggcaactcagaaaagcagctggggatccacccacaagcctcttcacccagagcttggcatcagcaccagttctgatcttcagacccaaccctgttctgtcacttcagcacgatgggaagatcctctctatagaggcaggaaacaccttacccatcagctctgccagctgagcagctgagctagcaatggaaggaaactgacacaccaagccacccctagaccttcgcaatatgccaccaccccatacacaagacccagcgtgttggtgaggaagccctcatcccggcaacagccaggctccctgttcctcagcactccaagcctcagacatgtgtcctccagagagccgtgcatctggaggaaaaacatttacctgatgtggtttctgtgggttccctggagctaacaattagctgagcaagaaagagttctgataatttgttgagtttattgagttgcttctggggaaaggggaacatttgcccacattgattagcagacctcactgttgctgctttggggataggtcagcatgagaagaatccccaggaaggtaccagcagctgctaagtgaagcaggtagtggggcacagccagagctgaggaactaggactggggaagcatgtcttgacaggagtgggcagtgccatgggaaacccgggtgaagcccgcgtggcactggaggccctccctcctattccctggctcacctgctcactgcctctttctctgcttttccccacatgtaacctctgctttcaccagcaggctctcattcattcattcattcggccaatcatcccttcttccactgagtgatatttactgagccctttctttatgtcaagcactctccaaggtaccaaagaaagaaacagctcctgtcttcagggagctcatagttcagcaatgcatggtgagagaagcactatggtggagaaagtgcagggtgcccagaggggacaaaggagaagtaaaccagacctagcaacaaaggacaggtttcctgagccaggggctgatacacctgcacgatgagtaggaagtagctaagaaaagaatggggatggatcaagattgggagagagaatttggcaagaaggtaaattcttaattgttgggaacattcaaaatagatcataattgaccgtttttcaagaatgctgtggttgagactcaaatatagctgggcattagacctagaagacctttgaagtccttctcaaatctcagattttaaggttagctggttcccactctcctgatagcagaggggatgtaattcgatatcccaccactgaaagtaagctactgctgtttgttcatttattcattcattcacaaacatgtccaataaaagtgttcttaacccaccctgcctcccccaaagaagccagctggactacccagcactcccatggcctcagtagatcttcctgactggtgcccatggcacccccagcaactgctgccaacaggcagtctcccacccccaccctcaatgcctgtgcacttctgctcctatcagctgagtcttgcactttccgagattcagttgggtttgttgccaagtctctcagtgccagtcatacttgttattgtaattatgtgatttaaattaaacatcacataaactgatgaaatatgagtgtgaaaggaaatatagttgcatctatggaaactaaattgaatgctttggaatgattccatgaaggagagtctcttaaaagaattgcttactaaatattaggtgtgagtgaatgagacaactgtaccccactgggtaaattacatgaggggagggggatgggacaaagcatccttatcaccttgatgagaatggatgtcaatttctggcacatagtaggtgctcaagaaatatttgttggctggacgatctgtagcaacatttgaaatggtgaatgatgcattgtggttgtagtttatataagacagacaatgtggagaacaaacccatgatcaaagggaaggccttggtcctgcattaaactgattggcaaataaatgtatgcttaagtgttttacattataatgaaatgttgaagctacatctgtgtccttttttatgattccctacttagaaattaaatttttatttaccaaccaactacatcatctgtgaggcttctatggtaggaattagcaaacttttttttctgtaagaagccagaaaataaatattttgggctttgcaagtcatcatcttgcacaactccttaactctgtcattgcaatgtggaagcagccacagacaatttgtaaatgaatgaatgggcatggttgcaatctggtaaaaccatatttacaaagacaggcagcaagctatagtttgccaacccctgttctatgaaatgtatttgttctgtgtgccaggcactgtgctgtgcaccagagatactgagacaaaaagaagattttattccagctcccatggagcttgcctgctagttgaagagatggtcaactcaaaagatgagtacaatttggtatgcccaggatcatggcagggccatgtccactgggggcagggagagggagagatagaggaaaggaaatatttagttaggtttataggatcagtgatattttcccaagtagccaggtggggcaacaggaaaagggcattacaggtagagggaatagcatgtgcaaaggtctggagacacgaaagtactagtcgcattccaggatgtacaagccattctgtgtagctggatctcaaagtgtgtgtcattgaagaggaaagacattaaaaagcttggactttattctggagccagtgggttcaaccattgctgctggctttccagcaatgcagggatttgatcaaaattccccacaaagtatggaagatcgatcagaggcagagggcaaatcagaagcccatctctgtagtccaggtgagaaacgatgaggacatgaaatggagaagacttggccacaattggcgataggggtgaaggagagtggggagttgaggatgctgcctgggttgggtgaccaggaggatggtgtagattagggggagcagttgcactaaggagcagaaacgactgggggaaagctttggtttgttcagagcatagtaaccaaccccaaacacatactaggtagccgggaattgaatctttaaaggctggctcagatctttcagagctgtccacacaaccagggtgggcaggcactgctggtaaaaaaaaaagccttgggaggctgaggggcctcttttcaaagataaggcccagcaactcatattcaaaagaaacttccatttgtcccaggcattcactcagttcctggaaaatatataacatcatgggattgtcttggggaaagaatttatcttgacatagcaagtcctaggagtttagctaaaggaaaactgattttggaaagcattttgataagaatgggtgtcaaggctgagtcattaaaggtttgcttcaggaatgagaggtggcttaggtttggcagaggagggatcagcctcaaacaagggccttgggactatttgcccaccactgacaaagacattttcaaaagggtttctctgattgtatcctggtgtcctctccattcatcagggaggaaagcaggtgacaggtgggaagggaagagggcttgggagtggggataaggtggtgaggacctcctatatttcacattctcctaggccagccttggggatggggagggatggtttatacttagtactgggatgcagaagtgcttcaactctgaatcagaccagggccatgcacatagcttacttaacagataatgcccacaggagatgctctgggaggacagaagccagatgctattgatggagaaggaatggaggctgaacagaaaagaaggcattgcagctgaatcgtgtacattacaggcttttcagggactccctatatctagggaaccacagtgggagtggccctcacttgcgagcacagtgccttttacaaaatatgtgcttggtgattgcgtgaatgaatgttctcctgaagatgtcagttttcagggatgctaagatttaaactaagatctcctaacactcctccccctcgacttacaattaggcagcaattccttgcacagtcactgttgtcatcttgatgggggtatctctcagctccccaacatcccgactgcatgagaagcttcttaagaagaaatgcttcccacaaaatctgctctgagctcttcttcatgaagggaatggctcagagctttctgcagaggagctcaaagccacttttctataatcaactacatgcattacagggagtgatttttttttaattcttcccaagccagattccattaatgaagccccacttaacagaagtcaatttaccaaaaagaaaaaaaaaattgagtgtaattgcttaaatacattttatgttgtactgcaatagcaattttctgggtgaacttggaattccccaagccccccgtagtgaagttaatgtggacagaaaggtttgaaagggagaatctctctttgtgtttctctcctttaattatgattctaagagggagcaaaattaaagaggatcctgggggaagtcaggaggggggagaagaggaacagaatggaattcagcctaaatgattccactgccttccttcatgcttgcatgtacatgtgagtgtaatgcagtggctgaatgcataggctctggatgggatggctggatttaaatcccacctctgccacttaatagctgtgtgaccatgaacaagtttctttacctctctgtgcagccaggtggtacagtgagaaaaggcataaagagcatcaagggcaaagacagagaagcacaaaagaacaacgtgtattcctgaatacatgaactcttctgtttgacgggagaactgtgtgtgtgtgtgtgtgcgtgcacactcagggtgaaaggcaggcaggagtcaaaccgggaaggcttcactgagaaggtgacatttgttcaaagccttggaggaagcgaggggctaagccaggtggagttctgggagaagtgccagtgtagcaggcagaagggatgtcaactgcaaagaccctgaggcaggagcaggcctggccagttttgaacagtgaggagatatctgtggctggggcataaagggtaaagaggaggaggcaggaaaaggaaaggaagagtggctttttcaaggccttataggctataataaggtcttttaccctgaggattggatccattgaaggttcgttttgttttgatttgtttttcactaactctattataatatagtttacataaaataaaattaccatttattttatttacctatttacttatattttggagatgctatccaaaatataagtaaataggtaaataaaatggggtctcactgtcttgcccaggctggtctccaactgctaggctcaagcaatcctccccgcttggcctctcaaaaccctgggaatacaggcgtgagccactgtgactggctgtaaattacctattttaaatgtacagttccttggagtttgcccaatgtgtacatctcatctaatcaacatctcatttgagatgtaagacatttccatcacccccaaatgttccttgcactatttcccagccaggcagtccccaacctttatctctcacccccagctctgacaaccactaatctgctttctctcactaaactcttttgcagagtttcatatgaatgagtcactcagtatatactctcagtatatcctctttgatggcccaacataatgcttttaagagtcatccatgttgcaggtattggtagctggttcctttcattggagagtttcgagcaaggcatgacaccatctcaatggcagagtctgatgtgatgattctgccatgtaagcccccaattctttgatagatgccaagaaaactctcaactgcccaacatttgtgtccagggaggtaggagcagaacagagtaaagctgcatgggcaacacagggccctgagagtttaagcctcggaaattaacagttaacaggatttctaggagtgggtaaatgtgtgggagaaatgggaggtgggagatgccccttagggcttctcctgatctcacaggccggggaagtctcactgacttcctgctgcaatcttgatcattaatctcatcctgctcttgagacctcagcaccctcccctcattccattttgcaataaagagcttttggtcctgaattattcaggtagattctccctacttctacttcccttatataaatagcctccaagctttgtcattgagatagaattgaatttggcctggagaaaaaaaaaaaaaaacccacaatacgtttgtggctccttagaaaacttaaatgactcagtctgtaataaactattttaaatgggatctggtgaaatacagtaattggtttttataatagtttttaccatagcggtatgggttatattcctgaagtttggtgtgtgtcagcattttcatttagtaagaattcagttttgcagtgcgtgaagctccttggttagttcttttgtttaatgcatatttatgaagacccactatgctggatgtcttccatttgcacctccagatcctctcccttgccttctccttgctccatgcctgagaatacttacctaaggggctgcatcagtatgctctcttgctctctggcttccagttgggctagatcaacaggagaatcagtgggagactggaggaggggaaggaagagagtgagttctgcgtattcattctttgcctcctcttgatgggcttttcacaaattggctatagccccagattgtgaaagaagatctgggtcctatatggtgtcttcttacatgcagccccctgtttggagataactattttctctctgctccaggattgggagtggtaacaagtccctcagttgccagccccaggatactgcccctcccgggtggttcccccatagtcggccctcacctttatagttccaagagtttgatgaatgactgtttcacataggatataaggacctatgtgaaagagtatagagaaagggtataaggacctatgcaaaagagtcactcatcaaactcctgggactcttcttacatgactgtgacacctgttttctgctggaaccctgaaatgcctactttgtgtccagtatggtgttagaagctggaaatcaagatgaagaatggaacagcagctgccgttactgacagcttgttattgccagggactgtgctgagatcttcttttgtgtattatctcatttaatccttgcaagcttttgagggaggggtcatcatgatccccatgttttagataaggtcactaagtctcagagggtttctgtagttttcctgagctcacacagctgatccctccagagctcaagtttcttcactactaggccacattgccccctttgaggagttatcttaaggaaaccacacacttctataactgaattataatttgaataaaatgttgtggcatcacagaggaagacaaaggaaaattatatttattaagctaacatgtgccagatactgacctcgattctttgtgcgtaagatttcttacttattcctacaaactcttagggctggtattactcctgttctccaaaaggttaagtaacaggtccaaggtcacactggtgaaacctggataagaacccaaatctgtgcttcaaagccaaggagagtagggaatgctttactgcagatgtgatacttaaggggcttcccaaagtcatcttgggggacatggatgggcaggagaaagcgttacaggtgaatatattccaagcagaaaaggcaaagaactagaaaaaagaaaaaggatggaatgcttagggaatttaagcaggaggtgctgtggtctgaaggatcagttgcctcctcccagcagctgagggaaacccagcagtgggatgagaccctggaggagccatctcaagctgctcaggcctagggtactggaggggcctggggcaacaccgccttcccttcctgctccagagctgggctgaggccttggcactcaagggaagtggaggaactcctgaatgctcatacacctataccactcagctctggtccctgagcccatctgcttcctgttcccacaggttcaccggagccagcctcccagcccccgttatcagcagcaagaactggctgcgactgcacttcacatcggatggcaaccaccggcagcgcggattcagtgcccaataccaaggtaggcaggtcccaggactgtctggcttcctcagtgggcagcagagatgacacctggagggctcatcacctctccctactgggtccggtgtggcttcaggcatccttgccttctttgtacgtttctatttgcagaccagaggtctgcagatttgcatctctgcatctgcccttgtcttttgccccagagagggatgtttcccaaattatgtagctggagctgcccctcacatgccaggctaatcataatagttaataccagatgcctgctaagagccaggcacagtgctaggcacttggcaagtagcatctcctttaatcttcatcattatcctgcaaaggaaacacggtcatcacctcactttatggacaaggaagctaaggcccagagaggttaagccaatttcccaaggccatctgaactcctgccttttgagtctggagcccaccctcttaaccaccagcctttgctgacctctgcagcctacatttctactctttttcattttatctaaaacatgaatatattccaaaatcactttagggagcatgatagctttgatgctcaaatctgtgaagaactgtctagtggcaacagatcagaccaggaatggcaggtggagatcgcagctaagcagatttctgctgcaataatgaagaatttcccaacccaagaaccacctataaaaaggagtgggttaacccagaagcaaggagctgtctgtaactggaagagatccaaaaatccagctgatagatgggagcggatgagcacattccttttcgacattgcgtttattcaaagtactcaaaatttatagagataaacaccaagggttggcctcataacatgctcattaagcctttagctattaccactctcaaattgttattggttttaatagaatagacagcaagcttatattgtgtacctattaagtataaggacctgtgtgaagccctgggctccaaggccaaatgcctgctggctcaccctcaaggtagcatagggcagagtagtgccccctccacaaggctcctagggccaggctttctggctggaaactgggataaaagcagctctgaaggaagaagcgttacgttcaaaatctgaaccttttaggaacggcctaatttacttagccttgggtggtgtacccatttgaaatatctagaaagtaaacaagaaaccaacttggttcagtagcttaacaaaggcttaccctgagagctttcttggagatgttttttccactgctgaggttgggtctttgtgtgagtggaacagctgtctgtatctttctgctgtgtttctcaaaagacaaaagcagagatgaatgctataattgtatctgattaagtaagtgctgggtgtttctaatatttcaagttactgagggcccatttgtcagtttttaaggttaaggtttgatgccagcaatgggcgacaagaacccaagcctggcagtctccagatcacacatcgattccacatctgtgcacaccaggccccgtgctaggcactgtatgtacattgccccactcagtactccccacagtaaagtgatacatttgtttttatttctgtttattttttctccagctgaggaagctggggctcagagaggttgtaactagcccaagatcacacagcctgtgagctgtaaagctctaattcattctgtatttgcagaattacagggcctcctctgatggtgctttgggtgtcttccatttcctattaaccgtagctttcaaactttgttttgctcatcccaccccactgtaaaaaacaaaatcacaacccagtataagcatatatctgtagagctaaaaggaaaatatgaccaagtggtatttactgtgtacaatgtagtctgaaaatgtcatttttatttttaaatgctagttgcagcctctaaattaattttacaaatctgcagcagggaacaactcacaatctaaaaagcactgttttagttgcaaacttcttgaaagcaggccctgttctctgttccctctatcatccttagcatagcccagaatgaagttttgcatgttagtgtgcgccagtgtataaagaggacttgctagattttaagcgcttggcatttattactttgttcaatcctaacagcaactgcgtgaaggagatactattacccgtcccattttacagttgaggaacgagagtcatagagagggtaactagctggctcaggtctcattaatagtatgtaggagccaggatttgcagcccagcagtgttgatttgggtctggcatgctcaattattgtgattctgttaataaatgattcttccttgaaacctgctttttctagtgttttcctgactgagaccgcatagtgcaaggatatacagtgatcgtttagtaactccattgttgactttctaaagcaaggtttctcaggctctgcgctattgacattgtgagctggataattctttgttgtgaggaagtgtcctgtgcatagcaggatgtttagcagcgtgcttggcctctgcccattagatgctagacacagtgcagtaggagggagccacagggaccagcagccattagcagcgcccccccacacacacacagtcatgacaaccaaaaaagtctccagacattgccagatgtccctatgtgcacaagcacctccagttgacaactactactctgaaggaataaaaactctggagccaggaaagaccaagctaagctttattattgcaaatacaccctaaaacagtggcagaaatagatttcagtcaggggtccagcgggagacaggaggaatactgcacagctttaacggtagagggtttagtgaaggcacaatgtacagaggtgagggtggagtcaaaggagcccgcaagagatggtgaggcccctgaggactaagcagcaggtggcctacaccaccactaggtgtgcaaagggaccagggaagaaggtggcaagagctggagccatagaagagaggtctgccccttggcagacctggaaagctattccctacctgcagtgcaggaggaggggaccacagggatccatagtagccagggcgtgaggaggggatcaggggatcagtagcttgacctctctcctctctctctcccatccactgtgcttcccatctgccaatccaacaggaagccaagagcaaggaaacagaggccctgctctgtcctgctccctgccctgggatctctggctggcattaccaccaggctcccttgctctctagcagtccacagagatcagcttcttggggcacagaacagggcagagaggtttaaagaatggacctggaagggcaggggaagaatcactggcattggatcagtttcacccacagtcagctttgtggcactatagtcttaagtgatttatggcacttcagagctaatgattaccaacttctaatggtattgacagagattttttcccagataaacaaaaagaagtaaacttaaaataaaagataacctacaacatagtacattatattctggtctcagtccaatcagaatttaggatgtctgtggccagacacaattttacctaataccacagggtatcagaaggcctgagttctagtcgggctctgcttcggactggttatcaggaggtaggcaactgtgttcagtttaacaagcattttggggtgacattactatgtgacagcaaaaaagatgaatgcgcctaggccaatctctgctcttaaggagaacaggttaaagagaggcacagacataaatctataacttctgtacagcatgataagagctgtaattgaggcctgattaagagttcctgggctagagataaaagggcaattagttttgccagaaggatttaaggaaagccaaaaaagaggcagtgacttaaatgtgggtctcagaaagatgccagacagaccatgggaagatatgttccaggtcaagcaaaggcaagaaagcatgaaactaccacatctaatgaaccacaactacttccatgcgtctaaagcagcagtcacagaccaaatccggccctccacctgcctttctatggccctccatcaaagaatgggttttacatttttgaacagttgaagaaaagaaaattgaaaaaaataatatttcgtgacacatgaaaactgcatgaaattcacatttcagtgtccagaaaggtttattgaaacacagctacgctcattcatttacacctggtctatggctgctttagcactgccagggcagagctgagcagtttatgactgacacaagaggcccacaggcctaatatatttactatcaggccctttacagaaaaagtttgccaacctagaggcaagtctgccacctagagaaaagcaagcaggataggtagcgagcactgagactggaaagtgtggtagtggtcaagttgtgaaagtctcagtagagttgggcttgattccatgagtcatagatgagaagtgatcagaagttgttaatgaaaggggagacgtgatcacattttcgttttaggaagatctttgccctagaatccaaattgagaaaatggttaagaatcttggggaattggtaacaagggccagagtttaaacaggagtgaagatgaaaaggaagggacagaccaaatgtatttctggtaaaccccactggactcatggctagttagatttggtgggagtgggaggggatggggttgaaggagatgaaggagtcagggatgaatctagcttaagtggttttagcaaaatgatattaacaaagatggtctggggcagaaacagatgggggatgaagtttgcttgggacacattgattctgggtaatgttgggatgtcagggattgggagactatctagtgagcagttaactattctgtgggtctgtagctcagggaagaagggtctgggctagagataatgatgtgaaaagttcaaaccaaagtagaggctgagaccaccattcccctccccatgtataacatgagaggatagggccaaaaaagtggttttcaaattgggttccttggagactaacaggtcctccagcatggtttgatagtggctgagtgggtgggacttcaggtttccacccctacttcaacctgagcagtttctctttgaagtattttatgtagtgggtatttacctaagagtatgttaaaatgataagttcctgtagccaaagtgtttggcaaccacaagactttaaagttccttaaggttttttttttcagttctggtaggcctattgaggttgtgtaatcaatccgtctgcctccaggccaggaatgtttcaagtctatggaaatgatggtgagaagaacctttcttaatgcactcaatgcctgctaatcacaactggtgaggggcttccctggctgggaggacagcaccctcattatctccctcctcatctgtagagaggggctcttgttaaccctacagggctattggaaatgaaagaagatcccagtataaaatacctggcacttggtaggttctgaggaagtggaaccctcaatcctcatattcatcaatcactttgactcacttgttaaatggtgaaacccttgcacagtgagaaagagctggtgcctctggctctcccttagacacctgctctttgctttccactctgacctaatgatcgtcatttggcccctcccttcagtcagatcccagcctgcctttcctatacctgtcactgcctctcttgccaagtcaaccctgctgactgagagatggaagatattccacagtgaaaaccattggctcctttgccttctagaagtcctgcactgagtttcaattgtctgcagaataaacttattcatttgaaaacatttgcatttactgagatggttgaggctttttataataacaagctgaagcttctgttttccattgaacatgttgggttcttgcctgtgacttggcttcaatctgaggccagaatgaaagtgcttcaggcatcctgtggtccatgttctgactcttttgtcctattcttggcctgctgatctgctaaactttccagcctaatttccaggttctgcacctccaaaggtctctgcaaaaattgcaggcttgttgctgcttggctcaggagcccagggtccacaaaactgagctcgtgagttcagtccagagtgagcctgttactgatgtaggcacacaaaatatggcacccgtgacctcaccaggtttcaagcgtaacccactccttttgacaggaaatgaatttaaagcacatattcttataacagtcgttcattcactcagtcatcaaactgtcactgggaaacttctgtgtgcctggttcagtgtcatcacagaatatagatgcacaagctcatggggcaacagctagaagaacaggacatgattttgcagtgcgttggggtttcaacagaggtctgaaggaagtcttgaggagggcaatgacttctacctgagagatgtagacacccatagggaggcaataacatttgagtgaagtcctgggtacctacaaataagaggtagccaggcagagaaggggaggaaagaatgtcccaggtagagaaaacagtattgcttaggccgcataggctatcaaaaccaataaccaatggctagagtgatttcttaaacatctctctttcctctcatcattgtctccagctgaattcaccgaagttagtgaataaccccacatggcttattaataatgacaaagcactattctgggaactagaacatgctactcccaacactgcttcccatttaccatgccagatccttctcttctttaggaattccagtggtctcagttttgctgtggttaactgagaatccacggaagcagcatccaacaaagcactttttacaaccttagttgagttgatgattattttttctaccattttcaaaaaatctctgagcgtagtgcataaccagcttctggggagctttgcataattttctcgactgtcggtgggtgatccttcaacacctgaattcttagcaatagctattgccagaattttgagtgttcttttaattatttctatactaactttttactcttcattagctggagcagtgaatctaaggatgaaatgtaccaaggcaaaacacccaaatgatatctttttcaattgtaactcctgtaacattcagtgtatctgactctgtttttttcattctcttccacatcatttttcccatcaaccttcagcacagctattgcatccaaaattttgccggatgttcttctagttttcctttttcatagacactaatagtaacatctaactgctcaattatttcttgcatatttttctcagtttgagtcttgtcaccttttccttccaagaacatggcatcatctttggtcacaatgactgctccaacttttcctaagtcatgaaactgaacatcttcaagctttagggtcaagctctcttccaaacaccatgccattatagcaatagctttgtttggtctttctgtgtcaccaaagcctggagttttgactactgtagcccaaatgccaacttttatcctattttaaatgatcatactgagagcatcttcagcaattatgaccaaagactttcagtggacattggcaattttaaggtgggtacaattaactgcttactggaaatcccaagcatcctagaattctcctttctggacttctcatatgttattcaagtaggaagagatgtaatcttggtcaatctctgttgtctaattcattcagtatttttctgtcctttactgtgatgacacccttccaacatttgtgattacatcagaaatgatattgctgatttgtttgtctccatttgcagacattgtgtaaatggagaaatctcttcaggagttgtcacaggtttaggctgcttcttaagtttggtaattacagtatcagcacataacatcacacctttcctggtttccactggattaacacctttgctaatctctaccaagccttccatggtgatggagcatgccagtacagtagcaatggtggtgccaccccaccctcttcatttgtgtgttggcaacatcctgatcaaatctggtgccaacatttatcttgtaagtcaattgacccgcaacagacacatcatcttctgttactttgaggcttccctatctctgttcaggaatcactgttcttccctttggcatcatagtaatggctacagcacctgctagaaggtctgtaccttgaagcattaggtctcaagcatgtgcactgcattgtccatctttgggataattctgagtgaggtgaggaaccagtgtgccaaaccctggcttcatctggcaaaagactgtgggtaatgaaagcatttctgcagggtaggtggctaaatggcaaggcagccctcagctacaagggaggggcagaatgcaggatgtatacccaacaatttttcaagtaggaaaaaggcaaggtcagatttcagtttttgaaagatcaccccctgcaactttttaaaagatgggctggaggggatgaatctgcaaagaaaactctagcaaaaaaggatgagtataggtaggagtgtcttagaacattgaaagaaggatacacattggagaaattgtataaggctgagcaaattggatttggagaaggagtagtggcaggaaaggaaaagatggttcagccagcaagactggcaagtggcagggcaaggggaatgatctagtttattggaggggctcaccctcatagagggaagtctgaatccattgggaagaaaagaagatgcagattccctccacttcttgactcccagagccttggagacaggttaggcctccctttgctctctcctctcctaacaggtccttgtctcccactagctcagcccagtaagtcatgctgcagactagagagacatttgtattgccagattcttctagctaaatgtgtaccatgtgtcccgctaacctttacaacagcgggaaaatgtcttgtaattaaccagaatataaaggatgaatggagcagcctggcagtctcctgtagtcattatcattcggaggagatgaatgtacctagtaagatttccatcaaccagttacagccagcacttttcccttgggagtcctgactttgttcacatacagtgaaaaccatgcacagaatatatgtatgatgtgtatgacttcttttttgtatgtgaatatttgtatccatgtgtttacatgtgcttgaatatgtacttgtgagtgtgcttgttatacgcagaaatgtgcatgtatgcatgggtaagggcacagtacgagaagcagcccagtgaatattaagcatactatcgggggtgtgcattaaattgtagccagaccattgagccagccccaggttccattttacctccactgcattgatagtaaaaaacttctttttacagacaagtggttcagtataatatcattgggacaaggctagtgggtgctccatgaaaaaaaatccatgtacaaacaacatgaatgaatatatcccagaaattctctatgttctttctatgttgttcatcttcttgttttgaccttcttttctgactgggtctgctggtagtgcactctggagttttggagacctgcctttgttctctgactctcacaacctggtctgtcccagtctgttgagttagctcttcaatgagcttatttcatggctgatttcccatggtgctgcacattccatgatcactcatcaccccacccacctgagcagactgttaaaaaaacaagatggctatatataactcagggtgtgactgcttccctgggattgctcaaaaactgagaccccagcatctggaagtgatgtcttaatgctaatattctggaggtggagccaagatggccgaataggaacagctccagtctacagctcccagcgtgagcgacgcagaagatgaatgatttctgcatttccaactgaggtactggatgcatctcactggggattgtcggagagtgggtgcaggacagtggatgcagtgcactgagcctgagccgaagcagggcgaggcatggcctcacccaggaagtgcaaggggttggggaattcgctttcctagccaaggaaaggggtgatgcacggcacctggaaaatcgggtcactcccaccctaataatgtgcttttccgacagtcttagcaaatggcacaccaggagattatatcccacgcatggctcagagggtcctacacccacggagcctcgctcattgctagcacagcagtctgagatcaaactgcaaggtggcagcgaggctaggggaggggtgcccaccattgctgaggcttgagtaggtaaacaaagcggctgggaagctcgaactgggtgaagcccaccacaactccaggatgctggtctgcctctgtagattccacctttggggacagggtatagccaaacaaaaggcagcagaaacttctgcagacttaaatgtccctgtctgacagctttgaagagagtagtggttctcccagcacgcagctcaagatctgagagcgggcagactgcctcctcaagtgggaacctgacccccgagtagcctaactgggaggcaccccccagtaggggcagactgacacctcacacagccgggtactcctctgagacaaaacttccagacgaacgatcaggcagcaacatttgctgttcaccaatatctgctgttctgcaggcttcgctgctgatacccaggcaaacagggtctggagtggacctccggcaaacaccaacacacctgcagctgagggtcctgactgttagaaggaaaactaacaaacagaaaggacatccacaccaaaaccccatctgtatgtcaccatcatcaaagaccaaaggtagataaaaccacaaagatggggaaaaaacagagcagaaaaactgaaaattctaaaaatcagagctcctctcctcctccaaaggaacacagctcctcaccagcaacggaacgaagctggacagagaatgactttgacgagttaagagaagaaggcttcagatgattaaactatgatgagctaaaggatgaagttcgaacccatggcaaagaagttaaaaaccttgaaaaaagattagacaaatggctaactagaataaccaatgcagagaagtcctttttttttttgaaatgtatttttgtttgttttttttgttttgttttgttttgttttaatttattttattattattatactttaagttttagggtacatgtacacattgtgcaggttagttacatatgtatacatgtgccatgctggtgtgctgcacccactaactcgtcatctagcattagttatatctcccaatgccatccctcccccctacccccaccccacaacagtccccagagtgtgatgttccccttcctgtgtccatgtgatctcattgttcagttccccactatgagtgagaatacgcagtgtttggttttttgttcttgcgatagtttactgagaatgatggtttccaatttcatccatgtccctacaaaggacatgaactcatcattttttatggctgcatagtattccatggtgtatatgtgccacattttcttaatccagtctatcattgttggacacttgggttggttccaagtctttgctattgtgaataatgccgcaataaacatacatgtgcatgtgtctttatagcagcatgatttatagtcctttgggtatatacccagtaatgggatggctgggtcaaatggtatttctagttctagatccctgaggaatcgccacactgacttccacaatggttgaactagtttacagtcccaccaacagtgtaaaagtcttcctatttctccacatcctctccagcacctgttgtttcctgactttttaatgatcgccattctaactggtgtgagatggtatctcattgtggttttgatttgcatttctctgatggccagtgatggtgagcagtttttcatgtgttttttggctgcataaatgtcttcttttgagaagtgtctgttcatgtcctttgcccactttttgatggggttgtttgtttttttcttgtaaatttgtttgagttcattgtagattctggatattagccctttgtcagatgagtaggttgcgaaaattttctcccattttgtaggttgcctgttcactctgatggtagtttgttttgctgtgcagaagctctttagtttaattagatcccatttgtcaattttgtcttttgttgccattgcttttggtgttttagacatgaagtccttgcccatgcctatgtcctgaatggtaatgcctaggttttcttctagggtttttatggttttaggtctaacgtttaagtctttaatccatcttggattgatttttgtataaggtgtaaggaagtgatccagtttcagctttctacatatggctagccagttttcccagcaccatttattaaatagggaatcctttccccattgcttgtttttctcaggtttgtcgaagatcagatagttgtagatatgcggcgttatttctgagggctctgttctgttccattgatctatatctctgttttggtaccagtaccatgctgttttggttactgtagccttgtagtgtagtttgaagtcaggtagcgtgatgcctccagctttgttcttttggcttaggattgatttggcgatgcgggctcttttttggttccatatgaactttaaagtagttttttccaattctgtgaagaaaggcattggtagcttcatggggatggcattgagtctataaattaccttgggcagtatggccattttcacgatattgattcttcctacccatgagcatggaatgttcttccatttggttgtatcctcttttatttcattgagcagtggtttgtagttctccttgaagagttccttcacatcccttgtaagttggattcctaggtattttattctctttgaagcaattgtgaatgggagttcactcatgatttggctctctgtttgtctgttattagtgtataagaatgcttgtgatttttgtacattgattttgtatcctgagactgctgaagttccttatcagcttaaggagattttgggctgagacaatggggttttctagatatacaatcatgtcatctgcaaacagggacaatttgacttcctcttttcctaattgaataccctttatttccttctcctgcctgattgccctggccagaacttccaacagtatgttgaataggagtggtgagagagggcatccctgtcttgtgccagttttcaaagggaatgcttccagtttttgcccattcagtatgatattggctgtgggtttgtcatagatagctcttattattttgagatacgtcccatcaatacctaatttattgagagtttttagcatgaagggttgttgaattttgtcaaaggccttttctgcccctattgagataatcatgtggtttttgtctttggctctgtttatatgctggattacatttattgatttgcgtatattgaaccagccttgcatcccagggatgaagctcatttgatcatggtggataagctttttgatgtgctgctggattctgtttgccagtattttattgaggatttttgcatcaatgttcatcaaggatattggtctaaaattctcttttttgattgtgtctctgcccggctttggtatcaggtatgaggcggcctcataaaatgagttagggaggattccctctttttctattgattggaatagtttcagaaggaatggtaccagttcctccttgtacctctggtagaattcggctgtgaatccatctggtcctggactctttttggttggtaagctattgattattgccacaatttcagatcctgttattggtctattcagagattcgacttcttcctggtttagtcttgggagggtgtatgtgtctaggaatttatccatttcttctagattttctagtttatttgcgtagaaatgtttgtagtattctctgatggtagtttgtatttctgtgggatcagtggtgatatcccctttatcattttttattgtgtctgtttgattcttctctcttttcttctttattagtcttgctagcggtctatcaattttgttgatcctttcaaaaaaccagctcctggattcattaattttttgaagggttttttgtgtctctatttcctacagttctgctctgattttagttatttcttgccttctgctagcttttgaatatgtttgctcttgcttctctagttctcttaattgtgatgctagggtgtcaattttggatctttcctgctttctcttgtgggcatttagtgctataaatttccctctacacactgctttgaatgtgtcccagagattctggtatgttgtgtctttgttctccttggtttcaaagaacatctttatttctgccttcagttcgttatgtacccagtgcaggttgttcagtttccacgtagttgagcggttttgagtccgtttctgaatcctgagttctagtttgattgcactgtgttctgagagacagtttgttataatttctgttcttttacatttgctgaggagtgctttacttccaactatgtggtcaattttggaatagttatggtgtggtgctgaaaagaatgtatattctgttgatttggggtggagagttctgtagatgtctattaggtccacttggtgcagagctgagttcaattcctgggtatccttgttaactttctgtctcgttgatctgtctaatattgacagtggggtgttaaagtctcccattattattgtgtgggagtctaagtctctttgtaggtcactcaggacttgctttatgaacccgggtgctcctgtattgggtgcatatatatttaagatagttagctcttcttgttgaattgatccctttaccattatgtaatggccttctttgtctcttttgatctttattggtttaaagtctgtattatcagagactaggattgcaacccctgcctttttttgttttccatttgcttggtagatcttcctccatccttttattttgagcctatgtgtgtctctgcacgtgagatgggtttcctgaatacagcacactgatgggtcttgactctttatccaatttaccagtcgatgtcttttaattggagcatttagtccatttacatttaaggttaatattgttatgtgtgaatttgatcctgtcatgatgatgttagctggttattttgctcgttagttgatgcagtttcttcctagtctcgatggtctttacattttggcatgattttgcagcagctggtaccatttgttcctttccatgtttagtgcttccttcaggagctcttttagggcaggcctggtggtgacaaaatctctcagcatttgcttgtttgtaagggattttatttctccttcacttatgaagcttagtttggctggatatgaaattctgggttgaaaattcttttctttaagaatgttgaatattggcccccaatttcttctgacttgtagagtttctgccgagaaatccgctgttagtctgatgggcttccctttgtgggtaacctaacctttctctctggctgcccttaacattttttccttcatttcaactttggtgaatctgacaattatgtgtcttagagttgctcttctcgaggagtatctttgtggcgttctctgtatttcctgaatctgaacgttggcctgccttgctagattggagaagttctcctggatagtatcctgcagggtgttttccaacttggttccattctccccgtcactttcaggtacaccaatcagacgtagatttggtcttttcacatagtcccatatttcttggaatctttgttcgtttctttttattcttttttctctaaacttcccttctcacttcatttcattcatttgatcttccatcactgataccctttcttccagttgatcacttcagctcctgaggcttctgcactcttcacgtagttctcgagccttggctttcagctccatcagctcctttaagcacttctctgtattggttattctagttatacattcttctaaatttttttcaaagttttcaacttctttgcctttggtttgaatttcctcttgtagctcagagtagtttgatcatctgaaggcttcttctctcaattcgtcaaagtcattctccatccagctttgttccgttgctggtgaggaactgcgttcctttggaggaggagaggcgctctgctttttagagtttccagtttttctgctctgttttttccccatctttgtggttttatctacttttggtctttgatgatggtgatgtacagataggtttttggtgtggatgtcctttctgtttgttagttttccttctaacagacaggaccctcagctgcaagtctgttggagtttgctagaggtccactccagaccctgtttgcctgggtatcagcagcggtgtctgcagaacagcagattttcgtgaaccacgaatgctgctgtctgattattcctctggaagttttgtctcagaggagtacccggccgtgtgaggtgtcagtctgcccctactggggggtgcctcccagttaggctgctcgggggtcaagggtcagggacccacttgaggaggcagtctgcccattctcagatctccagctgcatgctgggagaaccactgctctcttcaaagctgtcagatgggggcatttaagtctgcagaggttactgctgtctttttgtttgtctgtgccctgcccccagaggtggagcctacagaggcaggcaggcctccttgagcagtggtgcactccacccagttcgagcttcccagctgctttgtttacctactgaagcctgggcaatggcgggcgcccctccccccgccttgctgctgccttgcagtttgatctcagactgctgtgctagcaatcagcgacactccgtgggcgtaggaccctccgagctaggtgcggaatataatctcctggtgtgccatttcctaagcccgttggaaaagcgcagtattcgggtgggagtgacccgattttccacgtgccgtctgtcacccctttccttgaccatgaaagggaactccctgatcccttgcacttcccgagtgaggcaatgcctcaccctgctttggctcatgcacggtgcgctgcacccactgtcctgcgcccactgtctagcacttcctagtgagatgaacccagtacctcagatggaaatgcagaaatcacccttcttctgcgtcgctcacgctgggagctgtagactggagctgttcctattcggccaccttggctcctccagatatacctaatgttaaatgacgagttaatgggtgcagcacaccgacatgacacatgtatatatatgtaacaaaactgcacgttgtgcacatgtaccctgaactttaagtataataataaaaaaaggaaagtcatttgaagagactgtaaataaaagtaaatttaatctaaaaaaaaatgctaatgttcctggtgatgtggatcttgcctagagcttacccctcagtgaaggatcttacatgacccatcaatcagctcccatatggtgtgtgccaactgtaggttctaccatcaatcagctgggcctgaatatacattttgtagagtttgtgttgttggtatgcagaacccttgcccaaagagctgtgacccctgtatttccctgcgctaacatgatgaggacaaagactctacctgtggattctagcatgcatccgatgaccatgtggtggctacaggcaacactggtgatataacctctcagacctagctcaaagcggtaatcaccaagttcatatgtacattatggagctccctgcagcttttcaggttccttctcactcagttctcatcaccttgacaaactccatcctatgctaagtagcaggaagtaaaagaggaagaacagaagttagctcaagcttgcgttgcatgatgacatcatccattactagaagcagcccaatgaatattaagcacagatccattaggttaggcagtctttccttgcggaggaatgagtggagagggtggacacagaaatcagaaggattctttctgggcccttgagagaggcaaggagcaggagacttttcctcaatgcaaccgtgagaagagaggaaggggaggctccctcttagcatcgcctcccctcatggccacacatatctcacagtgcccacatcagcccctacatggaaaatccaagcagctttgcccctgggaatggcctctgtggtgctctggtccccttcctcattccccttcctctagcaacactagagccagagacaaggagacgatgaagactctttcttcacctcccacttggccaggtgccctgagccatctccacagacctgaccacaaatgggctgcaccgggtcatagagacccctcacccactgctgccctgatgctggggtaccagggctatcaggctcaaattgttgttgtggtgctggaactgctcctgttctcccagggatagtgaatcagagggctatccccctgccgcactgtattagctaggcttgaataatgtatgtttccctactaatgccctctgtttgatcgtgtgtccatgttagtgttcattggaaattttcctgctggatacacatggagagtaatgcacatttataaaaacggtttgaatgcatgttgggaggctatgactccgtggtaataactgaattttatcaggcattcagattacacagtgacttgcctgccagggaacaaacccttggggaactttttcatgtagccagagttgggggactgggaggcagccttccttgcatatctgattactgtgagctttgatttggggattggcctgttacctcaagtccagagcaaatacctgagttttcagagcctgagcttgggagcagatcctggagaaggtttacagtttccctgagattgctttgggtgcagatcacaagaaaagaggctgaggctcagtgaagaacacagctgtttcctggctgtgtgacttacagcaagtcacctaaaccactttgaaccctgatttgattatctattgagtaggtataataactaccagtcaaggttgttgaaagtataaggaccaaatgaaatgattctaggcgttgaggatacacccatgaataaaaatccctgcctttgtagagcttacattgcaatgtggagtgacaaaaataactacataaatggtatagtatgttagaacattgggaagataacgttgggaaggaggcagggagagctggggttgcaggtgtcattttaatggagtggtcagggaaggcctcagtgaagaaatggtgtttgcacaaacacttaagggaaaaggggagcaagtcgtagagatacctgaggaaaggccttttggggaattggcaggctgaagcagaagcatgcctggcatattgtaggcacatcagagaggcccatgaggctggagaagagcaatcgaggccaaatacagagtcagagaggtcatggggagaacagattggtcttgcaggccatcttaaggacttttactctagaagacatgggttgccactgatgagctttgagcagagatgtaatatggtttgacttatgttttaataggatccctctggttcttgtgctaaggacagactatatagggacaagggtggagaatgggaggccacagtcatgaggggaaaggtatctcagacttgaatcaggatgatagacaatggaagttgtgagaagtggttgcctttgggatatatttggaaggattttctgatggattgtgtgtgggtttgagaaagaggagtcaaggacgctgatttaagtaaagaacttgtaaagcaccctggacctggcacgtatgaagtgcccagttacagttgttgtcaccactcctgggtatcaatctgagcagggctaagtcagcaggcggggccagctggaagatggcaccgtgggtagctgggattaaacagctgctccaaggcatataaccagagacagggtgaagctgttagaggccaagagaatgccttgggtaacaggggtggtcagaccaaaggcggctgatgggtacagaggaatggcctttggaattatggagttctggctctggcaccttttgtgtgctatttggcaaagttctgatgaactgaggactaggctggacttagtgacagggtcaaagccagatctgatccatcaggcacccacttgagtcaggccccatctcccagtgacctccaggattcagcttcccctgcctgtaagaggttggcttatgtaggctgggcttggcttggctaattccctcttcccccatgtgtctcttatcctcctgggagcagctatgttgtctcacaatgatggcagagatgcaagaggccaagcctaatctggcaagtgcttttatgcctttgaacacatcaaggcctccaaatttcccatggccaaagcaagtcacaaggccaaacccaaagtcaaggagtgggggaatgtactccacctctgtaatggagggagctaaaaaatcacattgcaaatggtgagaatacaatgagtagtgacaatttgggcccatattctgatctaccataccctgtcagggctgactcagaactgaggtagagaaaaagctgtggagaagcagaggtgggctgcaaggctgcacacgtcgacgctcatgaaaagtttgctgaggagcaggttgaattcagtaggtctggtgaaatctcagacatctgtgagaggccaccgggggagtcccagagcctctcagagcccacccagtaggagaccacatttttggcctccctcagagggctagccttgatagtaacttttccttcatgtctgaggtcctattgcccttgaccactacccttggaatgtcccagcccagaagttcctggctttgacccaccatggaatgttccaaggcacaagggggaatccttctagagggacccttatccctggtcacaggcaacaactcacattgtttttcctcttacctcctctctagtcaagaagcaaattgagttgaagtctcgaggtgtgaagctgatgcccagcaaagacaacagccagaagacgtctgtgtgtaagtgtccgcccgccagcccgcctgccgggcctcttgcttgaggtcacacgtgcaggcactaaaccgtggggaagccagatgatgctggaatgactttccttcaaccctgcttcctccatcctgggctctgcgcttggacacactgacccaacggccagagagcagccctggggcctgccctttgccttctcctcctcctcttcccattttcctccttgtcctctttctccctcacttcccatttgaactgcagtccagggagtcattactgctacatttctctctttattttccttttgaatcacttccacctgctaagacagtcctccttcagctcctcttttaggagtcagtaaccttgggctgggatcttgggggctgtagggccccagttccagctcccaaggccagattgggaaagggaggcaggggaatgcctagtaacctcctccaagggcccctggacctggctgagcaaagagaggactggggaagtgtgggggtgggtcctgcctcgggtcaatggggaggcactgggggctctcttcttgggcatggggaggatgacatctttcagaacatgttcctgctaccagtgtttgtaaggttaataggggtctagttctggggaatggtctggaatgtgggtcccagaaacacctgatcagggcctgtgctaaggggcttttgagctgaagcccaggaagggctggggaaggttctgggcacctccacaagactgggcttaaaagcaggggaggtttttttccagaaaccttccactttccttctgggccgagtggtagggagccttccttggtcctccaaatgactgacctggttttccttctccttccctccctttgcccttctcctgcatctctggtcctctctcccttcactttttctcctcttgccactttctgctccatcgttcttctcatccttctgctcccgcctcttctctccctgcttgtcttcctgtccctgacttgctcctcccaccctccccattcctccccttccatctcacctccatgtgctcactttcctggagatgctagaagtacttattgaggagagaagggcatagagtggcaccggtggttttcgagctctgtgccgatgtgtgtggccgggagaacatcaggagaagaggcactttggtctcaggctccgactgaaccgagcctgggttggggattgtctgtggtctttgaagttgtctgagtggagacagttgccacaggctgttggatacagccaggaactggcatctccagtcaccaccctcagggactggatggcagagggcaccagaagagccttcttctgtgcttgactgggggtttaggggaaaggacagggtgctaggagagcccagggtcaggccaggaacctgcagagggctcaagccatggccctgaccctcacaggctttttctttctgtagccacaggagacccaatgaactgaggcaggcacagtttaatttcacagtttgccctggagccacaggcaaacttaaggaaatggccctgacttgggagatcaaatatttatcccaactgtgtcctcagggagcatgttaccccagacactaatgtttcagttttcacatctgtagaatggggatgcaaaatcctaccctgccttcctcccaagagtgttgccagatctaagatgggtcttgttgacctaggacttcaggaggcccatggactagccaaaaaagtacatgtgatgctctgggtgcatttttctggagacaggatgcagggttttcattaagccgactaagaagatgccaaaaactccctcaggaagataaagagaaaccctgttctaatgaaagaatgcaaatgctctttgcaaaataaatatatatatctctattgagaagatattagcctccattctaagagttcctcagaaagaatgggtgtgtgactccagctgcctcagacccaggtagccacatgtcttcaggtggctggcctcctgtgttctgcccaaattccctgtggacagctgccctgaagttcatggggagagtggacccaactctctaccttgccatcagttctgaccacccacccacctgtgactccctgcgttgggtagaaggtggtgccttcctgagcacattgcggcttctcccttgccatagtggccctcccagagtagagtaaggattactccccattcctgtccctcagtagccaacaggaaagcaatgctgtaaacacaagcagctggttttgagtaggcagagaagactggaattaaaaaaaaaaaaaagaaagggagaaacacttcttgcctccataattcagacagtaaactgatcgctgagatttaagtttgcttgtttcctggggaagcttgaagatcctcgtgggaccaccatcccctgctcagtcctccctggaagggggcactggctgggtataagccgcgtcaccgttgggtttgtgactttctggatggtgcctgggtttcacctggggctggctgaggaaaggggaggcggtagggtctgctctgtctgtcaggggcttgtggcttggcgggtgggctttgccatggtctcgcctcttgagtccagccccgtcctgatggggcagacttctgttcgttctgcttcctgggtgatgtcaatactgaatgagagggcaagagaaggggaaagggaaccgccatatgttcttcacgtgctgcaagggggctgtgtggttcccatgaaatggtcagcagagactttgggatgggtatgactcgtgggtcacagggttgactagacagaatctaaagaaggtgggtgcttagctgggaagtctgcagtagggacggatcactgtgaagctctagggggacctggcttaccacagataaggcagcaaatacagctcaggcttcctcctccttcccaccttctgggtgccttagaggaccccctagttatctccgttccattacttgcaaaaaactgaggcttccaggaagcaggagcttcctctgcttcgggaatggcacttccatcttactttcccagcctgaggtgtctggactggtgggaacggctcaggatgtgaaagctttggaggtaaaggcttggcaaggaaggggatgggcgtaagagacaagtaggggtaggggtaactggcttgaacgtgcactgcacacaaccaagaggatacctgtgtctggcttgagcacacagtctgtccaaatcctcaggttccatggccagccatagcctgggctacctggaggtttaaacacggtctacttcaggcctctaactgtagactccctcagtgagtctaaaacgagctccccaccttccttacttctatgaaaccacctgcatcctcacaggtacccaggccctggaaatcctggaaatgccctgctccttctcctcatgccctaggtcccctgtgagtcccagggattctttctttgccacatccattcctgctgtctcatgtctagcctcactccaggctcttgttgtcctcagcctgaataatcacaaaatttcctaactcatctctaggtaactggcccacctttgagccagcgggtctcaccacgccttctccccaccagaactctccagcggctccccatcattttcaggatcagactcaaaccccgtaaaagtctgatctctgaaacctcaccatccactcttccttgtcactcttcaccttccctcctactctggtcacactgcataacacgcattctctttccaggtttccacctcactcctcgtgcctgtctatctttgtcatctctgttgccgtgtgtctaaatcctattagctcagaaggtccatgttcgatgccacctcttccaggcagcctcacatgcgggtgcatccttcatccctccccactgtggtcccacagtccgcttccgtggtttatgtcctcactcaactggaaactccttgaggacagtggtcttatctgactacctttcgcatttccatggtatccaaataaagccttgtacacagtaggtgctcaatgaatgcttgttgtgtacctatgtgagcaagtgggtgagtgagtaatggagtgctttgttcaccttatgggacattgaatgggatgggagggacatgcgcaaagttggaaaatgccgaatgctgtccagatgccctggaacccttgtctagaggttgctgttggggtcatgggattggtgaggctttgagtggaactcctccgaccaggctgtgtgcctggctccagctcctggtcatcctcaaagccaggaatccagcctcctcagtaccagcatcccgacgaaaaggaacaggcaggggccaaagggttgcctaccctccctactgtgtgtgtatccgctgccccctgaccaagcttctcctctagccaagacaactgtgcatatggtttttgtaaataggactctggcgctggcaagtgtcagagcattgcaccacctaccagaaccatcacaggtgccatctctgcccggtgcccttgatgggtggcactgggtaggggatgctctggtgactgcttactctggctcgagaagtatctgatgggaagaggtttctcagaagaaatgtctgtgtttgagctgaagtcccagctttgaactttgactgcagctttctcttacattctttaccgtttctgatcatgcacccaccttttatttaactttctttgagtcatttctccatctggggctgaggtggggggctcatttcatctagagtctccaccccagatctgaagcataggcgtggtggggggaggtcaccaggggctgtggatggtccacttctggctgctggtgtgggacgagggaagcaggtggtggttggcatggagggcctgtctctgagcccacacactcgtgatgactttgctcacaaaggaatttgtcaaaagcagcctcctatcttgcacatccaagaaaccccaggccagtagactccggccaccccacacagccccaacaaagcagggcctcattctgtctctgcctccacctcccaccctgagacattgccccagctggtgcctccctgtgactgtccatctctgtgtgtgctgtttttttttttttttttttttttgccttgtagtaactcaggttggtgtgtcccaaggacataatatgtgtccagaccctggcatacccgaaaggggcaaaagactaggctcggatttcaggtaagatctatttgggaattttctgattgcaagaagggtggggtggcctggctgggaggaagacaggggctggccttcctgcaggtggaaatggagaggatggcatggatataggaacagacacttcctggagaagagctatggctttgacattctctcctggttcagtccttggcatagtgcccatgctttagtggggggagagaactgtagactgccagtgttatccagaaaacctatgtacccagggtacaaagggctgccatctcagtaatgacacgccagaaggcaactcgcgcctgcaataatctaggagaccattttccttaaagtttatgggtatcatccacccacgcttagctgccctaactggtgcttatctcagaggatcgctgttttgctcacaaagtcaccttttaactcaatcctaaaaccattaaacagtccgaaaaaagaagatgaagagcagatgttccttccaatggagatttttagtgataaaacagtggagcagagattaagggccagaaggaaaaataacatgtgcggcttctttgtggaaccaggaaggacttggggcggggcttggcaggcccagggatggagctcacagacacactttgtctcccaggttaggatccagcgtccagttcacctgcaacgagggctatgacctgcaagggtccaagcggatcacctgtatgaaagtgagcgacatgtttgcggcctggagcgaccacaggccagtctgccgaggtgagggtgccctggggaagggaggctggccagagagttgggctgagcctggaggctgaagcccagctcccagcacctgaggcccaggctctcaagcagactggctcccctcccccctcactccctgcacttatttaccaataagcatacttatccagccctttctcagtatcaaggcctgcgctaggatcaggagatacagagatggggaagataagcattatggtgcttgccctgcatggaccttacagtctaatgggtgaggcacgtaagaaacagcttgctacctcattgaatggatactgaaccacacctagataggaaaggaagtcaccttttatacagtcaccttgaatccctctgttacaacacacatgcatcttgaaccctgtttctttccccatattgcaacagacagacttgtcacttctgcaagagtgtttttacctatgtagtgatgacatgcttctaaccccctatctgggtgttttgttccccagggccctgccaccacatccccaggtgtcacatgagccaagcctgggctggcctagcccctaccccccaaataatcttaaaataacagagccaagtgtattcctgctttggggcagggctacagctgcttctgtggtagagaagcccctgacctcatcccccagggaaccagcagagagagcccctgtgcactaggctgttaggtagtctttaaaagccaacaggtgctcttttgagtgcccctttagaggagaagatatgttgcccactgcaaagttacatgctggatccttctgatctaagaaagagattctttgcctctctttggcatatgcatcaagataaaattcatgcagagtaagaggatccaggaaaaataatatctcattattatactgagaaaggggcagagttggagctgaaacccatatcctgttttttaactgagtccataagtaatctagaagagtgtcactataacatctttcaaataagccttacatcctcattcaactttgaggtggccatgttctacagtttataatgttctttgcattttcactgattttagctatattatctcaaggattctacatagctactatgtttttaaaaaatcaaacaacaaaaaagaattcttgtcataactctcagcaattgggcaaatcacccattttccctaagcctttcttacctccaaatgttgctaatagtatgtatcctacccttcttctgtttaatgtggagattgaatggagttgtgaatgtgtaagcagtttatgaattgaaaagtgctagaagaaaaaaaatatcctcatgccagtagaacatgagctctatagggcaaggacttctgttttgttcactgcctaaaatggggcgtggcatgtagcaggtactcagtaacaggtgttgaatggatgacggaatgaatgactcattgaatagcataccactccaatgccagggagcccagacaccagctgtgcagagaggcatagaattatcaagtctgaggaccaagggaccctgcccatctgtcgtttcagaattccttttgagaagccaggatgacaatgccttttgcagtggtgggatctggtccctcctcaagaccttttcactagaggaaggttgttctcttagttctcaagagatgatgattgtttacatgaacatgccaagggtggagaagggctggttttgacctgagggaagtttgtagctgaaaaagtgtgttcatccttttctccagtgatttggacccactgaagtctgagttctctgctgcattgtaactaagcattgggctgggctttttcacgtggtcatctcattccatcacctgctactgtaaaacaacaggaaatcatggtacaaatccaaccatcatcatttttagctggggcccttgggccagtttcttcacctctctgaatctcttttttcctgccaaaaagtggtgataatagaacattacttcgtggggttactttgaggactagatgaggcagtccttgtttagaagtgatgccagtacgtctgtgagacttacgtgcacacatattcagcttaacctgctgggcactgtccacataagcttcctcaagccctggagcaaacctcagcctctagttgctgcaggttcttttagaagctgtcttgtctaatcctattgcaatcatacagtttgggagtcacatggactttgatctagatcacaactctgacaccttttagcttgctggccctgggcgggttccttcatcttttttagccacaggccttcatttgtgaacaaggaaaacaaaatcttccccgcctactgattatgaaatttaaacaaggcattttctagaaagtgaccagccctgacggtggtggagggtacattctcaacacaggttaatattcctgccttcttctctcttttttctcccctcctataggccattgtgaaggagaaagagagactgctaagtctcctgggtttgaacttggatgatatgtcctgggcttccctgaaggcccagggctgagatagatattagagtaaagcgtctttttattttggcaattttaaggtttttattttaaaatattttgttttcaattaatcgcaatcactattctgtgatttttaggacagtttaggtgaaccccaccttaagaatgaaaacgaacaaaactctttccattccaagaagttccactaacaagcaggttaccaaaagatcacattctaaaaaggattttaccataataatggtattattttttctttaatgcagttaaaatatgatttgattagaaatactcattttcccacacaattaattctactaaaacatggggcctggcaaataataggttctcagctaatgtttgaggaccacctgaatgaatcagtgattgaaatgaatgaacaatatgggactgtgccctcattttgagatatgaaattaggcgttcacaggcctttcttttctttccctcccatcagaagaaataagcttctaatttgactcctagaaaattttcatcacacaaaggagattgagggcaatgtgaaacactgttaaactaattctgttcagccccagatacaggcagagtccatagatatagagcttttcagacttattttacatatggagcccaatattcaaaaataagtttttgcagaaccctaataaataaaacagatacaagtggagcatctctgattaaagttgggtcaggggatttctagtctcccctccatcaccattttcagtagcctttgagtcctggtacccctggggccccagggaacactgtaaaccactggtatagtgagaggaccaaattaacaaccagctctgatttcttgtgatcacaaattggtgttgatagagtttagggactgagtaccaggcccagatgaaactcttacagttactgattcacaaagtaaataattaacaggaacttatatatattatttttcctttgtggctaaactcatatatatgtatatgcctttgggtggctagaataccaagcttgggacttagagacctaagttaaagttccgactttgttattaaccatgtggcacagggaaaatcactgaaacactatggatctttttcctcatctgtaaaagggcagtaaaacaggagaaatatggcacaaaccagggtgaattaaatgccatgataattacaggtggctgtcttcttggtggatttcattagatcagctttctggttttactccttaaacataattgttatccagagttctattttcagatctcttctcttctttcctctcttctcctctccacttattttccctggatgacacatactgattgtactagagtacatgccccattgctccagccctgagaatgtccctcagtcccttacctatatgtgctaatgataaagctcttatttattaaattatgtatacttgtatatagcattgcactaggcatttttcataatttctttatgagtaaagtggcaataaccatattttatgtttagctgaagcttagagtgggcagccaacttgcccaagggcacaaagctacatctgttgagttgaatttcaaaccctgactccaaaggctgaatcctacttctacttgaaaattgtacctggacatccttcggagtcaatagattggatggaaccatgcagagcaactccccctccactccccactttttttgggtaacttttaattttgatatgattttaaacttgcagaaaagttgcaattaatgtgcaaaaagctcccatgtaccctttcctagatttaaacaactgcttttaaaaagttagtggagaagaagaaagctaagaagaaattcggtcagaaacgtaggagaaaagccaaaaagcgtcactgaagccaaagaatgtgagtttcacaaagagagaaagatcagtagtgtcagatactctagagaggtcaagtataatcacaactgaaaagtaaacattggggttagtgactcaaccaagtgttgaatatttgaacttgtttctgcaaggaattggtgaaggaagacatgggaaatgatagacttgggctgaagtttctattgtgatggcaaaccatgaatctgtcgtgataccacagttctcctggtagccccccagcccccaggattagagatggaaaaggtgagtggtagaattgatggaaagcaggcatttcaccaagcagatatgagagcgatgaggaagatgtaggtattggtgagtggtcttgaggtccagactggatagtgagggaagaggggtcaggcgaggatcaatagatgggatgaaatgtgggagccagaaggctagaggggcctatgatgtaggacaatggtgcattgagacccaagtcattctgctgggaacacaggcagtgggggaaggaatggaatgactgggtttaaaatctgtgagttggactttcctggctcccaggatagcaaggccctgggtgtggctataaacatggttgatcatgagttggaggaagagcagggtgtcagatctcataagagggcaatgccctccaaaacaagggacatctctccattgaaacaggagggaaaaaggaattgagtacacgtgcagatagaattgcattcttagagagtgggacaaaggacccgcctgctatatggcttctgttccctccaaagagaaagccaaagtcatcggctaagagtaaggggagataagaggaagaggaagatgttcaaggaatgtctagaacatgtgaaaaagtctttgagcagaatgagagagtgagctaatagagataaatggtagggtcactgggcaatagctaggatttttttgagatgagtaatcaggagtttataatagacattcatcttcctactagtgatttttttcacagcaaagctcaactgtatggtggcaggtatggagaaggcaggtagagagattcattccaaactgatgtcttctaggcaactgatgaaaggaggaagaagaaagggacttggaacaagcaagaaaatgagcctaatggtggcccatgtgatcaaatttgcataaggacagaagacaagaccgaaggagctgatgggtagagaggagatattgctgtcaacagagtggaggtctcagtggggaaagatgaactctactggaggttcagaaaacaactgtgaaagaaatacttgagggtgggagcaagatcttgactacagagggctgcataggaggcagtggcataggaggggaagatgggcttcagtcaggacagtagtgggagtaggaggttccgaaagatgttgcagctacaagtaggatttgttttccttagaactggtagtgggaggtggttccagaggactgtggaaagggttgggagggaggccaataggagaagcaagggaaggcagcatggaacaggatgggaatcagatttggagagaagatatgagaccagaggcacttgcacccggagcagttctcttctttggcaccaagttgtttcagtgtcagaactggctgtgggtccaggtggtagctccctatggtcccctgggatactgttcccattatatgataatgtccagaggaaaaatgggagtagctgcagagctcaggcatggaagatctcagggaagtctctcctgaaagcgatccagaagagcatttcagggaaaaaggcaaatagagaaacaaaatgatatgttcattcatttagtgagatattgagcacctaccattctgccagcccatctgggtcactgtgatgaactttctatctgttgatgggatcccatggagctggctgctcagggtgatgtctgtctgtctgtccacagaacccctgactttgctcagatagcagaggaaaaaagtagctaatgcttcattttgaacctagtttaaggtgctctatgctatctgcagactgtaatattttaattaaacccctctaagcccttaaagtggtaactgcctttttggcctgttctctctcattaccttcagcatgtttcaacagactgcaaatataccatctaattcttggaaacaagtacaagataaattgattctgaagctgagggctttgggcagcaaaatctgactttccggaagaggtgtaagatggtgctggtggagctttgtaaggattctctgcagggctagagttctgagtccacaggtcctctttgcaaaggtgggacggaatcagggctttgattgtcttattttaatttgtttagtaatgttgccagtctcgagtgtacttgtgggggaaaaaaacctatgtccagaaacttcaggaaaggcagaaaaaggatccttagccttgagagaaatcctgggcatagagaaacagaatagacatggcattgggagtctgattatctcttgtcccaaaggttgaatattgaccacatcccaggccctgggctgaaccttcacatccatcatctcatataatttcatcctcaccatatctcaatgaggtggtatcatttgtcccattttacagatgaagaaacaaaatcagattttctaactcatccagacttaagcgaccagcaaatggatttagatccagaaggctaagttcataaattttaaaacctgacctcgctttaaccatgccacattgccatagggcccagttgtatcaagtgcaatctaggaatctaagtgtttctcagtacagaatgaaaggagcaatcagatatacatgggggaatggagtgggggttcccccaggacttgttcaaacttgattgaacagattcttgagctcaggatgagggaggaggagatccttccagtgcaggactacagtgagaagaaatctcctcccaggaggtgatgagctaacaaaaaggaggtaacagacctgtcccaaaagccccttgcaaataaccctctgacaacacctgctctgcttgatggtgaatgtttttccacctgctccctccacttgctgtggcccttcagagaggaggggctatgtcagacacttttttctccccacacttttcctggcccatagtaggcactcaataaatgttggaatgaatgagctaagcgcaggaatgagtgcatgaaatgagaagagattcattatgtctaggagctgcagaacctgcttcccagaccctcctaggaagggtgtcctgggaaaggtttatcatggccctttccacacatggcaaggagctctaggatatttggccccatcagaggaaactaggtttgacaccactttcattttatatagttaagcttgttgagtttgctcactatttctttactgttaggcactttgcctacaattaggataaattgccatgtgggcagcatgagaacaggctcttagaaccttttattaaaatagctgaacactaacgttaaagaatgaagtggctagaactaagcacacatttttaaagaaagcaaatacctaggtacaacgtagtaccttaactgttataaatcactacttaatctaattagtttagaagctattttaaagagcttaattagattaagctgtgattgataacactttatatctacttgagtagaacacttctaattcaccttgaatctttatgcttccagtcaaaagccagtttcagggataagctgagtgtggagacggatttgggaagcagtgaaatcactctgggggcctggcactgagctgagtcaggggccttggcagagctcttgggcatagacattctgagacctaatggagtggccttgacaaggatatcctgaaattcctcttcaggaggaccaagggggtcacggaggaaggaactgaggggcaggcagaacctggaatgaggtcagactcctagttaagcagcattaggtccacagcagcactcagctggtttggagaattggagtgcaaattgggaaacagacaggtcagcagagtaaggcgtgggctgcttaggtgtccataggtgcctgcgatccacctagctttatgtcaacctgacaggttctagcccacaccctcttgacaaagaggaattgcatgatcatagtggagtcggggtgtgggggtaagtggggcatgcagaggggtcgcttagcctgccttagaagttcatcattgcctacagaacagcagtcacagtgctccaggcactgcggcttcccttcaagcctcccaagaactgtagaggaaggacccaggaagcagaaggttatgtccagggtgggaactgtacagatgcagtgtcttctgggtggggagtgggaggcaagaaggggaactggacctagtcttaattcaaaggcttgtctttcatctcctctgcagcccgcatgtgtgatgcccaccttcgaggcccctcgggcatcatcacctcccccaatttccccattcagtatgacaacaatgcacactgtgtgtggatcatcacagcactcaacccctccaaggtaagcctcttggggagcggggtggtgttctgtgggcagggctaggttggggacagttggcctacaaggtttttcaaacccagaacttactgatggtagattctctgcagacagttcttttacttttttttttattaatatcgagtggataaaaagcagattataaaatataagcaaaatataaagaacaccaatacaacaaacacctgtgcagccatcgttcagcttaaggggaaaagaaaatcgttaccttagtgatgcaggttcctcaccaatcctgtttcattccctacaccctcagaggtaaccattacctcaattgtgtgtttattattcctttgtttttctttatacttagcacttaagtgtgtatccctaaaaatacattgcttagtatgctaacgtttgaacttcatataaatgtaatcatgtatgtattcttaatcaacctcactcaaaattgtgttcctaagatttatctaagttattgtatgtagtttgtacttctacatacattttttcatgtttatttcctgttgagtttttttctcctgtgccctttgttctctcttataaattttacaagtatgttgccaagatccacaaaataacctgttggaatctttattttaattttatcaaaactacagattaattggagaagaactgatatctttttgatactgagtcttccagttcatgagtatggtatatctctctatttgtttagggtttctttaatggcttgcaataaacttgtataattttttccattacagatcttatgtatttcttaatatatttactcctaaatatcttatatttatcgttgctattataaatcaaatcttttaaaattgcacattctacttgtttcttgctggtgtttagaaatgcaattgattttgtactttgatttttatattagcaactatcttgtaaaaatgtatctgaattctttgggcttttctacatggatagtcatcatctgcaaaaaaatgatggtgttgtttctactttccatttcttataccttttcttttttattttcttgcctcagagttctggttggaacctcccagtataacatcaaatcattattatgatggtgacccctatggtcgttgtttgatatttaatagaatgtttttatttcttcaccatcaaacatcatcaagtatgatgtttgctgaagcttatttttcatttgtagatactccttttataatagaattagggaatttacttcctaatcgtagtttgctaagagcttttatcaagaatggttattgaattttatgaagcatcttcctatatctattgatacaatcatataatttttctcctttattctcttagtatagcaaatattgccttttctcatgtcaaaccaaccttgcattcttaagattaacataacttgatcatttagtattgtcatttttatacatgcctatatattgtttagtaatttgtttctattttgttagtgagcttggcctgttatttgttttttcatattgcctttgccaatttttgtgtcaatatattgctagcctcagaaaatgatttgaagagtatttcctctctttctatcctttggggttattagtggaagattggcataacttttgccttgaaagtttggtagaatttttcagcaaaactatcgtggtctggtgtctcctttgtttgaagattttagactatagacttaatacatgtaatggctagagaattattttggtcatctgttttttttttcttgactccattttagtaaatattaaaatttattggatataaagttatacatactatctcttattatagttatgatacctgccattgttgtgtttcaattccctttttcatttctaatatgtatcattttttaattggtattggcagtggtttaacatttgttagtctttccagaaaatgaatttttgttttcttactattccttttaatatatttatttgctaatttgtcagtttctgctctcatctttattactttcttccttctaatgcacttgagtttattctgttgttctttttctagcatcttaattttgatgctttgttcattatttttcaatctgatttaagcatcaaaggctacaaatttccctctgaggactactttggctacattcctacagatttttacagttatttattttctgttatagtttagttctgaatattttttaatttacattattgtttcatcttttaagcatgagctatttagaagtattttttaattttcaaaggatttttgtaactctctctttcctactgtttctaaatcttgtggtcagggaacattgatctgtatttgaatcatttgaaatttgtgcttttaggaccagaaatggtcatttttcacatagattctgtgtaggcttgaaaaaaaccctgcattttgcagtttttgttttctaatatgtccattacatcaagcttgttaattgtgtttgtctcttttatatcttcattgatttttcttgtcttcttcatcaatcaacggcagagggaggaatattaaaatcttccattatgatggtggatttgcctattattctttaaagttctgtcaatttttgcttcatgtattttgagactgtgttattagagcatcaaagttaaaactcagaattatatatcttcctggtaaattgaactgtttcaaaaataattatgtagtaactctctttatctgtagtaatgtttttaaccttaaaggctttttccctccatccattgcatcagttttctcttggtctttgtctaataaatattttctattctcttactgttaacttttcgacttccttgtgctttatatgtgttttgtgtatagctggattttcaaaaatcccctctgaccatttgtcttttaactaaagaatttagaccttgtgaattatacaatcatttctattctttgaaatttgtcctaaaatactctagaaatagcaatatgcctacttaataaagcctagcattaaacaataattttgtgttcttcctgaaaagccaaggatcttaggacactatgactttaatcattccttccaattcatactctatggtgtgtgtatattatgttaccttaattttttctcaagttattattgttattgtttgataaagccactgtccacttaggtttactcatatattgaccacttatttgtttaccactccttcttgtatatcagtccttctctttggaatatctttcagtgcaaatacatgctttaaaatttattttcttgtcaatgataaactctattagttcttgtttgtctttttaaaaaataatttcaatttttattttagattcgggggtacatgtgcaggtttgttacatgggtatattgcatgatgctgaggttggggtacggatcctgtcacccagtctgtaagcatagaacctaatgtgtaattttttctttgtcttaaaatgtctgcttacccttgttcttgaaagaacgctagtattcactggacatttgattatcagttgatagttccattctctctgcacatggaaatattgttctggtgtcttctgggtttcactgttgctgtcagtttattgtcattgctttgtatagcatccttctggctgctcttactgtcttttcttgttctttaatgttatgtagtttcacccttatgtgtctaggtgtgaatattttttgtattcatcctgtttaattaagtttcttgaatctatggattgtatctttcatcagcttgggaaaatgtttacccattatcttttcaaatgcttcttttttcttcttctagaagactgacaagatatgttcatctttctcactccatcatcagtatttcttaacctctctcatactttctctctttcattctgttcactaattctctgttcagctgtgtccagcctctgttaaatccattcactgaagatttattttaatttcaaatgtagtctgcactttatgaagccctatttgattctttttcaaacgttcttagtcatattgtcatattttataaactcttgctccatactcttatgtttagatcattcttgaattctttccataattaaacatacttattttatattttgtgtctgttagtgtcaatatctgaagtttttgcaaatttgattctgttttttctcacctcttgcactcagaaccatgtttccttctttgttttatattgtttgattatgtggttagaagggtaaattttctctctggtaattctttgagacctgggtggatggtgggttcttccagagagggtttgcatctgcttctgcctagtgctgggggcattaccagccagaaacctcttcacacaaaattctcagtatggaggtttcaaaccacccaagtaatatgaaggctgcaaacccatgtgaaaactgacttactgttgtgaattctcagtggaaacatttttcttgtctactcagtgtcaaggtctaagataaacagtcagcctccagatcctcccagagggtggtagtgacaggtgagaaggagataggctcatttctaattcaccttcacactatgggtgcagatttaactaacccaactctttcagaagtatcgtattacagtcaccattgtgctgggccctgaattttgtctcctgttccctcttttctatgagttgctgaaaagtgaagctatattgaccgaatttttaaaaggtactcaagaccaaagccgtcttcatgttctgaatcacattttagattcctccattcactgtgttgagtattccttattacactaatgtagtctactcaggctactgtaacaaaatactgcccactagatagcttagacaacagacatttattttctcaccattctggaggctagaagtccatgatcaaagtgcaactaaattcggtttctgatgagggctctcatcctggctcgtaaatggccaccttctcactgtgtcctctcatggcttttcctctgtgcacacacgaagagagtgctctttgatgcctcctccccttcccataaggacaccactaccatcggattacagccccatccctatgaccttatttaaccttaattacttccctaaaagccccatcttcaaatatattcacattggggattcaacatgtgaattcagggggacatattataattcaatccttaacactaacttggaaaaagctgctttttttatttttatttttattttgtcattttaaaattttacctaacactttaaaattgtttggtccgggtgcctggaaccacagtgctgggaacactggaagcagatttcctctgcacaacattttacaaagaaagattcacatttaattaaattatttcatgatgtacctagttaatgggaaaggacacttcagccacatggggtgagggtggaggctaggccagaaggacttaataccatgaaatcatattaagttgttgactagagggctcttccttgggcactgttacaatccttatctccattttcttttgaacctgaaggtgaggtgtcgggggaagtctaagtaaagtctgaggattttctaagaaacaattagattcacccccagaaggcctagccttggtcagtgtgtggagaccagtgacctccatatggtcactcccctacatgccttgcaagagatcccaccagcctgagtttctaaagatagcacctctgcagagcaccgcttagagtgtgcagagcagtgtttctaatatctctgtggggccttggtgggcttcaggtagtgctgagggagcccagaaaggctgaagagaaccctatcctgatccaggcgggaggagacccagggaacatacaatgcaacaaggagggtctaagtgtggaaactcaaagtctaagactgaggaatagaagttgtcttctgggaaacagcaaggacaatggatgctgtgtgcctaaccctgttcatggaactggcctacaggtgagatacaggtgtatccaaggactgcctatccactcaccttcagacatctccttcagcaaaaagcatagtctctaagctcacagtatgttttatgagatgagcattcattcattcattgatgtagatatggcctctgcccttgaggagtgtgcacgtaagagtgaagaacaggtctgaaaaaaaaaaaaagagtgcaggtaagtcctgatggaggcatgtccagagcgctatgggaaaactcagggaagagctgctaactgggagataagggaagttttcacaaaggaagtgacatgtcaacagggtcctgaaggatgagtaggcttggaaatcagtatctcagggaggacaaatgtgcaaaggcactgaggtttggaatagccccttagaactggaagtaattcaacatgcctggatgcaggtaaggacagaaaggtaagcaggattcagatcatggtgagcccacatgcttggcccagaagtttgggttttatctcaaaacacagattgctaaggctagcagtgttaggctgttgttaacaacaataatagctcttattgtatgcctgtcccattacaagctctaagctaagctgtctatatgaatgattttatttcattctcgtaataggacaatgaattttattttaatatacctatttggtagataaagaaactgaatcatggaaaggttaaaggttaggaaacagctgaagcacagagccagtaagtggcagaactgggatttaaaccccgtctttctagctccaaagcccatgcacttacatagctgggctgtgctgctggatggaacaagatctcagagtagatgaaaggggctgggcttcacctcagtgggatgagcctggaaggacgaggatcactctatctcctgaactaaagcaatagcaggaagatctgagtttttggaaaattactctagcagcaatggagaagtttagaggtggatactggaaggagaaagaccagttaggaggatgaagcagttacctaagtaggaaaaatggggacatccaccaaggctttggaaatgtggaggggaaaacagatgagagagatttaggagatagagtgggacttggtagctgattggatgtgggagctgagggaggaagagaggtcttattcaatattgtatcccaagtgaccaacgtggttccaggcacatagtaggtactcggcctatatttattccatgaacagatgaatgatgacttagtgctttctggcttggtccagtggtagagttaaaaaggaaatacagatggaggaacatgctttgcaggggtcaggagagaaacagtgcatttggaatgtctgtggttcattcaatgtcatttggatatactggatggaaactctgggtaaatctgagtttaagagagaggtttgggtgttatctcagcacgtgggtgagaatagaagcttaaggaatggacaacatttcttggaaagactgaagagaataagaaaattcagaatggatctgagaataccgtcgtgacaggagaaagagcaaaatccagtgaaagaacagagaaggagcaatctgagaggcgggaggagaatcgtgatgcaaacacaggaagagtttccaactagggcatgtctgatcatggcaacgatgacaaatgtcttgctggaaaagtgctagaaggagaccattggctttggccttggaagaagactttgcagtgaagctctaggggcagcaacagacagcagtagggtgggaagcaaatggatgggaggtgaggctgtggaggccaggatgggcagtagccggcaaggaacataagatagagagaaagtttggggttactttggggcatgtgtttaaaatattggaactggagtatgttagtaggcttaggaaaaaatatgcacagagggagagagtgaaggtacaggagaagagggatggtgacagaagggagattctggagtgagagggccacgggattgagaatgcagggctccctttgcgaggagcagggggagaaagatgctgttgttagaaggagctgaaaggtttgcttgtgggagtgtaagagggacatgtgtccccttgctctcctcatagtcatggaatgattatgatgcatccctgacacctacgcaggaggatccttcctgtaattccatctcccttgtaggacctctgctacctgggcttggcaaggagctaggaatgtcccagggactggggccctccaagggcaatgagaaggcccaaagagagaagcagggatgctgtggtgtgggaatggctaagaacctacatcaagacaccagcattaactgagcatctatgggctgtgcgcctctgcactgtgggaacaggaagaacttacagtcttattggagaggcaagttaaggatatgtctgtactcaataaactaggagtaagggaaataaaaacaccccagtgcatcctcctggaaacttcatagattcaaggaacagaggaaagaaggctcagagcaagtgatgcaggcctactccacatgcagcctccatgccctcccttcgactgggatgtcctcgggcaatgttgacctcaccttgggcatttgggttatctcagtccttataatattaatctgacattaacatctgcctacaataatttttcccaaatttcatcagaaatgccttggagacactttaaaaccacagattcccaagctcttttccccaaagatctgattcagtgggtctagggtaggtaccagaacttatttttaaagacgaccctggtggttctgaccagctaaacttctgtcaacaatgcaattccttcttccagcaaagcacacagtggtctctctgccccatctctccctttgggcagccccagcttcagccacactgaactcaggttcacagacacacctggccctttaagacctgtctgggcacatctggtcccagtgtgccttcccttctcctccaggcaaattcctatccccctttgagagacagtccaaacaacccctcttctgagaagccttcctaacttcatcatgtgttgctccttcctgttcctacagcactttttgttttcttgcatttagaatctatttcccccatagctcgtgagcatcctgaaagcaggaatagcactttgtttatttcttccacagttagcacagtgctgggcatagagaagcagctcagcgatatttgaacatgtgagtgactgttggaggaggagctcctctgggatggttctgcccatcccagaggcttgagattcaggccttcttcctccagggcctcctcttgttaggtcccttcagctcagcctcatggaaaaacaaagatgtagacaggactgaaacccagacctgccttgatgccccctacctacacacatctgtctttcttttgcagcttctcagtatgaacacaaaacatttgatccaatttgcacatgagcctcacttgatttgatcaggatagttaatccacctttgctagaaaagaatgaaaagcgagacagaagagagatggagagtgaggatgggagggagagggagggggcatggaaggaagagggaaaggaaagctcgttatatgaacttcaaagcaaagataacagcgttttgattattcactccttggggattatcactgtcactgtttcctttgtagacctgaagaactgagaattaattctccaggcaggtgatcggcagctagtgcaaatgtcagggacatactcgttggcccatttgttcactcacttattcattcagcaaacatttactcaaacaccctctctgtgccaggccctgtgcaagacacctgcgatcagaggtttgccgtgtgcctccacagcccctcctcacatctgggggaccctttaatagcctcctcaagtccaaagcctcattcctttcccttttacagctgtctcgaaatcatgtgctggcatttcccctcgcccagatctggctgtggccatgtggtatccccacacaccttctctgttgctgaagacaaaccctgcccgcttgctagccaggattttgtgcccctcctgtctcccatccatgcttccctggtttgagccctcatcccactgtattgtagtctatgtactcagggtcttctgtgaagctttctagaaacttagaggtctctattggcagcagccatgttatcttgcctgccaatgcccctccaaagcccggcacttggcaggtgtgtaactgttgaatgaatcagtgaataaatgaatcagtcaatccataagtgaatgagtccaagggcttactgctctcagaaccaccaaaatgaaacctcaggtagtgaccaaagttccagaacctctgacccttcttagtacctgctggaggcctctgtccttgaactcctgggagttcaggtcttcagccttcctactggcctcccctcctcctcaccccaggagttaattctctagctcttccctagggcctcagcaagaccctggagggaatcatggttcaagctgtgcccaggaaaagtgagttcccttcctttcatggagctaatagttacactggcagcaacattgtaaactgaggctgggtgggccaaggtcagccctcaggggctcaaagaaatgctctgaggagaaatatgggaggtaaggctggagcacagcattgtggcagggcctctacctagccaggaagtggcaggggcaggccttgcaaagcccacactttccaagccaagatgctgaactctatcctgcagtttcaagagttggcaaactcttctgcggtgacaaacacctgtcttcagaacctgtagccattaggtcgtaattgactgggaggtgcagaaaattcctctgcagaagcttaaaaaacacaccgtttattttctccacataccaaaagtccagaggcagaaagtccagggctggcttggtggttccctccgggtctcatgctccttgtatttttccctctgctgcttttcatatgactctcatcctcatgatcacaagaaggttgctccctctctgtcctcacatctgtattccaggaaaagcaaggagaaagatgaggaaatggtctgaggactcctcaacccatgtttccttgcccagagctctgtcacatagacatctttagctctgagattggcaagatacatacattgccacactcccaataaagttggggttctgttagggagaaataaatggaggaagggacattaagtaacccactatccatggtgttcacagcatcccaaattatgaactagatcaaaatggagctgttttggtttaagcagaggcttccctcctctggctcctcttccacccttgtgggttggccctggagtacctttatggaaccctggggtacctgggagcccagtttgaaaaccattgctctagggaagccatcagcaaacttcttctgtaaagagctagaccataaatattttaggctttaaagtccatgtaaggtctctgttgcatattcttctatgttgtaggttttgttttttcactcattgaaagtgtaaaaaatcattcttaactccaaagtccacaggtccacatataaaaataggctataggacagatttggtctgagagctagttttccaacccctgctgtaggagatagggaggtgctaagagcatttggtacagagtgaaggatgggctgcagagacagacagcccagttaggaaagtgttgtagcaaagcagtccttaaacaaaacagcctcagtctacatctcccgggactctagcttcccacaagactgccctgagctggcagatcctctgcaggcttgtgcaggctttgggcacatgctggcagcacctggagtcctgtcttttggctaatcctggacagcacgtggcaaggggagaatgttctccagggcctccagtgggtgtcctccagggtcccactccatctcccatgattctcaggacaaggtggctgtgacaccccctaatttctcctcatgctcttggaccctgcatcagcctccactggtctctctgcctccaatcctcccttcacactgaattatagcttcccatcgacttgaccatgaagtccagactgcctgctctggctgtgggtaaaatcccctgcagactcagccaggctcttcttcctgtcccactctccttggcccttcacttctcacagtgtagcctgggctgagcccacacacacccttctccatcccgccaggcccagacccacctcctctatggacccccttccatctctctcctctttgcactcctccagcactcaccatcagcaccatgtcctgggcatttagattctactctaaattgtcaggcaagcaagataacttatgggaagcagctagctctgggcttggcacatggcaggtgctcagtaattatgtcctagatgatgggtttgtttattcatttatctaatgggtttaaattgggtgtctgagctgtatacaaatgtgcctctttgatcatgcctatttcatgtgctgccatttctcctgcctccgaaaggcgctttgtgagcttgattgatctgcatgttagttaatgagtcattataggagcctgtctttaaacaaaggccaaagcagagaaggaaaaaaagaaacgaaaaaaagagagtgctagtacattgtgcactagaggctcgtcctgaaactgcagcattgtgtatgttgaacagtcttcttgtgtaattagctcctgcatcagggtcggcactctgaaatgtggttcacatcaatggcagctctaaccagtgatgtgaatcattttatagctctgggttctggccttcaaagcaatattttcccattataggcgtaataatcatacactccctttttggaggtggctgggtgagccgtgtcctctgccccagggctggctggaaggggctgatatggtgagaatatgcagccgggcccctcagtccctgcagagcccaggcccttcctccagcagaagacactacctgccttgtggtgttttatatgcagcagctgtttcctgaccccctgctgggacccagaaaaaagaactcaaggaaagtgtgagagaaaacagaggcttaagtcatgcttcctaccttgtgggcctgtgaccttgttggaacatcatgaggcagtagagcagagtgacaaagagcctggcctctgactgcctgcctggtgggagtcccagctctaccacttgcctgtgtgaccccaggcaagttgcctaaattctgtgcctagcctgtcccatttgtgaaatggaggtactcaaaatagctattgtgctgtattgggggaacctgcccctaatatttagacatcgattctttctattttccataagtgtcagctggctgagaaataaagagaaagagtacaaagagaggaattttacagctgggcctccagggatgacatcacataacagtaggaccgtgctgtccacctgaaccttaaagccagcaagttttattaaggatttcaaaaggggagggggtgcaagaacagggagtaggtcacaagatcacatgcttcaaagggcaaaaaggagaacaaagatcacatgcttctgaggaaacaggacaaggacaaattcagaactactgataagggtctatgttcagctgtgcaggtattgtcttgataaacatcttaaacaacagaaaacagggttcgagagcagagaaccggtctgacctcagatttaccagggtgggtttttttcgccaccctaataagcctgagggtactgcaggagaccagggcttatttcagtccttgtctcaaccacataagacagacactcccagagcggccatttatagacctccccccaggaatgcattcctttcccagggtcttaattattaatattccttgttaggaaaagaatttagcaatatcttccctacttgcacatccatttataggttctctgcaacaagaaaaatatggctctattctgcccaaccctgcaggcagtcagaccttatggttgtcttcccttgttccatgaaaattgctgttattcttttctttctcaaggtgcactgatttcatattgttcaaacacacgttttacaatcagtttgtacagttaacacaatagtggtcctgaggtgatgtatactctcagcttacaaagataacaggattaagagattaaagtaaagacaggcataagaaattataaaagtattaattttgggaactgataaatgtccatattaaaatgaaatcttcacaatttacattcagagattgaagtaaagacaggcgtaagaaattataaaagtattatttgggaactgatatatgtccatattaaaatgaaatcttcacaatttatgctcctctgccacagctccagctggtccctccattcagtgtccctgacttcccacaacagtgctgcatttctcatgagttgatatgtgtaaagtgttcagaacagaattgagcacattgtaggtctcagctcttggagtgatgaaatcgcataagagaagatgatcaaagactatgattgtcttgaagaatctcctagaccagggatcagcaaactatagcctacaggccaaatacagctctttgcttgttttgtaaataaagttttgttggaacacagccacacccattcatgtacacattgtgtatggctatgttcatgctacatcaatagagctgaatatctgtgatacagatcacatgacacacaaagggggaaatatttaccatctgtccctttacagaaaaagtttgccaacttttgttctagatggtaaccactgtgaggggtctgagagcctagcaatccatccatgctagagaagcaggaaagctttggaaattgttctcccagtctacattttttcagcccctggcatgggcctggcccaccgacaggaactggtacagaggcagtgaggcctgacccctgccctccaggagttcatggtgtagtggaggaataagtaaacagacccatcacagtccagcaggtaagtgctaaaacagacgagaggaaggggctgagcaggggctgctccccttgtcaaggttagtcagagagaactgagacaagtcaggctcacagatgagaagaaatattctagggcagtgacagggagcaggaagagcctgcgtaagtcagggtcatgaataggctgccctggtgtgaatgcccaggacttcaagtggccacacaggctgtgcagtggagggcagtcagcagggagcaggtgcagagatgcccttcttatgtttcatgctaggaaatgagactccaggaaatgttctgtaaagcaggagtgtggagtgtgagagatgggtgggagatcccagcctgaggaaatgatcccatgatgatgccattagccaacagggaacattctggataggaaacccagaagggccaaggaatccccactcactattgacaaatcccatctcctctttaataactcgctccaaacactgattgctacaggctcacaccccgcctcacctagacgttgctgcaggcccacatcctacttcacctagaccttgctacaggtccacatcccacctcacctagaccttgctacaggcttacatcccgcctcaccttgaccttgctacaggtccacatcccgcctcacctagaccttgctataggtccataccctgcctcacctagacattgctacaggcccacatcccacttcatctagaccttgctacaggtccacatcccgcctcacctagaccttgctacaggctcacatcctacctcacctagaccttgctacaggcccacatcccacctcacctagaccttgctacaggcccacatcctacctcacctagatcttgctacgggcccacaacccacttcacctagaccttgctacaggtccacaccctgcctcatctagaacttgctacaggctcacatcccacctcacctagaccttgctgcgaattggactccgagctttcaactctccctcaatgctcctgctcctagaacaaaaatctcatgtcatgcctttactgccaacccttccataactccccgttgactttaggacaaagcccaaaattcttagcattaccggcagcctctcataatctgactgctcctatttctctcctatcgccaccctccaccacctccttgcttaaacaactactcagtagttagacctctctggataagtcatcctgttccacaccgctgcctttccctctgcctgggttgctttcccttccatatccattggttgaactccagttcatcttccaaactcagcctgagtttcctttcctccaagaagcctcctttaacctttctcccagtcaaaagcaatcacttccttcctcttctgtgtctatctgtagacccactgacgtgctcacagatactattatccagagatgcatctttctgtgactctcaggccactgcagaggggccctgcatagacactacccaggcttatgaatgagggcagtgtcagtttgcctctgggatacctgagaaagcaccttggggtaaggctctgcagggtccctggcaggatgtgggtgctgaacggtttgatttggatggaggaaacctgcagaaggcgtcagccacaactaggaaaaaatatccacagaaattatatactccttgagttgtagaacagaaagcaaaggagcaacttcagtctccctgttgggggaatgaggatcatcatcagattgaaaccagactgaaacagacaaaaagagatacagattagacatcaggagtgagtgcctgtgtgtgtcctgtccttatgaatggcaccatcccccacccaaacaattgcacaagccagaaacctgcaacttatcctggatctttccctcccctcagcaccacatgcatcctgtctcaaagccctaaatatcactaggaccctccctcttctccgtccacactgctactcttccatcgttcacctgcactaccaaaaaagcctgcaaccatcctcactcctgccaatgagttccacacatactgccacactgacattttctcaaacacctatgcgtccctgtcacccactatttaaaactctactgctcctcccctggcataaattctaattttggagggtagaggtatgagaccttttgaaccaaactccaggaaaacttttcaaattccagaccttcccaagtcaccttcttgcactgaaggcccagtcacattatccccgagagccaggcagctagcaggtatgttcagtttgtagatctgctagcaacagacactgaataatttcttctggaatgttccatctctgccatagctcaggccctgtgcacctgactccttcccagagcatccccctccctccctctccaagcatccccctttggcctgatggggtcatcagtagccttcagaatttcctcagacacccccatctccagtagcacctgcccctgactccagctgggtgagccataggctcctcttcgctcccacagccccctgtagcatccatcccaccccagtgctgtggttatcagtttgcatttctatctccccttcttagcgagggcagataccatgtcatgctcactgtggaaacccaccgcccagcctggcatatggggagtgcttagtaaatatttgtggaaggcaggattaaaacaagaggggggaatcttgttgaaatctctttctgagaacattcatttattcaacaaataaacaaaaaggatggagaaaagcagtcagaggagaagacgagagaaacttctgcaggtccctgggggcaagagagctgagattccacatgtggcctgaaaagttgccaacaagcccatggggatttctgtgcattaaggcgtgaagaaagagtctaatcatctcgctgttggccagatgtgcccggttgctgtgacagccaccagaattggccagatgtgctatgaacatcttcagaaacatcagggggccctggagactgcatggcctggagagaaatagttcacactcattaaagtgggacagaaatggtcagtttgtttaggatggtgtcaccagtgactctgagcattgggacataacacagaaaatccttcctcccctcaaggctttggaaggcttcctcacagcccctgcctgctcctaaccctgtgttccctccctaggtgatcaagctcgcctttgaggagtttgatttggagaggggctatgacaccctgacggtcggtgatggtggtcaggatggggaccagaagacagttctctacatgtaagtgcagtggggcatgttgtttggaaggtgggacggtggctggggttggtggggtggggtttgtggagtcctgcctggtccctagaccatactacagcaaagacagtatcctgcaatgttcctagtttcagcaataatccttctacctctctctactctgaccaaggggaaaagagcactgggcaccttctcactgaattcatatgaaatgtgaatagaatgagcagtctgttagggggcaggggagatcgaggttttgtggatgaacctggagccttccactggctggctgcttccatgcagaccttgattctgccaccctgacagtttttactccaggccacatccagccgtggcagcctgacctcagacagagataatggaaatgagttgctaacctttctgcatgctcagagctccctgggaaatggatggtttcagagaatcaggaccatatagacatagtggccacacttcctgagccaaaaaagaccagtatgacatgttccagacaagggagaggagaatatcaagctgtcatgggattctgctatgttgagtctgtgctcttggggaccatttagcttctcttttgcccaccaccaatagcctgacttgaaaaccaggaaaaaggccaagcgtggtggtgtattgatgtaatcccagcactttggcaggccaaggcagacggattgcttgagctcaggaggtcaaaaccagcctgggcaacatgttgaaaacccatctctacaaaaaattcaaaaattagctggatgtggtggtgcacgcctgtatagtcccagctactcaggaggctgaggcaggaggatagcttgagcctgggaggttgaggctgcagtgagctgagagcatgccactacactctagcctgggtgacagagtgagatcctgtctaaaaaaagaaaaaaaaagtcaggaaatgcttctgctcaggacatgtggcttagcttcagagacaaacaccctgaccacatccatctcccttccaggaaggaggtggagtgtcaccaacattaaacacctaccatgctcccaggcactgggatggaaacttttgcatcaattatctcgcttaagccctggtgttattattctcttttaacagatggggagactgaggcccaaaggtttcagagaaggttgatagcagaaccagcactcaagttcatgtcttttgatttcagccaaggacaatgtcccatgccacactccttcccaacaaggctagctccaggatatctccttctggttctaatgctgaatgaaaaatggccatttagtaacagctggcttgtcctgaggctgttcttttctgggtgtttttcacaacttccctacacctacctggagatgatgctatacaggcagttacatgactcatcttatccaatggtacccactgaatcaggtgacatggctgggacttgggatttctccagacaaaggaatggaatgtgagcccacagggcattctcccccatgcctaattcactgtattagtgagggttctccagagaaacagaacaataggagatagagatagatagatagatgatagatagatagatagatagatagatagatagatagatagatattagagagatgatagacgattgattgatagatgatagatgatacacagatagatgataaatagatgatagatgattgatagatgatagacagatagatgatagatagatagatagatagatagatagatagatagatagacagacaaacagcaaatagatagataatttgttgtaaagaattgtctcatgtgattttgggagactgacaggtcccaagatcttccaggtgagttaagaagctagaaacccaggatagtcaataatggagttgcagtccaaatgccagtaggttcaagatccaggaagagctgatgttacagttcaagttcaaaagccagaagtgagctgatgtctcagtttaaagccaattggacaggaggaattctcttattcaggggagggtccatctttttgttctgtttggcccttcaactgattggatgaggtccacccaccttggagagggcaatctgctttactcagtctgtcgatttcagtgttcatctcattcaaacacactctcacagaaacacccagaataatgtttgaccaagtagctgggtaccctgtggcctagtcaagttgacacataaaattcaccatcacacttacctctccccctcacttggtgcatccccatcactcattttctgccctagtttactgacccatatggtgcctcagctctttgtgcccaagagactaggatcccagctctctttcctcccacaatcccaatgtgctttgacatagagagaaccttagaatagcagaacttttgaaaaggctattgaggatcataccatacaatcccctcatttaacatagagtgaaaaagcccagagaggctcaaccacttgcccaaggtcccacagcaaatgaatggtggactcagagcctggtgctgtaattgggtcaaacagaggaaaagcaggggtcccagccttttcccttgctcatcagcaccccagagtcaggagccagcactggcctggccacaatccttactcagcttgtcagagcccaggctcagggatgtcacacaggccaggctgttggatcccatgtgctctatccgagctccacttccatatcccccatggtgtgatgacctctctgcagctgactcaacagcctcccaagctctgagaccctgggtgaagcagagattaggactcattagttcagttgcccactccacaaccccctgcctccatctgtgctggtaatttgtctgatctcaacaaaagaatgaggttggatttcttctggaaatcccagcctgcacaggggacccctggctctgccactgtatcaggttgaccttggagaagccactgcccattctgcacttccatattctcattgtactatgggctgacaacccctaccttcctggcaacagggccattaaatgagataatgggtaggaaattgataagtgcagtatcttacatgggtaggtgcttggggttgggattgtgaattgaatccccccctccccgcccccacacccatgcttaaaccctcttcttcaataagaatgtggccctcagataatgactacactctaagccttgttccttatcctggaatggaaggagatgtctcattgaaagaatggcttgggttccaactggagaaatgggtttctgtgaggggaaacccacataaagacagcaaggaggtgggggtggcggtggtcttttctgcaatacaggtcacacaagagatcaaaagttgcaagaatgtagacaccctcttgattggatttggctccaactatccctgtcccctgagcaagtaaggacacagatctcccttgtgagcccaagggtcagggctagagagtcaaagttgtgattcaacccatgagattctacccacagccaaggggaagacaggatgagtcttcccagcacagggagagcatgctgctgggctccagagtcagaaacacagtggggcccagaatttgcccgagcgggcctggatcctggatagtcctttaaatgtcatcggtcaggcaatcattctattcgggtgtcatggtggagagcacacctctaaatatctctctcctgccagcctgacaggtacatcggtcccggatctcattgtcagcaccaatcatcaaatgtggctcctcttccagactgatggcagtggcagttccctgggattcaaggcttcttatgaaggtaactgcttttggcaagccagatgaactgtgtcctgggagtcagagacggggtctggatttgcagtcagaattttttttttttttttttttgagacggagtctcactctgttgcccaggctggagtgccgtggcacgatcttagctcactacagcctccgcctcccaggttcaagtgattctcctgcctcagcctcccgagtagctgggactacaggcgcacaccaacatgcctggctaatttttgtatttttagtagagacggggtctcaccatgttggccaagctgatctcgaactcctgacctcaaatgacccacctgcctcagcctcccaacgtgctggggttacaggcgtgagccaccatgcccggccacgggatcctggttctcccctgcactagcttcctcccccttaggcatgttattccacttctctgagccccagccacctctttgttctgagggccttctggttgttttgaggattatctgggataaaacacttaaaatgctaggcacccagcatcagatgcacacctcagttccatccccaattcatacctggttcatggagacttttaagaggcctcacttatttttaaaatctttagagaggacaatagcttcccaagataccctattgggttgcatgtgatgaatgagtgactctgtgcatagggctaggaacagataaacaccactgttggtggcctgagaaagatgcagacaagagtcttcatctcttgcttagaataggcattaagggaactgcaaaccctggggcccaggagataccctcaacatcacccttctgaccacttccaaaccccctttggccaataacagctaacgccagtccctacaaaggtggaaggagaagccatccacaagttactgttaagcccctcttaggtactagacgctagaccagcacaagggggacagacacatcaagtctaggcatcgtctcaactgacttgtgctctagtggcgagatggaggggaaagcaaacgaagtggcatgcaaaagagctgcctggacagtgccagtgggagcacagagaagggagcagacatcttttcaggaacatctgaaaggggatcaggaaagcgctttgtcacaaaagtgagcctaaagtcctcagaatgactaggtggctactagggagacaggcccagggagcggggagaaggtgtcccttcagtgtggctcacacagcatacccccagtgtaccataggttcctcctgctccaggacctgtactctgtttcgaaactgggtacaggtacacaggaggtgtattcgtgttcttgggctggctggcttcacacaacggacatttattctctcacattctggagcctggaagtctgacgccaaggctcagcagggccatgcccccactatgggtagaatcctcccctgcttctccctagcttctggtggtggctgtgagtccttgctgttccttggctgtagctgcatcactccagtctctgcctttgtcatcacacaaccttcctgtgtgtctctctgtcctcttcttataaggacaccagcatattagactaagggccctccctactccagcatggctccatcttaacttgattacatttgcagcaactctgtttccaaataagatcacatttataagtaccagaagtcagaacttcagcacgtctttttggggaacacagttcaccccataacaggaggctagcccatactacactaacaatgtcatacaatgatgtctcctggggtaaagatgacagctatactgagattttttaagaataggaggccatgtgtctagggaagacagaacaacagacagaaaatacttatggggtgacagactctgagtgcagatcctggttctgtcactttctagctccatggcaggtcatggaacctttctcaggatctgtttcttcatctgtgaaacagagataataatacaacctaggtctcaagggtcctgtgaagatggttagattaagaaatgtgaacataagaaatgttgcaaattgcaaagcaattagtgagtaactaatgagccagtacacaggtagttcaatgagcgggctgttccggtgcataaagttacacataagcagctgtggggctatgagaggagcagcagacaaaactatcaggagaccttgattcaggtccaagccctgtcactcactactttgaaaaggggaatggagatggatgcaaagttgctaagttttcacccatttcagaaattctatggatgttcagcagtgaatgttcccaaaagcagggagaaatgattccatgtcatcctcatgcccttaatctgtccatattttgccaacggtttgaataagaagtaaatagcgtgaacttgaaagggatgacaatactagtcagcaaacagagtgcagaaagatctgggtggggtagagccattgactaaattagtaggaaaagataaagtgggaataaatatcaagtcatgatttaagacttaaaaagaaattagctactggaatttatcccaggaagttagttgtgctttatcctgccctgagcaggcaccagagaattgagcttagatgtgggacctcagcttgggatagataaggagaggatttaaggcaattcctgtaagaaatgttgatggcccccgaatgtttatgcaggagaagaagtggacttgggagatttgagagctgtgtccagatatctgaagggctttcatgtgggaaagaggaattagatgcatttggtgtgatcttgttggaaaagaaagggacataccacttgttgaaagcctgctatgtgccatagctttatgttcattatctcagggttttcacagtgtcttgcaaagacctgcggtaccctccagggacctccatggtaggatagggcatgcccaggatggagggttctgaccaccctgcctctgtttcttctcctttcttctcttttgctctttgtaagccttcttttaagagaggattcatagctaaccactggcttgaaagacattacttcatctcattcattgcttacaatgataaaatggctgctattttatggatgaagaatctgagactcagaggggtgaagtaatctgcctgaggtcacacacaagtgtggaaagtagcagagctgggatttgaacccatgtctccctggcttcagaagcccatggattttccccttgcaccagaagcctcccaaggttacataatttcaattccttataaaatctttaatagaagccaaagctttgccccagtcaaatagaccaagtatcatgagcctggattccatgtcaccagaggttggggagttagttcacaagttcatttgtccatttcactcagccagtattggctaagcttttgttatgtgaccaacattttgctgggtgctgtgattataatagctagcagcttggatgtggtataaagcatatgctatgtgaatgctgctcatggactaggtgtcagcaggacttctccttggagccgtgacaaattaggaaggacagtctgggtgtttagagacatggcaaacccacagggactacgtcaggttctgtgcacagaggcagtggattctagaaaatagcacagactctgaaattgcaccagacctagtaaatcccagtgtggtcccagctgtgtaagcttgagtcttgtggtctctctgagcctcagttccccgacttgtacaatggaaataatgatgccaatctgagagcgttgttaggagagtgaaatgagatctcaaagctccttgcacattgcctggcatagagatggtgccttccctgggggtgtcaccaaagtttctctccagccaaaccttccacatttcttgtcctccaggccaggcacctggatctgcctccaggtgctctgataggccctgggtttaggtccctgccttacaccagcactccccacctagggccctccctccccatactggcagagaaatgaggtggctctgtaaggcctcagtgcagggcgtggagccagaagtggcaggaggcagaatcaggctcgcaggagcctggaggcctcacagtgcgttggaacctggctcagtgaaaattcaaggggctaagttgggtgggccacttttttgtttttgtcccttccacctttgactttttatatgaggggcaaagcccatcattctcacaccctcctggtgaggagccccctctactataaaaaggtgggtgggttgagtccccggcaccccgatgtgactccctgtccttgcccatcctgctccttgggctcctatcacctccacctcctggttttcttttacctctctggctgctccttcacagctcctccatggctccccactgcccctcagagtctatcctcagccttcagtcctcttattctagaaccttctgcagttgatcacgtgtacttccatggtttcagcctcaacccaaactctggtgacttccacatctgttctccacttgcatttcagtcttcctgttacacattttgatatggcttccctctcagctgtctcaaacccacccacctgtatagtctgctgacaacaaaatgccctgggatagggagtcacatggtgggggccggggactcaacccacccacctttttatagtatagggagctcctcaccaggagggtgtgagaatgatgggcttcgcccctcaaataaaaagtcaaaggcggaagggacaaaaacaaaaaagactgggtggtttacatttgcaacaactctgttttcaaataagatcacatttataggtaccggagtcagaacttcaacacgtctttttggggggcacagagcaccccataacagaaggccggcccatctttcctacactaacactgtcataccacaatgtcccctggggtaaagataacggttgtactgttttaataggaggccatgtgtctagagaaggcagaacagcaccccgttttctcccagttctagaggctggaaatccaaggttaaggatttggccaatttggtttctgatgagggctttcttcgtggcttgtagacagctaccttctcaccatggccttgcatgggctttcctgggtgcatgcacacacaggagagagagagagagagagagagagagagagagagagagagagaatgagagaatgagcatggtgttgtttcttcttagacatccatcctctcagatcggggccctgcccttatgacctcatttaaccttaattacttccttagaggccccatcttcaaatacagtcacactgggggctaagagcctcaatacaggaatttgggggagttgggggaacacacaagttcagtccgtaataccatccaaaaccaagctcgccatctctgcccccacacctgtgacctgcacctgtgtaccccatcttcacgaacagcaccaccatccatgccatccctaggcctcatctccgcctcctccttttccctctccccacctctgactccattcccagattctgtcagttttccgcatcccacttctgtttcactgctgagctgagtccctccctcatcacctctcacttgaatagtggcagagtcttcccaaccagcatcgctggctctagtcctctcactcccatctacccatctgccacatggagcagtgatcttcccagaatccaaatctggcacaattcccccctagttaaaaaaaaaatgacaacttcccattgattttaggataaagtataacgttttctacatgacatccgaagttctccataataataattccaccaagttctggtttctacgaatccattcaagacaaaaatctctgcagtcctgtagagcctaattcagtgcctggcacaggacacatgctcagaaaagcatgtagaattaaattgtaatgaggatctactcagtcataatcaggtaccctcctcagcaccctctcaattcccttttggtccactttaccaccttcctagtgcacagatgccaacagcccatgcattctctattgtccctgtaggatttggggttgggcaaacccagcttataatcaggatcttcctttgactccctgtgtgccagtctctccccatcaatgagcctgaatttcctaacctgtgaagaggggctgatgaatggttatctttccagggtctcatgaggactcagtatagtcaagcacccagcatagggcctgacatttagtaaatgctcagttggaagcttactcccttctctgctctccaaggcctacagctcttcttccaacctacatcattacctgaagcttcagaattacctctgcctccattttagcccctgttattccagctcctggggagttccacacaggatagacatctcgactcaggaacgagcaggggttggggggcgggtagctgtgatgcaggtttctcgtaggatggcataaggcatccaagggcagagacctcccatatccatcatttccactcatcccttaggcacatctggctgcatcatcatcatcaatacccactctgtcccaatttgagcagagagatacaaccttaggggcaggcaggtggcactccagtatcatcctttcttcctcattgaaagcatgaacctggtgggaaaattggggcatttgcttcccagaaatccctccagttctgcttgtcacaatcccaggtcagggggcgggggaggggactcctgatctgtcaatatctgagcactctgagccagtctccctccatgggggcgaccagctgtgggaaatgcagtcatagttgcaatttctttgcttcccagtagaacaagaaatatttaaggaacaggcaattagcacttaccagaaacattataaaattacatacaacttgctaacaagttttagcatcaatctggaagtctccttgcttccttactggagtctggaatctggcagcttaatgctgagtctgggaggctggcccaggggaggaagaagctgggacctggaccctacagacatgaaggagcaggacagtagagattatgcagaggggctgcccaacagtccagggcactcatgttagaaatgagctcatctgtttgttcaacattttctaaggccctgtgatgtgttgcagacaatgttcaggacactgaggctacaaggacagcaagacaatctctgccttcacctaattcatagtccattttcagtagcatagaacaagtgctagaagacagggaaatacaaaggaggggcagcaaatcttgctcaagggcatcaggggagtctccctggaggaggtgatgtctgaaactgagacttgcttgaaggatgaaaaagagtttgtcagactcccttgagagagggaacaggtgggcttagaaagctgacatgcagataagattgaggctaaaacctcagtaaaaataaagtctgagagcaagttggggagaagagggccaagacttgctctctgcaggcagtgccacatccccttcttcagaacttcactccagtggtgggcactgctgagcccccagaagaggtggttttagaagcagacttcaaaggaggccaagggcagccgaccagcatcactcaccactccctctaggacaccgcctttcctcttgtcagatgccaagcacatggctattttcagcctctcttctgttattttcagtacacctctatttcttgtcttttccccataaactggaaggcccaaacattccaactttggccaagaatgtcactaacatgttcctaagatgcccgctgagtttccatgatacctctaaaggtttttcaggcactgggagccaaagttgagctagatacaagcagcagctgcctcttctcaaaaagtcccagtgggatccagcctgttctagcccctggaggctgggctggcaaacagcagaggatgctgccgcattaaaatttggtagaaagtaatttgtcagtgagatgtgctctctaaatacatagcttttgcaaacggtaagctttagtttggggctaatgcagacagcttggaggctacctccatgtcctttgtttccagcctcctttggctggtgacaaacccatgacagtgttatagaggaaggagatggggagggaagaatgtcacccacttcatccagccatacctccattccacttgtggcaatcgtgtgcagaaaaacacatcagtccccataggtgcacatacagatgtggggtctctcacctcctggtgcccttcgcataatcagaagtagaaaagcagagtggggtgtggttctgaggcaatccaggtggtctgggcatgcccacagggtgttcctaatgcaccgaagatgtcctggtcactcactaggagtttgtgctgattcaacaacaggtctgagcacttagtatgcataaggcactgggcttggttctggagatacaaagagtggaagggatgcgacccctggctctgagggagctgacaacccacaggatggagcttaaatgacttattactcatcgaaccaagcccttcagggtctccctccaaccatctctccggcctcttctctcttcatcacttgagcttcccactacactgagcttctagctcttctctagactctacgctgttgtcctccatttctcctttcctgctgctttccttccatcctctcctccatcctcccccatcatgcctcaaaagtttattgaatcccctctctgtgccttgcacttcactagaaaagctgggatatagacatttcaaaaaacattggctcggtcctcaaggaacttaccaattaacagtgggaaacacacgcccaaaattgcagcacccgttgctataacaacagaaatgtccaagggggctgggagcgagagagaaagagctcctaagtctgcctgggcgattcgaaagaaggtcccacatgggaatgcacttgcaccaacactgaaagatgattctttgtctggtagacaaagcaaagggtgttcatttcgggaagagaggatggcaggtgccacgttacagccatctgaggggcggctgggctctgcaaacagcagcgacaataacactgaggaaatatggttagtcactggttacacactgcatactggacattttgacaattatcttgtgtacagaagctcatttaatcctcacaacaaccttgttattaccatttccattttacagatgacaaaactaaggctcagagaaaataagtcacatgcccaaggtctgttccttagtatcagagccaggatttagatcctggactttgtgatcccagagctcttgccactgcactattctacctccctacagatcactcattgctgtgccgtgtaaatctcaaggtcgctgatggccaaagagcaggctggggtgggaggggtaggcaagggtcctgccatgctgaggagttaggattttagtctgtggatttcaggaagctgtaaaaggatcaatgagcaggggatggtaatcatcatatttttatttctgagtgatcttgtgctcctttgtagagtatgaaatagaaggaagagccaggggaaccataggctgctactggcacccagatgaggagttgcaagggctgaactcaggcagggagagacggggtggatagcagagggttctgggtatgtgggaggaggagtcaacaggaggagactaaggagagctgagggagaaggacagggcaatccaggctgactcccagatttgaacaacctgtaagaaacctgtccagcgctcccagccagaggcttgagctgccccttctgctatcacccaagtcatgtggtcaggtctacatcctctccattgccctggtcatttgtattggaattatctccatacccacctgaccctgagttctccaggggcaggggccgtggggcaggcaatgctatacctttagtgcttagtgtggcatttggcacggtttccatgcaaaatatttgctaagctcagagtattctgtgtgttccagggactgtgctaagtgccgggtacacagtgatcaaaaatacataatggatgcctgccttcatggggcttacattctagggggtgggagtgaggggggctgggtggtgaatcatcttgtgcccaatgcccaaccagagctccagaagaacaaattttcatccttttattcgctgttatacccccaatgtctagaacagtaaccagtaaaatacttgttgaatgaacagatgggtagttacaaggggcatcattgctataaagggaaagaatgtggtgccaaaatgggaggattgctcgagcccaggagttcgaggctgcagtaagctgtgatagcaccactgcactccagtttgggcaacagagcaagaccctgtctcaaaagaaaaaataaaaagaatggggtgcaaagaaagaaaagtaaaagggaaatgtctaagatctaaggtgtgtggtcaaggaaaatgtcttggaggaggtaacattgtaaaccaaagtctgttaatgcaaggcgttagtcatgccaaaggaagaggagaggaagctcaagccaggggaataatgagttagtgaaggagccagtgaagcctcccagcctcatgtgaaaggcagcaaatcctcgtcttcctccaagcagtgcctcccctcttggagcacatcaaatattcagtgaatttacagaaccacatgatacagtcccttctgtacagacattttcataaaagacgattccaatttggtattagaaatggaaaaacctggggagaagagtgagattgatcacagatgatggggataaaacagctgagaaaggggaagcaaatatgctgagtggcagagctcagtcatgatggacttctgaggcatcttagaagcaatcatctcatgttttccagtttgcttttggtaggcaaaaggagagagacaggagaaacactcataaaacggaattatattaaaccagataacaggaaattgcatgtgtgatttttctgcaagtcaaaatccatttgtctatttgcaattctgggtcctgacgtcagacttggtcagcacctgaccagaagtgccaagatcaaacacctttcaggcagggcagtggagcacagggagccctttgcaggaaggcagcggccgtggtctctgtgtttccagcaggagttgactctgagcttggagagaaggcttaggccaggacaggaggtgtcaaagggacagaagccagccagcagccccctctgccttcctggaaggagctcccaaactctcaccccaccctgctctgttcttcctcttccttccacccaatcttgattctctgagcaacacatcccccaatgccttagaactctttgccaaatgcttccttgaatctgagttcccgtgaagtcaccacgaccctgtagccctctgcagtgctagcagctcacttccccacacccaatgaacttcaccttgagaggggctcgtatgcttgctcgccgatgccattccacccacgtgtaaaccccttcccctttgaccttatgctgtcttcagctctgacactttctacccctcctcatcactgtcactgatctcctcctccctacttgccatcaccttgcctctcaggccttgaccttctcacttcctttcagtgtacttcaccctggctgcagctggacctcatcatcaagcacctctgaaatctcaattccacatacttcagctttttcacatgacactccctttactcctgcccatcatcccttcccatcctctatttcccccatcgccccctgctcctttcacctctttccttcttcattctaagcctcttggataacactttggccattctttttaacaacatgttcagctcctttgccccgttgtcttccatttctccaagcccaatcccccctcactcagtcaatcctcctacccctttctctacttctacaggaactgagtggccaagggctgctgggacaagtcatatagccctgctggatggtatccctacaaatgagtcatctgcaccctcggcgggccccagaggtgcatggcaatccatctaggcatgatttcctcttctccagagtgacagcttcagacattctcttcaagtcgttttcccatgacttgtccctcaccttcagcaaagactgtgacctcctccacttagaaaatagagcctgtgtcatcacaggatctccctcggtctcctgccatcctacctgaaaactcactgccaccacttcttccctctttactgcagtcttgagggaaggacatccctcacggtctctaaggctgggcctctagtgtgctctcagtcccatgcctctctccttctctggagcccctgtagggggcccctttctcctccacatcttcagctaaccattcaatacatctttcctcccaccccttcattcttctctagcatttcaatatggtcaagtttctcctgtactaaactactttaaccactcccacccaggccatatgcctcatgagctgctacctaatttctctagagagagtgatatcaccttctcttctcctgtttggtattggccccatcagtacacacaatcctggcagtatcaatgtgacctctttttgctaacctgtttttcaatcctatgtaaacttccctgcagcattcaaggctgttgatctccttcttgaaactcattcttctttaagctcctgtgaccccactctcccagtctagcattctgctggtccctacattgttcctaactgtcctgtcctagaccaacatcccttctcactctccttgggtaatttcatccttgtcatggcttcttttacaatctatgagctgaatttctagaccaggcttctctcttgaacttaagacccatatagccacttcctgctagatatttccacttggaggtcccactagtaccttaaaactcagcatcccctactgatgaccctccattcagacctatacctctttctgcattcttgtctcagtgagggtacacccaagtgctcaggccaggcacttagttatgtaactaaagttagctgtgacaataactattgggttattggaggaccacatcctccaagaagcctttcctgacccaggtctgggactagggtcaggtgagcagggcactcatgggcacgaaatttaagtgatggggaaaaaaaaactcagcaattaagataaataacacttaatgcaaattttttttaaaaattaatattagtgcaaaatatccgtgttaaaacacatcaacatttgaatcaaagacaggctctgacagtgctgggactatggtgaagaccagtgaggtgagtgatctgagcatagggttggatccaggctttattttaaatgttggtatttttcttcattgtgaattggatttatggcattaattgtaattttctagaaaaaaatatcgcactaagatattatttgtcatgataactgagattttggcgccccttgaaattttgtagatgaggttagtacttccattctccacaccctatttccagactgatcctccacatttgagttaggtgcttctcctatgtgcatccacagcacgaatcccctgtatcataaacacctatttccttgtctgttcatttcttgagggcagagaccatatccagatgtcaagggtctagcacagcaactggcacatagtaggtgctcattgcattgttcgtaagtgggtgcctgtgattgcatgatggtaggaggaagtgatgggtgggtggatgtgggcatgtgcgcagggctgtgcctacacgatgggaaggctgggcagattccttcatcccccttaggatcccctttttcttaagccaatcacagcctcagactagctgctgtgggcaggaacacaggcacatgtaccccacgtgcatatctcctgcagcaatggtggggcctcactaggaaaccttatatctgggttctgcccctggcagcaggaaggatccagctctgtcttgaaatgctgtgtaactttcaccaggtctcaaaatgcctgcagtgacagccctcacaccccaggctctcgcatcccagagagcatgtctggggacatctggaggcaggtgggtcctgctgcttgcttctccacgttgacttatcacaggagccccttctttccttcagattccctggagctctgggacctgtagcaaagggaccatgttcctggaatgcctcagtgtatcccctcccccatccctgagcctgagcaaagccagcttcagaggggtttcagctatgttttcagcagatgtacttgtagagggtgaggccagggggacatgtgaggtgagaggcaagtgggctgacttacatttgatttgagatgcctcacacctggcacatggtcacacagactcccctgcacaaaggggaggacccttgttgttcaacttagatgatcacacacacacacacacacacacacacacacacacacacacaatcccagccatagaatgccttgtcctgcctgctctcagcacaaagctggcagccttcgttttgggttaacatgaatgcaacagtcaagagcccgcccataaaaggcagtgcctggagctgcccagcccacagaagcccccagtgtggtaggaaagcctttgcagaatcatccctgtcaggatcacacacaccaacttcagggactgtggctctgacagcccatgatggtgtctaccgaacaggcagggtccctttttcctgagaatcctaggtagtgtccaaaaaactcccctgatgactctgggcccctctctcccaaatctcgggactcatacagtcctcacctcaccgtctggcactggcttcatgacctcctgtctatcctgcaggacgcccttctccccggaaacagagctcccctccttccctcttcttcctcctcccctccaccaccccctcctcctcgtccatctctcacagcattaagcacagcatgagtgggagtggaggtgactccagaggaagctccagaggcttggccaggacatactcctttccagaagcatctggatcctgactgcctctccggtgaggtagccagcccatcatgcccactgggttcagggcccccagagctgtctcagggaacccactccatgtctgtctcaccactgttgactcaagtgaactttcaaagcatactcaatgagtcatttgtttcattttacctgctaccattgcaaattgaattaaggaaacatctccatgaaggttcttccacatcagcaggcagtgaacatttattctcaattaatctctggtttgggaaaaagacagggagcaaagcctcaactgctgtgtcatcttgacttgcctttgctgctcagaaatggactgtacttgagatctgtcgtgacattagcagttcagatgcaaggtcaggttcagtgaggaagtctccaaagacttctaatgctgtggaacttgttgctcctgggacaggtaacctgtgaagaatgtagacccaccttctccctaaaattgcttcatctcatattggatttagggaggggtaagggatcaaaacatccaagcatctagaacactttatgtggacacagagtctcaggcacttgatagctggaagcccattcatcctaggatgctgcgatgaaacaggacattgcaggatttctcacaaacctcattccttataagaacgttgaatcctacctgtgtcactctgagcactgacttatggcagaagagcagtagagcttgtcatgtggaccttcagctccaaaagaggtataaagtcaccttttgtctctgttttctcatcttcctgtctttcagagatcgagcagggcagttgcggtgaccctggcatacctgcatatggccggagggaaggctcccggtttcaccacggtgacacactcaagtttgagtgccagcccgcctttgagctggtgggacagaaggcaatcacatgccaaaagaataaccaatggtcggctaagaagccaggctgcgtgtgtaagtgagcagggaggaggccacgccagggtcttcactgagaggcaggggcccgtttcctagctaatccaggggccccgtccctgggaaccttgcaggttgtaacaacagctgcactctggttggtttattctactcctcggaacgttgctggtggggtccttatttctggcaggaatgtcgactgtagcactgagaacaagtgctcctgacatttggggatgctcttcaacaccgtcttacccttcttggtgatccttaagagcaaggagacaccactgggacaaagcccaccaggctcagacccagacatttcctgctcaccgtcattgccacccctgacaccatctaatccagcagggtggaagggactgtcaagtttgtaaggctgtagacaccaccagcctccagtaactgtgggaaactggccttgccaggatataaacagtttcctaaaattgctttatctcatattggatttagggagggaaaagggatcaagctatctttggactgttgatcttttggggaaggggttggagttgagtgctctgttctgtggagataacaaagaagcccttcttccttcctcttggatgacctgaccatactttgcagcacaaatgatatcttaaatcttcagtcgcgttgggattggcaaggatgaggggctgtgtgtagccaagggaggcccagacatggtctctgtgggaaatcaaaatttccagcttctctgggctgttacgtcttctcccatcccttgtcactccaccttctccatctctttccatgtgcttctctcagggaaaggcaggcagcctgaccctcagatccttcacccggctcagtgggttacttggggcctcgagttctgcacactagagatcggtgatccctcagggctgggagaggaatagcctgggagactgtcagggtctctgtgatgactgagagtttggtgtatgagttgatgagttgggatgaaccatggtgatgatactttttaaatgaaaaaaaaaaatcacgttgtccaacaaagcattttgatgacttttgagtttatttatgtaaaaagtcttgagaggtttaaagatcaagtcacccttaaatacacattgaacaactcacccttattgaaaaaaaaataaattgcatgatatctgcccatccctgctccccactgtggttagaatatagagcccaacagcattagccacgtagcatgctgggagccacaaggacctggaggagcagggagcagctcggggcaggcaaacacaaaggctttgcccattgcagagaccaagcccagggacaggtgcacggggcagggctctgcagaagcagggcctgagaagataaaggtacacacagtgggagccccaggtgccatgggggcttaatctctgaaatccatctagataaaacaaggcagggagaaatggaggagggtctagcttctgcgacaaagagctgggaggattcacatgggaagcaaaaccagccagcctcttaggaccaggataagattcactgtcccccaagctgaaagaggcaggtagcagaatgccagctgagggactgttgcttgacccctccaagagtttacttggccctttggctcttaggagcaggtttataacatccctgtaaaaccttcaccaagggcagaagaccttgaagtgctgcccagcaggcccttggtgtccacaagcagggccggcagcctccagtgagctgggcactgcttgcaaacagctgagaaggaaagaagataggtctgtcccaacaagtatgtgtcagtgctccctgtggtttgaaacaaggatgaggggtctgaggcttatggatgaaagctaagcaggtactctggggagctgacatggcatttcttcttctagacaattctgggatagagcaggatgacatccccaggcccttccatcactcaagtgtgtctggacattggagagtaagaggacacagcttgaatctcagggatgctggcttccatggaggaagccagagggagccaaccggccccatgcctttgcagcatatagccaggtcacccttgcatttcaacaaagtgagggacttccatctgcccactccctactgagtacccagcaggtaagctgatgcttttataggtcctgggcattgccctcagggagctcatagtccaattggtgataagaaagtatggtgataagaaaggcctggtacactgagatgactttggtttcaaaatctgaagaccaggttcttagttctagctcagctttgtggctaaagccaagcatcttctctctggattttcatgtactgacctatccaatagggtagcactccattgtggctccaaatattctaagcctctatgatcatatttgtagaaaaagatgactatgacatgaatagtcctcacatttcccacaataaatacctggaagctactttgaaagtggatcattacagagcaggtcatacttcgattgagagacaatgttaaactttggagttctgctcttaactctagatcaaatataatgttatcaatagaaaagggacaatacctataaacatctataaaaatataaaatataaggttggtctctgtgttttacaaagcgctcataaatgtacatacaaaagctcctctagcaaaagtcagcataagtgccctaaattttccaatacattagtcacaataaatattaatacaatacttggcaaataacattgccctttccttattgagagctataaggggattggggatattatttcaatggctcaaatttatttgagaagttgtctgaagaggtgcaaagtattgtattgttcttctcttgaaacattttcttcaaaacaactctttactagggaattaccctgccaagaatacacaaatacactcttccttcatgttccaaaacattttctgtagcaagcagagacttcagaatcattttgttggcttttgagctgccctcacagtagtagatgctcaatagatagtctttttttaatttaggtttttaagaagatgatttatctcacagtgaaaaacgttttgaaagaaaaggtggagctagcttctttgctcttactctctggtcctcagttaattcacatctcccgggacccctgctcaaaatcaatgggaagtaataccactttccatccattcaagctattgactgcctgtcttccctgtgctgagcaccatgcattggattcagagttgttcagtctctgcctaggaaattgctcatcctggctgtcatggtgggaaagctttggccaggctgcatatattctttaccttccagaagctttgccattttacttccttccttacaaaagaatagagagcatttcccatacaatcttgtccagctattcttccaccacaagagatacaatggcaaggaagatacaaataactctgatggtggtttgcacaatacttgatgctttgacgacaggctggcagaatgcttcacacttcttaaggaagccaggaaaccaattatcaatccattagcagccactttcaaaagaagcttcaaaacagccttcaccagagatatgccaagaatgcatgaatgcacactttcctttgccattttgtaaaccaccttaagaagatgtgaatcctaattgctcagttcttaatgtgtatagtatatgtgtgaaatgtgaaggcaggaacttcttggatgtatacgatttaagttacaaatcagcaatctaatcttgagaggtcaagggagggaaaattggatccttgggtgctcagggaaaatgtcccagaagatacaagacttgagctgggcttttggagagttggaagggaaagagatgctgtgggaaatggcccacagagatgctgtgggaaatggccctactggccctctgctagtatcttcctgtcctttactctgacttcctccttacttatcccaccttctgttctggtgacacacacacacacacacacacacacacacacacacacacacatgcacgcacacattccgggatgaattgggtaatgggatctgcaagaatctggtctctcccatggaccattactccagagtagagtttctcaaacttagcactattgatattttggcctagataattctttttgtgtggggcagtattgtgtattataggatatttaacacatctctgtcatctaccagtagcacccgccccacacaccagctgtgacagccaaaaatatctctagacattgccaaatattccctgggggaaaaaaatcacagattaagaacgactagtctaggataacttagttttgtcaaattccaaatatgaagaatcctatggatttgtgttttaagtgaggctatgattaaagtctgtagcattatgacagtgggaaggcatgggttagaggagaatgccaattttattaaatgttctacattattgggaatatatgagtcctccctactgtgttatagggtatttattctctcaatttatagattaaaacaaggttcaaagaaatataactaacacgatggtcatagaaccactaaataataggctggaatttgagctgttaattaacagagcagcaatttgcacccaggttcttgctgcaagtcttgccctgtctccattgcactagatttctagaagtttagggatcatctgcaaatgtaaggacaaggaagccttaggataaaaatactaggccagagtatagaagcaaactgctggccgagttacctgtatgaagcaacaaaggttgacaggagttagacaaatccaagaaaggtagatttgtgacccttactggaaatctatcaatattgtatacccccaacatacaatatactggggttgaaacctcttcctaatctttacattttctctgttccttctacccgttcatttatttatccatcttgatttattgagtacctgctatgtacaaagttagctgcataagagggtatggctgttcctggtcaaattctaaactgaagggcctttggggatgatcctgctaaggttaaagggacaatctcatggtgtcatgccctatataatgtgctgtaactctatctctagacgtatctggagctcaagggccaatacttgacagagacttttggtatgttctcatatttttcaagtttaagctaatttaatggtttaaataaatctacaagtttaaataaagaaaatattcatattctctctcccttaaaccaaactgatttcaaattcgaccagtctttttttattcttacccatctatacacatatgttatgtggtcttcatcagagtgagcataccattttgcattctatgttttaaagcccatattctgctgtgaatcttaccatgttgctacatagttatcattcttaaaaatctgtgggttcttctgtcaagtgaataaaccatgacttattcaaccaattatatttaattattttatataaggctataatgagcatcttcagcctatggctttttcttctcttgaattatttccttagaataaatttctagaattgacattatccgatcaggacatgagtatttttatgactcttgatgcatactgttgcatggtttccccaaaatatggtgtcggttcataatgccagtagcaaaagctgtaagattaagaacaagactcaaaacgtatggtctttccatccagaaacatggcatgcctctatttcatgtttatctactttcacttttctaaagataacaactttgtggttttctcgtttaggtcacatatatattgcttgtaaactttgttagcttcactaaacttcaaatatttgtgtggccatttaaaagttgctaatttaatagctgtaagttgaatctatttctgtagcacacctttgtggactactgtgaagtgcccaaggttaagtgccacgaattcagagatgaattgggcacggtccgtgtcctcaaggagctcttctcatgtggagatagacaccattatataaatgaagtgggcccttgtggcttataatttagtttttcaatgagaaaacattgatgctatgaatattaggttcattcttttatttaacacatatttattgagtgcctgcaatgtggtgggcatcatagtgggtgctgaacagaagagcaacagcccctcttctcatggggcatagacttgacatcttctctgttagaatggttgggcccgaaagatgagaggccctgctggaaaaggagacatccaagaggcagcagtgggttctgggagaagccactgggtttgggcctatgcaaaagggacatgttccgtagatacattgacgcacacataaacacccacacacacacgcgcgcccacactgcaggactgggtacttgggtttgtaatggttcctataggggttggctgttgcctaatggatatgaatgaagaagggaggtgggtttatgggagcacagtctggagacagactgctgggtagccatgggccagagacatgtccctgttggggtaagaggtataaaagaggtgtctggaggactgccaagattgccatcacagggcactggatagagacttcagtcttggcctttcttcagccgacctggttccagccctgtctaggagggacatggggcatttgctgtttccaatccctgtatagtgactactggtactgacatgtggctactgaggtgttggtattctttcccaatttgaaggcattctttctacattgtgtatagaaattctttgtggtatttgatatatgtattttcccaacctcattttccctatttattttctatttttcattgtatagttgtcttacatttctatataaacaagtctctcagtatttgtgatttattttcaaagctgacaaagttattctgccatggatctgagaaacagttcgttctatttttggttatttgtcagtaatttgattttttaaaatataatttgttactccatctggagtttacttagatgaatgtataatattgtccaaactattatgcagttttccaacacaatttattaagtaattcatttcccttttgatttgagggaaatgaattgttttattacatactgaatcctcaaatgtagttaagtctatttcttgagtcaccactttgttctgctgctctatttctatcttagcactggtattgaataattttaattgttgttttataatgtgttctaatatctggcagagctagaaacaactccttcctccctgaattattttctctttcagaatattcattgttattctcatctgtttgttgttcaagattaattttagaatcattttgtcagagtaaaaaaaacatcctattgggatttttgtatgtgcactcctgttaaaatataaattaacttgaagaaaataggcatttttataatacacagccctcatatccagacacatgtttttgttcgcctacttccgtctttctaaatataacagctccatggttttcttcatataggtcacatgcattgcttcgcatacattgcttgtcacctttattcttaaataggcaggtacttttttcatttctcctcccaccctgacctcaatgccacatgcacaggtgaagcatgctctattttccctcccctctatggctgaaacctagtgttccctgtaaacatacaatcccagattttccaggacaaatgcaatttcaaacatcatttcccttggcccagaaaatatgatcacaatagctagagtccttggaaattgcctttttcaaatgatcagagccagagttgggatcagcaaagatttaaatgcatcagcctcagcatgagggataatattcctgggaactgtttgtgattaggccagggaccgtgatcggtgtgagcttcctctgcttaatgtaacattcccctcatttctctagacttctttcaaggtttcattgacctacagatagccccagaaaataaacagggaacttaggaagtcccaggtctccctccctctgttatccagtcctcaagaacctgaacactgaagacctgtggtttccctttgctagtggcaggcagagcagggggtgcccgctctgcagaattctcccagtgatctgaaggggacgtcgccttgagtggaaagtcaggggtggtagcaggatgggggagggtctgtatctgctactgtactggagaatgggcactagtcatagctatgaagcgtcccagggccatggggcagcctgggaagtgtatgccagagttgagggagtccagggctgaaagagctgaccctggatgaaggaatgggtcacaaaggaggctgctggtgttgcctctcagaatgtacaaggaggtggagtcaattcttgtcctaccaggccagtatgggtcatatcattgcctgttacctttgttttcaaataggcagatactttatgggggaaggaagattctggattgactcatgtcctcacccaagggaatagggtgtatcccggcaaagtatatccttgacccatccaaaggcttcagtctccaaaaagagacttcagtctcacagcagagactagagaggaaaccatgaaccagaatagaagcccagtccttggactggggcatacatattgaagaagggttagcaggagagggagatcctaaaactgagtgggcctatatgtatgctgggcttctcacaagcccaccagttactggctctgtgcagccacacacatctcaccccaacagtttgtaggactagaacttcccaaagtaccatcatgcttagctgggcttggcttagaatctggctgtaagaaccaagcccgtgggatccagctcttcagtgtacctggccagggtgaaatcaggcagactgaagggatggctcacgaaggaggctcccagcatttcctatcaggatgtccaaggaattagtcaacactttccctgccaggccagtgtgagtcacatacatcacttgtttcctttatgcctaaacagtcaggtactttataggagaaggaagtgtctttggtggccctgcgtggtctaaagtagacccaaacccagctaaccattagaatcactcataggccttttaaaatacaaaattcttggccttgtcccccaaaattccaattcagtaggtccaaaatggggcctaggaattgtagttctaaaaaactcctagatgatctagacattaggtcatatttctgaacaactagtatggaacacatactgtatgccagttgcttggggaaagttttgtgtcagttctgtgaggtttggtcccttgaatttgtctcttgaattcctttcttgaattcctctgggctaatgggaaggcttgagctcttggattacatcatgccaagagacttttttcctagctaatacttgtgtcatgccaagatacatggggttgtgatacatgtggtgatacgttgtgttcatatgctgttgctattaagttggccaggctgagctgccataactcagttattaggatgattgtagtctcccagggtccgtgggatgttgacctccatgttggtatcccatcaaggagtgagatgcatggtccagtactcccacattacaacttgatgtttttcatttaatttaaatgcagcaaaatgtggaagggagtgggtactatgtactggccattacactcagcaccgggcaagtgatgaagatgattcaaacatggttcttgccctccaagagctcatagtctagtgagtaagataagcatgtgcttttattttaaagcagtctctgaattattgcacatagatgtggtcacaaagtgctaccagaatgtagaggaagaaaaattcattccaactggcagattttcagaagtcttcttggaagattgtagcacaggcaaaaatttcagtccaatccaacccaggaatctgtccaaaaccaaactgtgaacacagtttaatccaaggcccagttcaaaggccttattccagctaagagtcctggtccaaggtatattaggaccacagctacctgcgtggaagaggaactgggaaaactggtcaagctttaggagtctaatcctgggctgtgacctctacttataggggaatgaggtatctctgtcattctcatttcagctttcacctttgggatcaagccaacaggctctgttttctctgtaaaatatccaaagttgtgtgtatgcattctccactgtgctctgccatgcctgactcagagagctgtggaggccaacagagtttccccagccagggtctgttttcacagctgctggctcaaaagctggagcttgaagttctatcaataccccaaccctgttctttgagcctcttggtgaatttgtcatcttacttgaacatatgtgcattactatcagccctcagtgatgtgggtgtcctcagactctgtggtcctcggggaaggcactacataccttttctagggcttggctttctaagagggccttgggttaccccctcttgtgttgattggcccttcctctaggccttatgtacaagagcaatcttttgggtgactcaggggaggtgggttcagagaaaaggctcctggccctaggctacctgatcaactctcatcttgctctgggacttagatcagactcccccatggtcttgcagggagctcccccaggctacctgtaaactcccttggattatcgtgtttcccctggaagaaaatccaaatgtacttccttgtgtcatggagaacaatcagcatgtattgttttccagtcttcagtgggtggtggtctgaggcatgaatggaccatggcagttctagactccttgagtgaggatgctctgacgaacaggcttagaatgcatgatggagctctctaacagagctcaggggctcaagtgaagaggacaggccctgagtgcctcaaagacccagggacctgggcctacagtcctgagaacatcccctgagttgttgaagatgtgatccacacccttccttgaattcctctgggctaatgggaaggcttgagctcttggattacatcatgccaagatacttttttcctagctaatacctgtgtctggctgaccagattaataagagcagctgaagctaaccttagctgggcatagagaccatctgggatctgcccatgtaggaagaataggacgctacgagtatcactcataggatcctgggggctgggtgcaggcagctgtgggatctcacaggagagaagcacttttgagtagcctttgcttgggacatggaaagactgggtcatcaggacttccatctgttccccaacatgtcacagttcctcagaatctcacagtgagactcaagactgacagaatatccaacactcaagtgaagggctgttcagtaccaggtacccccatgcagctgacagtgcctctcctttctaaggttatctgcccacagatctgctcacagaaggtgcctcaccaggtcacagttggcagtcgagcagtcagtcattcctgcaaatggggagttttgtcagaatcttctggacttggagttacctgttcattccttgaggagaggagggactgaggatcaaagagcaaaccttttggcctggggtcttgctggattgagggtgtggtaagggagaagtggggagacaccacttttgctgccttagtaggctgattaagactaggagatacaccaagcagaagcatgcgtggagacagccatcagcagcagagtggggatgtccctcttgtttcaaattcagccaaaattgaatgtataccttccctgagcccagcacagtgctgtgttccatgccttcacaaacttcattgcgttgagtcttcacaacaaagctgtaatttagaagttattaatcccatttttatatatgaggggaaagactcaatgatgtaaagtacctgccctcttccttcctcccaaatgcgtacagctaataagtgaaaaatacatgcaaacccccaatttttagaaggattcatatttgctccaactttggcatggtggcttggtctggctacgtatattttccaaagaacttatggtctgttttcaaggtaaaagctgagccccaagagtgtggactcagctacttcccagtagcatagggcaggaggccttttttgtgctttgttccataaggtatcagaatctttcctgtgagctggggatatgagttcctcagccagccactgaggaatgcatgaaaatcccagtgcagagcctggccttgggaaagacctctaaacatctcaatgaagagggcctaaaggccggggtaagcacctggaatggtttggtggggacaatgcattattccagaggtgtggcaagaatcagtcatggccacagggtaattccaggcagtgggtaatttccaaaggttatgctgatgaacagtcatgtaatttataccaagaacctagccaacctctatgggatacaggtaacagggtccagccatagagggcaagaacttagcaatcatcagacccctaccaatgagcttcagtttaggattccagttccagaggggattgagttgtgaatgaggaacttgaagcaaaagctagtttcatgaatagctgctaccatgagtagggtgacaatatatccctatttgcttgggacaatcccagtttacatcttttgttctaggtaattatccatagtgccatctttcattctcaaaaccagtttgggcaatatgttacgtgggtaccctaacatgccaaagacctcatgccaagaaaggaattgggcctcagtgattgatttgaatgccatgccaagagggatctgagtcagaggtctatgaggctatatatagtggtttatcttttttttcttacttgtcactgacttgaaactcaagctctgggctgggcacagtcgctcatgcctgtaatcccagcactttgggaggccaaggcaggcagatcacgaggtcaggagatcgagaccatcctggctaacaccgtgaaaccccatctctactaaaaatacaaaaaattagccgggcatggtggcgggcgcctgtagtcccaggtactcaggaggctgaggcaggagaatggcgtgaacccgggaggcagagcttgcagtgagcagagattgcgccactgcactctagcctgggtgacagagagaaactctgtctcaaaaaaaaaaaaaaaaaaagaaaaaaaaagaaaagaaactcaagctctgtatgattaaccccttcctacctctctccccctcatcccatgccgctcttccatcaaaactcttgcctacctcaatgcctttccacttacagttcaccatgttggagtgtccctcacaagactggctccatctcatcattccttaactgtcacattcccagagagaccatctctaaccaccttatccagaagagcgatgtcactttttatttccttcatacccttttttataagtgtattagtcaacttttgctgtggcatcaacagcccgaaactctcaatgacttgaaacaataaatatttatttattactcatatctcaagagggttgtaagtcagctgcagctctgcagggctctcctgggctccacataacatctcgttctgggacacaggctgaaggaccacgttgtgcctagagcatgttgttctcatgccagaaggcagaagcttcagggaacagagccaaactactcaagtacatttatagcctctgcttggaaatgcctacgtcatgtccactcacaattccgtgggctaaagtaaattgcaagactaagcccaaagtcaatggggatagggaagagagcaccacctcaagagatgtatagcaagggcaaggagagaacaaatgattgtgaacaattagtatgatctaccataataagtgatgcttattttatttgttgattatctggcaccctcactaaactataaactccctgagggcagacctgtatatgtctagttcattgttgtaccaatcatacagcaaattctttgtagtattttcctatttttgttacaattattattagtagtgttatattgctgctattatataaacaaagccaacacagctggagtgagagagcatttggtttggaagatgcttggccacccagggtctactggcagcaggattttattccacagccctcaagctagtgtagttatagccaagagtggctgaggccctgagtgcaatgagcctgtcatacagactctatcactgcagctaggaagggtaagtgggggaggagcgaacattctagaaaaagaaaatcactggggcaaaaatacaaacatggattagccttgcacatttggagagctgcaagtagtttaatctgactggagtgtagggtgcaataggggagggtggggagagtggaaaaataaaaaagattggcaagggccttaggtcactgagagtcttttgtgcccctacgaggagtctagactttatcttctgtgcagcagggagtctttaagaagtcccaagcacggatgtaacagcaaaagaatttgtgagtttcaaaattgaccctggagccgatatggaggatggattcaaaatgagtgaaatttaaaataggacaccaggtagactctggcagtagaaagagggcctccacttaatagggatgtgatgaggatgtgacaagtacaagagatactgaagagatagaatcaacagaagttagttactgattgaatatgagagcgagggagaaggagttgacatattttgcttaggcaactgggtgttgtcattcatggagataaggaatgaaggaggcttaggaaaatagataaagagttcaattttggacatgcatttgaggtgccggtgggatctccaggagggatgtacatcagacagttttgcctcaagtctggagtgtggtaggagggtttgggttactagaatttattttggaggcagtggcataaaggaagcaagagtggggagtgagaagagcgcctagggcaaacctatacctgggtgatggaagggctgagtcatttgttaatgccagggaacattccaggtcccagagaaccttggttcccttgagaaccaagtttggggaaccttagcccctgagaatcaagtttggggaagaagacaaaaagttcaattgtggacatgttttaagttgctgtgacaaaatccaaactgactctcatgatttttttttattattatactttaagttttagggtacatgtgcacaatgtgcaggttagttacatatgtatacatgtgccatgctggtgtgctgcacccattaactcgtcatttagctttaggtatatctcctaatgctatccctccccactccccccaccccacaacagtccccagattgtgatgttccccttcctgtgtccacgtgttctcattgttcaattcccacctatgagtgagaacatgtgttgtttggttttttgtccttgtgatagtttactgagaatgatgatttccagtttcatccatgtccctacaaaggacatgaactcatcactttttatggctgcatagtattccatggtgtatatgtgccacattttcttaatccagtctatcattgttggacatttgggttggttccaagtctttgctattgtgaataatgccgcaataaacatacgtgtgcatgtgtctttatagcagcatgatttataatcctttgggtatatacccagtaatgggatggctgggtcaaatggtatttctagttctagatccctggactctcatgatttttaaaagaccttgccatccaactctcataatttttagaagaccttgtcatcctctttagtttgtcttgtgttccttgctccatctgtcaccctgcttctacctaccatgctggcctcccttctgtccctcacatgcaccaagctcattcccaccccagggcctttgcccttgtaattctttccccctgcagtgaaccttccttagaatgattggttccttatcatcagaccacagtccaaaggccacctcctcagacaggccattcctgctgccttattaaaagcagcccacctctatgccattcattccttttttcgtcacctcttagaatgtaaacttcagaggggctaaggacttgcttatccatcttggtggctgctgatcccatacctagaatagggacagacacatagcaggtgctccgtcactccatcaatacttgagctaggtggagacatttcaaagaccactggatacacaggtctggcgttcagaagaaatgtctttcctgcaggcatacacttaggagttacgtgaggatgaggtgccctaaagaggacaagcaagtgagaagatgaccctgaaatggatctgttcatatttcaaaaggtaaaagccaggtagagaggaaagctttcaaatgactgccaagggacggtcagagctagagatggaaaacctggagaaggtattatggaagaaccaaagtgtcttaggaatgagagagggctagctctgttgaatgcccttctaatttgtctcagaacaccgatgctcaagttctacctgtccaagaggtggaaactgggcagaaaaaaaagaaacacaaaaacttgtgtacaagccaggtgtctaagaccagagtgagcaacatagtgagacccccctccccccgcacacacacatctcttaaaaaaaaataaaaataattagtcagacatagtggcacacacctatagtcccagctacttgggaagctgaggtgggaggatcacttttagcccaggagttcaggactacagtgagctaggattgcaccactgcactgcagcctagagacagtgagacccctttctctaaaaaattgtttaaagaaaaaataacttgggcacaatttatggtttttggactggattatatcaaatatgaatctaggaggacatacatgtgctcaggaaatgtgcagccagtattgcccatttatccttcatactccttttggaatgtgtgtgagtttctagactgcatcctcagtattctccttagaaagaaaggagcctaaagttaacttaatcttgtttatgataaggataagccctgcccagtaactagctttgccctgatgcaggtgaccttgagaaactcacacagtgtctttgggactaacatagttaaatgataactttcaccaggctctagtgccagagatgacattaagataactgagacacaactttacatacactgagcttctgagcagaaagaggtgaaagaaatttaaggttgggtttgtgaagcctctgcctccagctcaacaatagctgaatcagcagagctgcctcagtttacttacctagattcatacactgaagcaagaacaatctgattgggccacttctgcttgggtgagcattgctggataaaatcacccaaccagacaaattggcactgctataaattcatgaacaccaatctcagtcaggcttacaacagtgcctagcaatccatctgtgtttctcaagtcattctcttctccatttctccatggaaactaccccaaacattcactaccctgctcgaacccatgaacagccccttctcctcaccttactcctacctcacaggcaacactctcaattttcaaatactaaagacaccaagcctacagaccaacacccatcctcgcccttcctctattcttcccaccttttataagagatgatcaatcctttctcccatcaaaaaacaatttccctataaattacccatcaaaaaatttttagcataactccatttatgctttagataaggaacctttaaaaacttttaacataacagtgagaaatgtatttttaccttgtaactttgtacacacttgcacataattgaaacatacatttcacaagcagtacttacctttactacttacattgaactcagatatttcctatgctcttcctttattagcccattcttgcattgttataaagaaatttctgaggctgggtaatttataaagaaaagagtttgaatttggctcacagttctgcaggctgtacaggcatggcaccaagatctgttcagctcctgatgagggcctcaggaagcttacaattatggcagaaggcaaaggagagccagtgtatcacatggcaagagtgggagcaagatgggggtggggtaggtgataggtaccacattcttttaaacaaccagatcttgcatgaactagcagagcaaggattcacttgtagccaaggggatgatgctaagccactcatgaagaatctaaccccattatccaaatacctccccccaggccccatgtccaacattaaggattacatttcaatgtgctattcggaggagacaaatatccaaaccatatcattctgtccctggctccccaaatctcatgtccttttcacattgtaaaatacaattatcccttcccaatagtcccccaaagtcttaacttattccagcatgaacccaaaagtcctaagtctaaaggctcatctgaagatgaattccttccacctatgagctggtgagatcaaaagcaaattatttacttcccagatacaatggtgtgcagacatttggcaaacattctcattccaaaagggagaaactggccaaaagaaaggggtaacaggccccacacagttctaaaacccagcaaggcagagattaaatcttaaagatccaacataaccctcgactccatatcccacatcctgggcacattggtgcatggggtgaactcccaaggccttggacagctgtgcctctgtagctttgcagagtgcagtccttgtggctgctctcatgagttggacttgaacacctgttgcttttccaggctcaggatgcaagcttgccatgactctaccattttggagtctggagggtggcagcccccttcccacagctccaccaggcacttcactggtgggactctgtgtgggggttccaaccccacattgccactccacatcatcctctgaaatctatggagaaattgccaagccttcttcatacttgcatgctgtgcacccacaggcttaatatcgcatgaaagctgctaaggcttatggcagcttacactctccagagcagcagcccaagctgtatctggagccctttgagctgtggttgcagctggagcagccaggatgcagggagcgatgttctgaggctgcacaggactgcagtgccccaggcctggtccctgaaatcattctttcctcctgggcctctgggcctatgatgcgagaggctgctgcaaagattgctgaaatgccgtcaaggccttttttccattgtcttggatgttagcacttggctccctttcagtaatgctaatctctctagcaagtggttgctctacagactgcttagattctttctttaccacagggtcaggttgcaaattttccaaacttttgtgcttttcttctctttcaaatgtaagtcccaactttaagtcatctctttgctcctgttctgatcatgagctgttagaagcagccatgctaattcttgaatgctttgctgcttagaaattttttccatcagataccctaggtcgtcactcttaagttcaaacttgcaaaaagccctaggatatggacttaatgcagccaagttatttgctagggagtagcaagggtgacctctacaccaattccccataagttcctcatttccatctaagacctgttagcctggccttcactgtccctatttctatcagcattttggtgacaaccttttaaacagtctctaagaaattacaaactctccctcattttcttatcttctgagaccttcaaactcttccaacctatccctgttacccagttccaaagctgcttccacatcatcaggtatcttatagtaacatcccacacccctggtaccaattttctgtgttagcccattcttgtatttctataaatacttgaagctgggtaatttataaagaaaagaggtttgatttggctcgtggttctgcaggctgtacaggcatggcaccaacatctgctcagctcctggtgagggtctcaggaggcttacaatcatggcagaaggcaaaacggagccagcgtatcatatggtaaaagtaggagcaaggtagggtgggggcaccacactcttaagaaaccagatttcatgtgaactaccagaacaaaaattcactcatcaccaaggggatggcgctaagccattcaagagggatctgcccccatgagtcccaccaggcccaacctcaaacattggggattacatttcaacctgagatttggaggagacaaaaaaccaaactatatatttttttgtttgttgtttgttttgtttcttaacatgaaatttatgaccagctaataacgggttgcaatccactgtttaatacatttagctataaattcttcctcacctttcaccttttcatgaatcttatgcttcaaataattcttcctccttctgctaactcttcagccacttcccttctgccagttgcattccatcaacattgaaattttctcaggctgctctcatcaaaacaaaacaaaacaaaaaacacccaacttggctgggcacagtggctcatgcctgtaatcccagcactttgggaggccaaggcaggcagatcatgaggtcgaaagatcaagaccatcctggccaacatggtgaaaccctatctctactaaaaatacaaaaaaaaaaaaattagctgggcgtggtggcacacacctgtattcccagctactcaggaggctgacacaggagtgcatgaacccaggaggcagaggttacggtgagccaagattgcgccactgcactccagcctggcaacaaagtgagactccgtctcaataataataattttaaaaagtatctttcttcacactctcatctccttgcaggttctctaagtctctttcatacccaaacttctgtagcaggatgtctatgtacccttgctgtgttcatttctcacctcccagtaccctgttaccccactccattctgatttctgagtccaccacgtctctgaaattgctctcacaaaactcaccaatgagtctcatgttgctgaaacccagtggatcattttcagcctagatgatacatggcgctcagcagtctttcaaaacagatgtcccttcctccttctggaaaccctctttccttgtctgtatgacaccactctcctgtgttttctcctacctcttgactgcttggtccctgtctgccctgccagtcccctttctctcaaaaagttcaatgccatcttttttttttttcccaactcaatagctctgttgttttaagtttttgttttctaataatattatatgttttttcacctctttattaaccaactttatttattctttgttggttgcctcttaatttccttggccaatatttctatgttgagtgtacatctttctgtcaaattccaattcttcatagatgaaggatagtaaatatttaaatgtagtaacttgcacatattttctctccatttgtctctcattattcagcttttgtttatggtgatttttgaaatctaaaatcttccatttctgtagtttaaaatttcccttatgatttctaattttggtgtaatactaataaagtccttccttgcctccaacattatacaaatattccttatattttcttctaggacttctctggtacatggaatgaagtgtggacctaattttgtcattaactggctagccatttgttctagcatcaggtattgatcaatcaaccctctctctgctaatttcaaaagccccctttatcatatatttttggttccttttctggactttcttttccagctctgttgatctctcttttgaagtcaatatagtataaattatattattacagctttataatatgttttagtatttaatatctgggttgtcaagcccttcctcctctgggaggaagtaggtgtcgtggtcaagagcttgagctctggtactggcctgactggttcatcttcccagctctatcatctacagtgactgtatgaccatgggcagattaatttaacatttggactcagcgtctgtctctgtaaagtaggttaataatagtacctatctcagagggttgctgtgagagttaatgagttgagatacaggaagctctcagaatgccaactagcaccttatatgctattattccttatctgtctcaaggagagctcggctgttttcacctgtttaccaacagatggatcttgcaatggttttaagttccagaaaaaaaaaagatctggcctggaattgtgttaaatttgtaccatgatttaggacacttttcatcttagtaatatgaattattttcaaccaggaacatagtttgcctctccattaaaaattttttttcttcctatcagtacagttttgttgtttttgttgtgtaggtcatgttggcttattgttgtagggctgaatttgattttctagcactttgcatgaaggattttctatactgtaggtgtgtcattgtgttggtggatatgattgtgtgtgtatcatacatatcattgttatgggagtattgtatcaaaatcaatttaaatagcatggctattacaagtttgtttatagttttgaagcactggccatgaaaccacctacccactaagtattttccagtttcctcaggtttttcccttcatgctaattttggtaattcaaatttctctaggaaatgctccatcttatccatatttcatatgttatgtatactattcttttatagttggattatcaccttagtgttattatagcctcctatccctatgtatatttatcttttctatttctacttattgagcaaaccaatcagaaatttttattgatctcttcagaagccaatttttttttctgtttttgtcttttctaagtttattctctcttctctccttaatcatgttcagttattcttttggtaactttttaagtataaacactaattgcacttattttatttctttattgtttaatcatgaataaagctatgaattttctccttactacagctttggtctagtatcatcatcattataagaagtctgtattggctgggcgcagtggctcacgcctgtaatcccagcactttgggaggccgaggcgggtggatcatgaggtcaggagatcgagaccatcctggctaacacggcgaaaccctgtctctactaaaaatacaaaaaaattagccgggcgaggtggcaggtgcctgtagtcccagctactcgggatgctgaggcaagagaatggcgtgaacctgggggggtggagcctgcagtgagccgagatcaggccactgcactccagcctgggtgacagcgagactccgtctcaaaaaaaaaaaaaaaaaaaaaaaaagaagtctgtattgatagctttgttttcctcattgagctcaggaacttatttggaaagagttttatgaatttttaagtgattatggatttttctttgttcttttcttattgatgtctagtttatttgtactgtgaacagaaaatgtggcccaacagtttttgcattgtgatagaatttatggggattttcttatagcctaatgtaaggtcaattttgtaatagtccatgggcacctgtaaagaagtttgcattccttgtttgaagactacagagtttcatataatatacacactcataatattttcagatcctttttatcttgatcttgatttcagggtagtatattttattttgtctctttcatgcttttggacataaagtattataactgtcatatctttattttgtaatgggctcattatccatgttttaaatatgatatttggattttgtattaggtctctataaaggactactgaaaactctctttgtttggtgacaacaccaaaagaaaaacataataaaagaggggtcttcaacaagccccttttattttctactcaagctcatgttaaataataacctaatataatgcacagtaattacacatctacctgttaataagtttcccacctttattatttgtcaacagtctgacgcttctgacttaaaagtttagtcgacatcaagatccatgagcacagtctggtcactactctgaaggaggaaggtgcctgatctccttcttttaacctgggtgattgagggtgatgagatccaattacaactttttaaaaatccctcatttgcgacactgagaagtaggctcttcctattctcttacagaaatattacaatacaacatgcatacataattttccagagcaagaaagattagatctttgtaagacaacgcacacttcctcttcctgcccttgttgcaacaagtctgagtactcttttgagatggaagacagagctttataaggccacattcttgttctaagagtgtcagtttatcagccctgtctccttccaggtataataagaaatgcctcttggtagctgtccagaaaactcttggcataagaaaaggatcatccaagagtcaggtgtaatataatatccaaggatcagatattaatattaaaattccttttttgttgttcacatttgcctccaccagtagttctcaaaccctggctgcaatttgggatcacctggggaactttttaaaatcggtgatgccctgagcccagtccaccaattaaataggaatatttgagacttatattgataaattacagcactcttctaatgtaaagcctgagctatcttggcccattcctttacttttgagtattcagagtcactttgtcttagctgtgtgttttgtcccaaagagagggttgtatattactgggagattaacctgtatacatttattgtcataactgatgttttatcttttttaaagcatcttacgttacaacccccctaccccatgcttccttgttgtttcctttgaatttcttttttcctccctgaactactttgctttttcccctttggtaattttgaagacaagctatttcatattctattactaattacacttaacatctttaaaagcatgctccaacctatatttctctaattaaccacagaaactacaaaacaggatttcttgcaagatgagcaaattagcatatctccttgctccaactttactctttgtgtcagtagaatctggaatattctaccctagagtttgggcaggaataacgtcttatattttctgttccaaggaatatttgttacgcttgcatttcattttataactatgtttacataaattatttaaattcattaccatattggtttatttgctcattgtcaatctttttttatgctttttgttaacctcaactttatcctacttgagtttgttgtttaaattcatctcttggttggataggagacatctttgagtggatgtgagtaggacatgttttgaggcctttgatatttaagagcagctttctgttgcctttgctgtttaacaacttggctcattcatacccttttccactgtaaattatctagggacacatctgtactatgtctaagataaatacatgcagggttacagcacagtatgtttctctgttttccagagttgacacaggtatccatctattaatatttgtacagactttggtcaatctgttggtcgaggtttggagtgggatggggttatgagacccacatgttcatgtcaccttctttcagaatggtttcaaccattaggtactcattgattcattcagcaaatattggttgagcacctacaatgtgtcaggcattgtgggagccactagggattcagcagaatcagatgagatttctgctgtcatggaagatctgtgtatgtgttggggagagggaaggactgaccatcaacagctaaacatgtaaacaagataattttagagaatgataagcagagctatcatatatagctgctcaaattccaaaatggtgcccctggagctttgcaacatgacaatcctggttaaaggttctagagaaaaaataatacactgatagagtgatggaggtggggagagggtctcaggccttattaattaaatagtcctctgcagcaaatttatttgctcacatactcacagtgcccctgaccatcttccctctgaaactttagcacctttctttgtcttcatctgccttggacttgctcagcaggccctgtgacttgccccctctgccttcaaggtctttgcctttgggttttgattcctcattatttgcattatgttcccaactgaactcccacaaagctggagacaagatggctgtgtgggggcatccatgtccagcctagagactcccaattcagtgctaatgtaatatttcaagtcgacagatgaatcttcagcagatttgaggaacgccttctaagactccacggtcacataggcccagggggaagtgttattctcatactgagagacatggtggggggttagtaagagcttggtctctagaatcaggctgcattgatttggctttggcgctaccatttactggccctgcattacttaacctctgtgtgcctcagtgtcttcatctttaaatggggttaataacaatacctacctcgtagcattatagtgacagttaaattgagcaagtgatggaagtgcttagaatggtgtctactcttagttaaaccctcaataatatataataataattgccattaactatatattacattacctaaaagccttttcatgtccttctctccccttggctcgaattctttctatacttaaaatatacatggattacagggatgagactgaatgtgtcttaagaaccaggcttactttgctgaattgcatgggagggcttttacagctgcagactggaaaagaaatacttaatgcagaaaatggggagctgggcagagtcagggagaatcaagactaaactcatcacaaggagtcaccaatttttttgttttaatgttttcccccctttggcaaacatgattttattatttttcatcttagcatcattacctttagtaagtcaaatattttactcacttaaatatcaatttaattaacaccaaacatctatataaatgttataaatggacttaaatgtttatccatatttggaactaccttttttatgcttgtatatattaaaagatgtttagaatgaacctacagcatttttgcaatcagaaaaattaaatgttgtttcattttgaacgcctacgaccctgatatagtttttatttgggggcttatgtccagtctttatccatttataaacaaatatttaatagctataatcaaaagcatgcatataattttatgatctactgctttatttaaaattatgtttaacattctttctacagggtcatatttatcactttaatgattgcagtcaaactgtatcacattaaaggctataatttacctcacattattgggctgacatatagtttgttcacatttttcctctataataaaattatgtcattgtaaacatctttggctaggtggctctttttcttttgaattaattcctagagattactgagtcagtctttgagtagttctgtggctctggatgcgaacttacatactcccttcaaaaaggatcatatcagttttgctctgcaattggcaataaatgcatgtatgagattccatgaagcctcaacaatattggattctatattttttctttattttttctattgaaatggactgtgttgtcatattaattctattttctttcatatgaatcctctaagcactctctttactcatcttagtgatgttcttagataattataaaggttctaattcaatattgatatttttcctgtgtcataagcgttgtgattatttttttcattttattattttcttttataattttgttttagtatttatttgttttctcatttacagcactttctttgcctattcttattccagggtctgctactagttggcatgaaaatagcttaaaataagggtttttggaagggtggatccttagggtgaaataggggagagagaacaggacgtggacagggatcacaatggatgctgtcacctccctcccccagtttcttcagaagctttggtctctgaaagatggtgctcctggcacctctttagcatagtgtggcatcttggggttgtcagaatcccatggcacacctatcatttttccatcaaaaatgtttgaaggagacaaatggtcctgggctgtctccacccggttaccgcctggggaattagcactgctgtgtcattaagcaatgtcctttcctactgctgtaaacccagctgagaggggtcagggactgtgactctacacttaggcttgagttgtggctttgccccacccaagggacccaaagcacgaagacgcagtgtttcacatccagacacatccaatctgtaaatactcaaaaaatgggagaggtcaaaggagagatgttaaccactacccaaaatcccccagccagaaatgatccttgccaacaattggtggacactattacagatatcacatagttttctatgcatttatacaaatagacagttggatggattgatagaaataatttttaaaaatctgggccgcatcctaggtgggcgtgctgaccaggggagaggggccaagagaagaccagttctgccatgtctgccttttgccaaaggggccctacccattgctaagtccagcatggagcccagcatgtctccccacctggagctcagagcccagccagtccagcccaacccttgtgccactctttctttctgttgctttttagactaagaagatgttccccctgccagccctcagtggtgcaggcagaatgttggggatgcttactgacctccactgctcttctcttgcagtctcctgcttcttcaacttcaccagcccgtctggggttgtcctgtctcccaactacccagaggactatggcaaccacctccactgtgtctggctcatcctggccaggcctgagagccgcatccacctggccttcaacgacattgacgtggagcctcagtttgatttcctggtcatcaaggatggggccaccgccgaggcgcccgtcctgggcaccttctcaggaaaccagcttccctcctccatcacaagcagtggccacgtggcccgtctcgagttccagactgaccactccacagggaagaggggcttcaacatcacttttaccagtgagtcctccctctgtcaccagctggccctccatctgagtgtctgcctctgaggatgatcgaaggtgctcccatggagggaggaggaggtgtggatggggcagttcccagggcattgcagggctgcagtgcccagtcatggagctcccagcatgaccaagaaagggcataaagcactggctgccaggcagggtgctcttttctggaagtccctctctgaagggcatttatctcccatagttgtgatatataatgtaaaaggaacctggaacctcatttttgccccaaccttccccatcctacaagacccaaccagaactagggagggcccaagagaaagaaagcctctatcattctcattggtttctgatgccctctctgaggtgctctccgaaatccctgaatgcctgcctgctgctgacctctgagttcgtgccggggctgctcactttgctttgcccagttcccattcccatagtcacatcagaatcaaagctttggagcaacacttctgttgggctcccagacttactggggacaactcttagggaatttcctcatagcccctctgagggccaccatctgaaagttgccacctccagtttcaatcctgggccccttctctagaagcagcctaaactcagcagtgattatttttatttctgtatctcgtggttacagagggggttgggggggggggggcagaagcttggtgactagaaatagcaagccaccaaagatagcaagaagtggttatcaggtcgtaagaagctataaatccagtggacttggctgatgacaaacagtcaagtgaggctggaggtgggtccatctgagcaattaactagatcctttcccagaggctgcttgtgaagggcgagtccccagtgcaagctctgctccatgcccacaaacactgatctcccaacccccattcccaccgttggcataaaggccttgcctccgttttccacctatctctggagtccagttggactgaagacattagatgctacctggtgggccatttgggtcccccgattccaagagaccagccaggtaaagcccattccattcccctcaccactcttgtttaggacacaatcaaccttctcagggcatgtctcctccaggggattcctgtttcatctgctgtgggcaggaagaagcagggggagatcctagttctgtctttcctaaccctagtctagcactgaccatgctgcttcacactagaaaggagcgagtatgctttccttatctttatatcccttggccccgcacagggcctggtgtgtgctaaggatcagcaaatgtttacggaatggaaggatccatgaatgagtaaatgctttctcttgccctggcggagtaggaagaacaaggataaaaggtatcctggggagcacacttatccaggatggtgagggccaagaagtcatgtgggtttgcagcatgtgtggacactgagtgggaacttgggaggaggaggcagctgatggcccaggggctgagcttcatcatgacggcagcagactaacctgaggatagctcttacttgtatttctttccaaggtttctctaccattgtaaaaatgatacacatccaatctgtaaatactcaaaaaatgggagaggtcaaaggagagatgttaaccactacccaaaatcccccagccagaaatgattcttgccaacaattggtggacactattacagatatcacatagttttctatgcatttatacaaatagacagttggatggattgatagaaataatttttaaaaatctgggccgcatcctagacctgctgaattagaatcactaaagggatggggccccagaatctacatttttggtaggcttctgaggcgatcggatgcagtcagtgaaacaatcctccatggccaagtgtcagggaattagtgtagtctctcccataggattttaatctcctcctacatcccaactgatgatcactgaggctgagcttgaatttgcccagtgtcagggagcttgcctccccagacagctctctccatagctagcaggcactctagatttcaagtcaacttatgttgacttgaaatctgtgtccctgtaacaaggatcagtggtcccacttccacccctagaactcccggtaacaaggctaattcctcttccacatggaacataatgaacaacaatgacagtagctgccatccattaagcacctcctgtgggctgaacctggtgctgagcactcaacagtcatcactggaagcctcacaacaaaaactccataaagcaagatctacccctttcacatgccagaaaactgaggtttggaaaggtacacagggagaagtgggtccttgactcagagcttttgctcccagatgttggaaataactccatattcctgctatgtgcatttgcgcttgtgtgtgtgcgcatgcacgcgcgcgcgtgtatgtgtgtgttcatatgtgggtgtatgtatctgtgcctacatgtgtatgactgatgcatttgaaagaaaaatgcctggacttctgggccccaagcatcattttttttcccacaccatatttctaaatgtcagggtgacttcgtggtcatagtttccaacgaagaaaggttgggagactcaagtctgggctgacctaagcgttcaaatggaagggtgttgggcactcaactgaagccctgcatgggatcatcacagtcatctccacatcagaggctcccttacctcatctgcaatgggaagggtcaggtttgcaggcctcttgcctctagcaagatccagcagcccctagggccactgctgtttctgaatgtgcaaatgtttctatcactagggaatttcagaggccaagaaatttttttttcaagtggcccatacccatgcagccatggatcctggtctccactggaaagctgccatcctcagaacaacaggggtgaaaatagagcctggcttcggggtgaaaatagagcctggcttcggagacatttagtaagagaactgtgatgcccctgctggaggaaggcagggaacatgcttggtagagactgagcaggaaagagtatcttcccatgcagaggagggaagaaggaagggaactcatcttcagtgagcacttaccatctgtcacgtgccgcaccgaacaattgccactctcatattcacatcaactttcattttatttctatctcagaatgaccctgcaagtgaaggatgatctccatattatcagtcaggaaactaaggctcatcagaattgcataagttgtccaggaccatgtaacgaataaaaggcaaagcatgattaaatctacagcgttctgactctgtcctctccccactctgcattatcaattgcctgggtagagtgagaggcagccctgacaataggcaaggaaataaaggaaatagcttcagacagggttaattctagggcacctcctttatgatgcttagagtctattagcgtcacagaatttagagtccagctcacctcaagcagaaatgatcccataactgtctgaagttagggaatcttggaatggatttgacattgaggagacagatcagctcattaaccacactgagcctcagtttcctcatttgtaaagtagggtaacaagagctacttcatagaatcattatgtggtgtaaatgagctaacagcagaaacacttagcttattgcctgatctataaatgtccattagaatgcagtgggattaggtgctcgggaaggcaggaaatcaagtttaatgagcacctgcttaatgccgaggtcctagaatgcctagctctcccgccaacatggcaagttcttggggaggtggtggagttctagggtttcccatcccaaggaagctaattttctttagggattcttctctactccagcaatgtctgatcatgtccttgaactccatctacacagccttccgacacaacgagtgcccggatcctggcgttccagtaaatggcaaacggtttggggacagcctccagctgggcagctccatctccttcctctgtgatgaaggcttccttgggactcagggctcagagaccatcacctgcgtcctgaaggagggcagcgtggtctggaacagcgctgtgctgcggtgtgaaggtacgagcctgcaggctgggagcagtggccattgtcagccagagaggctggggagggggagcaagcagcccaggccatggtggttcctttctgcgttggtccttcctcttctcccagaacgaagggccactctctcaccctcatgctggaatagcaggggcttcataaggccactgtgcgtaggaatttaaattataaccagagattaaagtagagaaacggctctggattgtcaggtatcaaaagcacctcttctttcaaatgagaactctcttcggtatcacagccattaagatccctgtttccagctcctgcccaggggagctccggcagcccaaagtagcattggcagcgctgcgagttttcgggtctttcaagctgcctgtcactctttccttctccacatgtttattttccccaattccctgggatgtctcccagtctcggcctttgtgccctgttaaatgctgactttatatccttgtggtcagtctccaggagactcagggccaaccagccagaagaaacacagcttgcagcaggcacacggctgatgatggcagttcttcagtcctgcctcgccacacaagacagtttttgactcaattttcaagaccagccatctgttccaccaaactacagacatttaaaatacagataaagcttcttgaggcaggagtcaggttaaatttgtgtaccaagcatggtgtaccaagcatttgtgcaccaggcaaatttgtgtaccaagcattgtgtaccaaccgtggtacctggcacggaataggtgcttaataaatatttgtgaataatggatgaatagtgagtatcccaagggccccttggggaaactgacagtatccaaggagacgaaggctgtgattctctccttttaggaggcagaaaccttcttctcacatttcatgtgatagaaagaggatagagacttaagagacctcttgacttaacccaattcctaaactcaaatctgggcatagtggccatgaacaggaaggacaggagaatgaagaagggagcatgcctgagagagagtattacccagagcttacaaatggctcgatgggagacaagggaccactgagaacactggaggtggcaagcagtccaggtgggcatttgagtgagaggggcccaagctgggatcctggcaattcacttttccccttgagcctttgtattttccagctggaaaaaaaaggagggataatgataattatcagatgtgtatggagtaggcagtcctggtataaagtaagtcctcataagctgcgccttcactgtcacgtaaactccatgaggttagggaatcttccttggcctcatattcccacagctggtgtgttgtttgatacttggtagatgctcaatcaatactggttgatgagtcaccgaataaatgaatgaatgaatggccttttaactaggctagagcctccctaatgagacgcatatcaatgaaaggcctccagagccccgactctcaccagactgcctgctgtctccaccctgcaacttatcatccaagccaccctggggaagtaacttgacctctctgtgcctcagttgccccactgtaaaatgcaggttgataatgggaacccgcttgaagagttgtcttgagcatgcacagttcttggagcagtgcctggtgagaggtaacactcaataagtgttggccattagcgttaacttgattttaactatttcttcattggaccaaccagatcaatatttgctccactttgggggatcaagtggtgcgtttccatccttccaggaacttgccccaaccgtgacatgaatagacatttttttctgacttccaaacttcccgcagtgtggtctgtacaacctcatctgccattcttcctcagtgcaatcagcacttttggaaagaacagaagctttggagttagagaaacaacacgaaactcagtctccatgcttcccagctgtagaattaatgggcttaggttaagtaactagacctagacctcaggtccctcactggcaacaggggaataagtatgcatatctgatggagttatttgctggtgaaacaggtcaccgtacaaagcatccatgcagaacccagtctggagggttgtgaatcggtggtctttcaccttcctacagaccagccccctcattttcccttgcactcattgaccacttctaatttctttagttttcgttgtgttggttcatatctctgagatcttccctgctgtctctagctcacctgatctcttccttctcctaatttctattatttttcatgggccaccaccactggaccactttcttggatactggttcttaccattattacatttaccagttccacaggccttggtcctgtctgcccaacaagactgtgagtggtctcagggcagaaggccagattcccattgcccctgagcctgcaggggcttagtcccaaattagttgactgctctgaggaaccctcaggaattagtaactgcacaatcctcctctccacctgccaccctcctgaatcaagtgctcttagactttagctctgcgatgcattgaaaccttcaaggccatgtatgaacacatgagataatttgacctttgttaatggatcttcaagtggctcactattttttttttttctttgagacggagtcttgctgtcgcccaggctggagtgcagtggcgtgatcttggctcactgcaagctccacctcccaggttcacgccattctcctgcctcagcctcccaagtagctgggactacaggcgcccaccaccacacccagctaattttttgtattttcagtagagacagggtttcaccgtgttagccaggatggtcttgatctcctgacctcgtgatccacccacctcagcctcccgcggctcactatttcataagcaaggtcttcattttaaagttaaaaaggtctttttcattctgtccctggagggggaaatgctgtagggttggggcagtaggcactagaagtaagggacagtctattggagaccctgaccccagggagagcccgctcggttttctcagagcgatgggcatttgatgccagcctggttttcagggatctgggaagttgcatgccaggcagagtgtgagagcctgatgccacttagggtggctgaatcccagccttaaaaccttagacagagctggctaaagaagcccctgggaacctgtcccttcttggctcctctccctccttttgtctgagccttggtagagctctgctttgcaatcagcatctttgtcttttccgttttttttctagttttgtttttgattaagtgtccccaccttgtggacaattaaatgcagaagctaatggtcttttagaaaatcttttaatatatgctaagagccacttagcttttgagaggctataataggacaagagagacgatggcttctcctaaatttagaaagaaggatgattatctggaggatctaaagcaggggtcggcaaactttttcttaaagggccagagaggaagtattttcgactgtgtgggctataactctgctgtcctaatgcaacagcagccttagacaatacggaagtgaatgggctagattgaccaagtctgtgatcttgagttcacaggacacaggagtcccttaggtgtaaaatcagaaatttcccaagaaagacttccgggtagtgaaggcagctacaccggcgtacctgcctgactttctctcccctacacttacctcttccttgtctctttaaaggaaaaataatcataccccactaggataagtgtcttacagtgtcacctcatttcaaccttgcaccagtcctaggaaatagatgtcgttattgtccctgctaggacacagacaggttaagtcacctgcgtaggatcttcccagcttgtaaatgatggagccagaattcaaatccagactcttggctaccctgttactgtatttttcttgaattatatcactgaagagaatatagtttccaacacctctatgaaagacttaaaagcatctccaaatagaacgaaaagcaggatttctactttcgacatccccgtagaaaattaaaaggaaatacattgcctaatgcataagacaaagaagacaggacatcacatggagacatcggaaattgacagcatgaaacaaaatgacagcagaagacaaacatatcagttatgataataaaagtaattaaactccctattaaaagacaaagagctgagctttaagaatattctgcttacaagaaatacacacaaaaaaagataaattatctacagtgagtgtgtattttcttttttctttttcttttttcttttttttttttgagatggaatcttgctctgtcatccaggctggagtgcagtggtgtgatctcagctcactgcagcctctgcctcccaagttcaagcgattctcctgcctcagcctcccgagtagctgggactacaggtgtatgcaaccatgcctggctaatttttgtattcttagtagagacggggtttcactatgttggccagactggtctcaaactcctgacctcatgatcttccagcctcggcctcccaaaatgcggggattacaggcttgagccaccacacctggcccctgtattttcattttttaaattttaaagaaatactcggagggttgcttgagcctgggaattagaggctgcagtgagctatgattgtactactgctctccagcctgggcgacagagctagactctgtcaaataaacaaataaaggaatacttggtggttgtaaaaatttcaaatgatgcacaagtgcaatacagctcaaagtggaaatgctcatttcccagtcccactccccagaggaaaatggtttaacagtttggtataaacacatccacatttattctctatctacaccaaatgtgttacttttaaaatcaggaaaaaagcaagtactgtaataaagaaagaaggtcagttctcctcatgaccacaaagaaatctaagtggtggtggtagctcattttggcattaaggaagaactataagggtagttactgcatttctagcaatctctcatttaatcttcttgccactcttgcaagaaagatgtaattgtgctttatccatgagaatccgcaaaaacagtgaggtgagttgacgttcccaaaatcacccagctggtaatcattgagcacatactatgtgctaaataccaggccaattgctttacatctgtattagtccattctcacattgctatgaagaaatgcccaagactgggtaatttataaaggaaaggtttaattgactcacagtttcacattgctggggaggcctcaggaaacttacactcatggtgaaaggcaaaagagaagcaggcaccttcttcacagggcgtcaggacagagtgagtgcaagcaagggaaatgccagatgcaaaccatcaaatctcctgcgactcactatcatgacagcagcatgggggaaactgcccccatgatccgattacctccacctggtcctgcccttgacacgcagggattatggggattataactcgaggtgagatttgggtggggacacagagcccaaccatatcaacatccactgccccattgactcttcatgaggaggtattgttatcctcacttcacagatgaagaaactgaagctcaaaatggttatgtaacttgcttaagaccatagctaagtgaatgagagagtcaaggttcaaatccagatattctgattccagaatcatcacttttaacctccaagtgaggtctgagtcccaagttcattctgcttatattctaccacaaaacagtggaagacaggtggtaaggggcacaggtgggtagtggggaggcagagctagagagtaggaggcaacacttccagccgcagggctgagtaactccagaggcactctggtcagaggaaaggacttccactacttctggtcactcacactggacagctagtcaacaaaaccccttagcagcagcctacatcccgttacagaagcagtggttgaggtgggcattcccacgtccacccagagtggttaaaaatgcaggctctggagctggactgcccaggtttaaatcctgaccctgcgacttcctagtgtgtgttcctggccagtcgcctaagctctttgtacctcaagtatgttccctcagctatgaaatgaggttaatgtctgtgcccgccttataggtggctgtgaagactaacacacaggggaagcaaaagcatacatgaaggtcagagcctggcatgttgtagagctcagtgctcaatgagtatttgttctctgtattctattctgtcaccattccctattcctctttgccttgcacaactttagcatcagggtcaggagaagtggctcatccctcacaggggacagcaacccctcatcagaagctcagtgtatcagtcagcctgggctgccgtaacacagtgccacagacttggtgccttaaacaacataaatttattttctcacaggtctgaaagctggaagttcaagatcaaggtactggcagggctggtttctcctgaagcatctctccttggcttgcagatgcccacttcctctctgtgttctcacgtggcctgttttcctgtgcacatgcacccctggtgtcttcctcttataatgaggacaccagtcctactggactagggctctatcctcatgacctcatttaaccttatttacctcctgaaaggctctctctccaaatgcagtcacattggtggctagggtttcaacctctacattttgggaggacacaattccatccataacacccagtatccctgcctatcaaccagtatttcattccttcaacaaatattgaacatctagtgagtaccaggtgctgggacagtcacagggtccctcttttgtcttattgctgagctcttctccctgttcaagagaggatccttccttctttttccttcttttctttgtgtgtgtgtgtgtgtgcatgtgcacgcacacagacatgtgtgtgcttccctgtttttgccttcaccttgtttaaatgaaaaatttcaaacatataccaaaacagagagaatagtataatgaacccacatgtacctatcagtcaacctcaacaattataaactcatggcctattttgttttcatttatatccccacccattcccccacaaccaccctgctggttctgggattatttcgcagcaaatttcagtcatcacacttcatctatgacattttagtaatgtgtctccaacagataaaactagctctttaaaacataaccacattgctatcattttaaaaaattaaaaacaattaatataatcaaatttccatgattggctaatacgttctttgatagtatttttaagtcagtatccttgttagcttcatacattataattggctgatatgtctcaagtcttttctaatctataggtgtctactccccacccccttgagatttttttgttgttgcagaagtcgggtcatttatctggagataaatgagaattattcagaatgaggagtctcctgcattcggaattttgccagttgcttccctgggaggttgtttaacacaattgtctctcttttatgttccctttaattggcagtaagatctagaaacttaatcagattgaacttccatttttttagcgagaatatcttgtaggcaatgtcttcaacagaatcatatgatatttgggtatctctcttttggggtcattaggaaccattaatgatcataccctaggaattacaaaatggtaacatgctataatttattttttcataagctgaaatgctacacttaaagaaaacttgtcctcatcaactatttggttactccgagatacagtttgtaaaggaaaagcaaggaaataattatttgtatttgccggtttttgtattaatgagttgattccctaacaccttccaaagttgcacatttttaaatatcattacaatccaaacatactttatgtatttaaatctactgcagtttgttctaattaatgctcaaattgtgtcattggctagtgggagccttttgaagttggcctaacatcatcttgtacattttctgtctctgacccagaatcagttatttctcctagaaaccctggttccttttagtggaaactgatatttaaaatttgggcactaggggtactttttattattgacttcgttcctgtttctaagccttttcaatgaacacagctaggaaacagtttttaaaagaaaattcgtcatgggtttatttcatttccaatgtaaaaacactttttcttttttacttaacttctttaatatcatatccatatctcctttcactcttgctgaaaatcccagttcccaacaccattaatataatttcccaattcataggacatgcctaagagtcccaaagtagtaataccaatggctaccaacaataatataattacagagaatagtttaagggtttttttttttttcatttctttttgtatcctattaaggtaggctatcaaattattgtgttttaaaatctcttttactagtttcttcatgtgggattatgctaccaactaatctagcattgcattcatttatttcactctgcttctgagtttctagaaattgcttatcagtttattgatttgcttaatctttcattttaattatttaaaatatttacatagttccaaagctaaatatataaaaaaggtatattctgagaaagcctagcttctatccctatcttctctaccctgttccctccgtccttctgtgaataatcttttagtttttggtttatcctttcagtgattgttaatatgagtgaatatgtgtgtatgcctctgcccctttcttagataaagagaatcataccatacctactaatctctaccatgcttttattcacttaacaacatagtctgggaaccactccatgatattatatagaatatccctcattcttgttttatagctgcataaatagtccattttgttgattaccctagtttattcagttagatctctaccactgaacatttgggctgtttccatacatttgctatcacaaatagtgctaccttgcataaccttgtacatatatgtcatttcatatttttgccagtgtatctttgggagagttctagaaatagaattgctgggtcagagagtaaatgcatatgcattttgttggatattaccaaattcctctgcacagcagttgtaccatattgcacgttcaccagcaaggtcctagaatccttggtttctcacggcctcatgtgtcattaaactttggattttgcctatctgatggatgagaaacaatatttcactgtgcttttaatatgtatttttatgtttaagagtgaggtcaatcatcttttcaaatgtgaaagagacattgcatttaagaatcctcccctccaacatcacactctggggactgttgtggggtggggggaggggggagggatagctttaggagatatacctaatgctaaatgacgagttaatgggtgcagcacaccagcatggcacatgtatacatatgtaactaacctgcacattgtgcacatgtactctaaaacttaaagtataataataataaaattttaaaaaattaaaaaaaaaaaaaaaaagaatcctcccctccaaatccctgccgggcaactaccactctgcaatatgaagatgaacaacagagaaagtgaaggacagaatgattaaataggtcactggacaatcacaggtgcacaggaagagattaactagccaaactaatgaagcaacacagcagagaaagaaagcaaagtggtgaccgccaaaggaagggattgaatttccctctctggagattgtagatggggtttcgttgatatgtatgcactgagtggagagtggcctagacaggcaatggagactgcatgatctgtagctccccgggcagtaaatggggaaatcacagtccaacaaccagagatgctgggcctgtgctgagatggagccaagaaagagtccctcctcactgctgagatgcaaacctgtattgtaacaatgggatgtagcaataggcacgcccctccccacctctaaggtctcatgtgtccacctgagaaatggaggaaagcattagtagttgcagtgagatggatggatgggttttgaaaactggggttacccaggaagtgacaatacacatacacaatttactctcccaatgtttgatatagctctatgtaattatttagtttctctaagcctcaatttactgaaaatggggtaataatccccgcctataaaacgaggatgataatagtacgtgccatttagtgttgccattgtcacaaggataatccacattaagccctgacacatagtaagttatcgatacacatgagcttattactgttggctgtggttgtagcactattatgtgtcacgggggatttagagacagaagtcttgagattcaatctcagctctaatttcattagctctgtatccttgatctagtctcttaacctacttggccttagttttcttctctataaaatagggataataacttcataaatgcatgcatttaaatgagataacacatgtgtagcaattagcatagtaagtcatcagtaagagttgacgactactacccttattataatcttctttgttaattaaacttcctaatataagtttctattaagaatacttgacaactattttagataattcttgaaggttatagcattaaaaaaaaaagaggattgggtatattagactatcttttatgaaactgattacctcgagaaatctacaaaactttgcagagagagaagtgctatgtagctctttattcctccccagtcttgttcagggaatttttggcatctgatagctccatagtaagggagtacaaaggagcagaggttcctttgacatgggaggcggcttagcttaaaatctctggatttacgctgtcttgcctaggtctgaatccaagctctgcaacttgctaacccaaggctagttactcaacctccgtaagcctcagctttcctaggaggtaataatagcaccaacctcacaggggattttgttttgcaaagagtgaacatgattacgtatgtaagctcagtgcctgactgaggtggagtcaacccccagtcaatggcagtggtgatggcagtgacagaagcagtaatagtggatgtcatcatcatcctcatcatcagccttggggaggtgtgctagtctgggtgggctaggctacacggtgttaacttacaacctccaaatcccagcggcttaaaaatcaggagcttatatctcacacagaccactgaagctacatatttaacatgggtcatcagggatgtctgctccttagagtcacttaggggcccagattgatgagacttccctcttgacacttgcttccacaattaccgaggccggaaaaggaaactgtgtgcagatcacacacaggcttataaagtttccacagagacatgatgtacagcacttctgctctcattttattggtcacagcagtcacgtgaccttgcataacttcaaaaggggtgggcagtgaaatccaatcatgtgcccttgaaagaggaatagctctaatgactaccttaggggctgagggtctggttgcaggaagagacagtggtggtgggaaagaggcagctgagaatggggaagcccaggatgggacatgtggacagaggcataaataacagactttgcaagaccagagacagccagcagctgtgcctaggcctcccagtgtcctgtggagttccctgccttggactgtattcattcatcctgtcattaactcattgattcatccaaccagcaatcattgagaaacaactgtgtgccaagcaccatgctcaatactggggatacccagttgtgtaacacaattaacacatcccatgccctcctggagtttacagtgaagcagggagtaccggcaccctgagctgaacgtctgagttgtagggtcctggggttctgaccttctccagggccagatgtgaggaggttggctgggtctatgcccctgcctcaggcctgacaattgagtgaggaacgaaggaaaaacaccatgtggcccaaatattagttgtacttcagcccttctagaatgacaaagggactttgcttaaaggattcttttcatttctcccatctggcctttaataacactccacatgatataactggacctacccataaaggtcccagtagacaaaactcacagtttatagtttatgtaattttccataaaaacaaaaactatacttattgcctgacacattttatagagagattttctgtttgtttactcatttgtccctgaagaaagctgcctctcttccttctgtccccccagctccctgtggtggtcacctgacttcgcccagcggcaccatcctctctccgggctggcctggcttctacaaggatgccttgagctgtgcctgggtgattgaggcccagccaggctaccccatcaaaatcaccttcgacaggtgcttgtgaccacagccttgggggagagggcaagggggagatttttacagagccacgtgggagggaatgcagggtggataggggaccagtaccaacgctgaaatgtcagcaaggttggagaacactggaccaaattgccctgggtggggcagacctcactggctctgcccttgggcttggtttgtgctgtttaggggactatggcaggaggggtgaagagaaggcttgggtaccatttgggatgttagagctcccccctccccagcccccaaggagggggagtgggcagatagacaccatcagatgttaaagcatgactctggtatctgacgagcattctcctggaaatgtccaacgtgggaaggcagccccccacctctgccccaaatcctgctcatgtgccccacttctagctcccaccctggctatgccccttgggtggagaacgtagccacctaaatgtgaaaacaaacttcttccggacaaagtgttcctggcctggaatagcagtctgcaaacttttgtgtgaagagccagatggtaaatattttaggctttgtgggccacttgcctacttgcatatctctgatgcatgctctgctttgcctttttttttttttaagatctctttacaaatgtaaaaagcatccttagctctccaggctatagaccagatctggccctgaggctttagtgtgctgacccctagcctagaatgttctgacctccatgaggctagtcattgtgcctctaggtcttaagctggctcacagatcaggccacagagaggatgagagcagtttccaaccatggaaggaggaggagggatgttaaatagagtggagaaggtccttctgcatcgctagtgaatgtgtgcaaattatattaaaagatcccagcctgccaaaatctggttattcggaagccctgggtcaggcagggctttatgtcatttgcaaattaataagcttggatttctcaagaaggcttcatttctgtcatttggcagattcaaaaccgaggtcaactatgacaccctggaagtacgcgatgggcggacttactcagcgcccttgatcggggtttaccacgggacccaggttccccagttcctcatcagcaccagcaactacctctacctcctcttctctaccgacaagagtcactcggacatcggcttccagctccgctatgagagtgagtctcagtgggctcaggaaaagggatgacaaggtcagcccaggtgggtcaaaggcctcaggactgtgctccaccacaggcccctgcttggccccatccccatggtgttcttggctaggctgtgcccttcagaaggccctggggaaggcactctgttgctctcagcatccctcaggtcatgggagcttagagttgttcacaaccttcacgctaggcccttgcgtgcagacctcctggcaggtgattgggtgccgccacgctgggcactctgggatcagaacatttgactgaccatgaagttaacccaagatggcatctcacacccacacttgtccttcctcatcacctcccacattcatcccctcgatttaaaggatcattgtcacttcagttctctgtagaccaacatagaaagctggagctgcgagcaccatgaggacaaggtcattttcttactcctaagccttagcatagcacctaagccactctcagcaaattctgacggccacatttcatgagtcagtaattggcaacttctgcctttaataaaccagggctctcttcttactctttggagtcaactggggtccctctgtagtgacagtaagctgtctgtcccagctgtggcctctctctttcagctataacactgcagtcagaccactgtctggatccaggaatcccagtaaatggacagcgtcatgggaatgacttctacgtgggcgcgctggtgaccttcagctgtgactcgggctacacattaagtgacggggagcctctggagtgtgagcccaacttccagtggagccgggccctgcccagttgtgaaggtgagggacaccatgagggggcgctaaagtagcagactcctctcctgccacagaaacacaggtgctcaaaagaccactgactccctcaccccatcagcgaaggttgggctttcgagagatgggggatggggtcccaggaggatgacgggggtgctcccctgaggccctctggtctttcactgccctcttcactccttctgtagctctctgtggtggcttcattcaaggctccagtgggaccatcttgtcgccagggttccctgacttctaccccaacaacttgaactgcacctggattatcgaaacatctcatggcaagggtgagtgtttcagcccatagcaggcattgggatgtgacgaggtcagggacccaagttcctcaggtcaagttgacctcaatggggatctccctagatagtgacctctgggcttcgtctgaacttttctcaccaacaagaaaacttccagagtcttctcatccctttgaatggtagaacttgttcaataagtattgttgagattctaaaatctccctgctggaagagctcttagaggttaccagctgtccaatctcactcagtacaggaaccttctctaaatcactccctgcaagatggcaacacgccagctcagctcaccctctgcctaaacatgcctgatgtggggaggccaccaacccgttcaacagatgggcacctactatcatttttgcacagatgctttcttctaatagtctattaggtgtctctgaaaatgtttttcttgtattgcatcctggaggagcatcagatacacctgctccctcttcttcacattcacccttcagatactgaacacagcgatccccttcttgcataactcagctcctcccctgatgccatctttcatatgggtcaccagcctgcactgctgcctcagctcccctaacgtgagtgacctttgggagtccaagttcaaagtaaaagtgctggttataaataaatgttaattaatatattaatactcttttctcaacaaatatgtattcggtgccacccatgtggctgacactggggctgggcatcagcagtaaccaggcagatttggcttctagcctcagaagcttattgccaagttcatccagagtcatggttcttgcagtttggcaaatacactaatgcttaggcccaaggctagaggttttgattttctacgttggcggtggaaaccaggcatctatgttttcagaacactttgccagtaattttgatgcatgcttttaattaagaacctctgatctagaagaattaacatgcagaagagccaaaaaactaattttaaaggaagattaatccttccggatattaaaatgttgttatgggctaaattaatgttaacaatgtggtatgagtacaagagtggacatacaaataagacgtggagaataattgtccagaaatagatccctccgtgtgtgcacacacatgcctgtgtacgtgtgagaaagagacagactttagtatataagtaaagtgtcatttcagatccattgaagaaaggatggattatgtaataaatggtgttaaaacagtgggttgaaccattggaacaaaagaaaaaaaaaccgtctatacctcaagcattctcaagcatttaatcacataaactccagcactagaggaacatgaatctctaacctcaggtgggcacgtactttaaagagtaacaacaaaggtagaatccataaaggcaaagactgctagattcaattaaaaaaaactttgaaaggatttaggttaaaaaaaaaaagttccataaaaatttaaagtcaaatactaaatagaaaaaaaaaaatcgcaacatgtgatcgactaaggattagcaaccagacacacaaagagttctttaaaatttttaggagacatatgcctagccaaaccagcccgcaaaatgagcaaagctataaagtaacactttgtaacagaggaaatacaaatggaaaatcatggacctcattaataatgaaacaagtgtaattttaaaagagaaataccatttccctttttaagtcatcaaagaaaattgtaacagtctgggggataatgtggacacttgcatgctattgactgctgacattgtgcgaaatggttcaggcattccagagggtgacttggtgatgtgaatcaaaagtctcgaaaatatattgtaagggacttaggaatctgcagattttggtatccaagggtggtcctggaacaaatcccctgcagatacagagggacaactgtacctgcctttgcatctagcaattccacttactggaatttatctgaagaaaataagtaaaactctacatcaagatttagcttcaaagatttcccctaagatattatgtattatactgaaaaattaagaactattaaaatgtccatcaataaggaaatgttaaataaacatagggtatggccatagaataaaatactaggcagctcctaaaaggaataacatgaaagaatatttaaagacctacaggggtggttgcaatactttgttaagtaaaaaaaataagtttgccaaaagaatatatttagtttaaaagacatccttgtttgcatagaaaacagcctggaaaaaatataccccaagatgttgtctcttattttcatcttttggcttttttctaattttgagcagtaaacacattacatctaaaatatactatttgtataacaaagaagatttgaaagaaaagtcatttatagtcccaccacatgtacttaagtgtgtcacttggcctttactaggcctgccctacccagggctagggtggcctggagcttactgcatcaaggcaagactagccaggtggtcagggtgaggcccaggattgtccgcttcccacaacattgttcctaaggaggggagggctggaacagtgtccttgttcatcctgcagagctgtttccaccaagcctggtcagaggagaccattggaaagaaaagcagcccctcacgatccctagagaaacaacccctgtcattgtggttttctctgtgtctgggcatctgtgattacaggaggtgtatgtttttctgtgagtttctatgtgtgtgttttttcctggaagtcaatcaagctcaccaactattttacaaatgtttatttgatacttgcactacccaaattgctaggaaaacagctgaacaagccactctgccagtgcctgccttcaggaagtttatgctttagtggtagtagacagcctaaaccaagatctcagtatatagcatgaccaatatgtgatagagcagacagagatgtgaaaacatcccaagcccagcccagggcttaggaaggtgtcctggagttgagacttcagctggtcttcaaagatgaacaggacatagcccggttgaaaggtgctcagcagagaatcaacaagaaatcatggatgaatgaccagatcacttcttccttagaaccacttaaaggcatcacctaattcttagcatagatccccaaattataaaatcgctaggccaggcacggtggctcatgcctgtaatcccagcactttgggtgtcaaggcaggcagatcacctgaggttgggagttcgaggccagcctgaccaacatggagaaaccccgtgtctactaaaaatacaaaaaaaattatttggcgggggtggcacatgcctgtaatcccagctactcaggaggctgaggcaggagaattgcttaaacccaggaggcagaggttgcggtgagccgagatcgtgccattgcactccagcctgggcaacaagagcaaaacttcatctcaaaaaataagaaataaaataaaataaaatagctggcacagcctcatagtccttacctgtctcagcctcattctgagccctctaaactaagttctagctacacaaaacttccttcagtttctggaacttgccaggcttcccttctcctctagagctttacacatttgtacaatgttcttctctctggaacacttcgtctccccaagcaaggggaatgggaatctctgccgttgcccttgcctggccagcccttcatccttctgaatccccttcctctaatgagccttccctgaccccctctccccagctctgcatctaggttgggctcttctcccctgggctcccatagcatgcattctatacctccatgatttcagactttactccactgtagagaacttgcattttcatcatcagtctccctgacagactaggagctctgtgagagataggtctgtcttgtttcctgtagttttcttggcttctggctctatgcccggcacataaggaactcaagaagcatttggtgatatgaatcaaattgaactgagcccaggcccttctccagagggcattcttcgttctctgtttctaagagtatctcgggttaacagacctattaagctgctgtctgtgattgctccctaagaggcagcagtatggctcaggaaactcaaaactctgtgaaatttgaaatagttcaacttgccacctgcccagtccaagggagcagccaattcaggagtcctgagaatgtgcccttgctgagaccccagagctgacaccttttaacccgtgaggctttccgggagttagatgagttgagcaaagggaatgccttctgttgcacccctactgtgtgccagccactatgctgtgtgctttgcatatactttcccagttatgactcacttcgggggtaaatgtcacctgtaagagagatattattgcctacatattacagttgaagaacctggaacctgaggtgttaagcaaccttagccaagacctttgagcaggtaaatgggcttttgatccaggtgtttcttacccccaagtccatgccttttccactgccctgctctttctgctcctatgtggtattgatgtcattggtacgattttgcttggttcagtcaagtgaagtatttgtgtgtgcatctgtcacatcaaatctggattcaaactccaacatggggcctctctatttctgcaacaatgtcttcattttcacacaatggcccaaaaagccccaagcagtcagcgcagctgggaaacccagaggtttcagctcagatgtttgctcatccttagaatcccagccaaatgtttacccctttggaagggctctatttgcatgctagaagaatagagtgcaaagcgcgatgcttaatcaacttgtttccacctgtgactgggtctcacccgctctccacccaactccatgtcctaggtaggagggaaaggacgtatatttcctaagctgtatagactgagaacagttttctcatttgcagacatgtttgtatgtcaggagtagagcatgcacgtgggcacatgcacccacaagccttttcacatcaaggattttgacccccgtgaagccttcccaaccagtgaggcatagttcccattcttcctccatgccccactctgaattctcactagtagtgatgtgtctgtcttctccactaaactgggagatctttctcagtgcttagcacaaggcctggcacttggtaggtgcttaggccttgatgcttctcagttgcctgggaacagggtatttacaagctgcatctttggtcccatcgcttctgttgggttctgtctcctccacctctatctatagaagcccaaatcctccaggatcaccagcctctatcaacagagatgcaaggatataaaaacctttaaaatgctttagcattagaggcttatctccaaccatcatttataaaaaatgtagcagtaattatctagagaagtacttctcaaattgtaagtgtgtataaatcatttgggatctgaagagcatgcagattctgattcagtaggtcttcagtggaggccaaagattctgcaattctagtaagtcccccagtgctgaccacactgctggttcatggaccatactttgagtagaaagtgggatcacacttggagtagcaggtgggtcctagtctaacatgagttcctgtcctggcaccatccacaacacatagtcccaataggatactcacttggtgtgattctgcatggttcattcaagttaagtatttgtgtgtgcatctgtcacatcaaatctggattcaagctccgacatggggcatggcccatgtgcatggccacgcacttacacacatgcccaccaaacacaactgccatctggacaagttctagaattgctttgggtgttaagaccatgctgctctataacttccctcactacctgatctcttaccctacctggctgttcttaactacctgctctctttctgtagcctgagaggccgcaccctggagtagctgagagcacagcctctgcaatcggattgccttagttcagatcctagctctaccacatactagctgggcgaccttggacagatgacttcatctctttgtgcctccgtttccttggatgtaaactggagatgataataacatacccacgccacagggttcctggcagaattaaatgagtttttctgtctcccttccaagggacaggggctgactatagtgcaagtaaaagcagttaggacagtaaatatttagtgcttgaaatgttaatgaatatcattactttgattttattttatgctcttaaccttcccccttactggagctccctcctccctctttccagctctctgattgctctttgaccatctcccccatcgctccaacttcacctggtctcctactccctgtcacttctgcccatgcttccaatcaccccttctctgattctcactctgccctcttctctcctagccctcttctccttgcttgtggcttcagatatcaactatttgctggtgactcaaatctacctctgtagtccccctttaatcctgaacttccaaatctgtccttccagtggcccactagctctcactgcttgcatgcagaaaaggctaagtccattactcttctacaacccacaccttcctcctgcgtgcccttccctaggtaacagaagacatcaccatccttcaggtggacgtgccactggatgtcatgttatttctcctttgcattaagtgcctgctgtcttggctaccctaccctgacccctgaaggctcatggccatctcctgctcttgctccttctgccaagccccatcctctcccagtgcagagcagccaccaatataactgatctccctccctgctctccctccacttcatcctccttacagccaccaacatcttgctaaaactgagatctggtccactctggataggatggcttctcattgcctccagaaaaatattgggtctggcccccgtctacctatccagcttcaattccaggagtagccacacccagctgctgctcaacaaacctggaattgacagtccctttacacatatgggtctcctgcctgggacactcttccttcccttacctggttaattcctgtgcatccttttaagatccatgtcaattgtttactccttggtgaagccatcctccacctgcctcttcctgctgtcaactgctttctgttccggcccccatggcatgctgtctacattcattccagcactcagcactctgtattgcagctattcgtttaatgtctggtatatcctcttgcacctaaccctggatcctagcccatagtaaagactcaacaaatacacaaatgcttgttggatgaattaatgaatgtctctaaagcattctcataggtcaagccataaatctctcttttaaattttgagaactgtaaaattctccctgtaattttagaactgtaaaagaagaactgtaaaattcttctccctgactgaatctctgggcacttgtgtgttcaggttccttcattcagattcacctgtatgatttgtcaatgcatgcttgtagtcatacacacagatagacatttgcaaactggaaatgtttgtgtagatcctgtcttgcagctgaggttctccagccatctcgccatcaacaacctgaccctctggtctcttggcaggtgtgttcttcactttccacaccttccacctggaaagtggccatgactacctcctcatcactgagaacggcagcttcacccagcccctgaggcagctaactggatctcggctgccagctcccatcagcgctgggctctatggcaacttcactgcccaggtccgcttcatctctgatttctccatgtcatatgaaggattcaacatcaccttctcaggtaaagagtatgagggtccctgaggggaagagaccatggtgctatttgctctctccttctgctaccagtctctggttttcctagcagatagatattaatccactctccagtccctgggaagttgaccttagtgcttcagcaaaagatgcttgggttagacccaagtaagaacttacctataatggtcttggaaggagttagcataatcactgaggattcttattctatgaaggtgtttaggatttgctctgaacatggcccacctagctggatgaactagaggacttcacaaaagtcccttcctaccttagttattcgagatttttcttctgattccacttccacattgccaaccccagcaatatgaaaaaaaaaaaaggtttgaaattaacatattggagtggtttagtctcatttgggatctttttcatcaatgctaattttgtagtaatagatatttatctctctgtttagggatttggaaaagaaagtgcttttatttggcattcagggagaaaagaggacccttggctcctctcataccgagcccttcaccattcttgtcccgtagcaccccagagtacctccctccacctttctcagccacggccaggagtatcagatggattcctcctgggatggacaagaggtatccagcttctaggaactggggtgtggcccagcttagtcccctgccaggcctccaatgcagaagtcacctgtcacatccctggattcacttggccaatgggacatatccagccagtgagactcaacccttatgagagagaccctctttctcatcacacatccctggaggactgcatcctgaagggagaagcccttgcagacgagggactagtcacttctatgctgtcactagaggccccaggcagggctttggcccataaatgcccctggtcatgcttgccgtctgcctcaagtgccaacgtagctgagacatggcttctcgtcaggcatttggagtgtcttcaccagtgggagttgcctgaggctaagtcatgtattctgaccttctagaacctgctggttgaatgtatctagtttgttgcccagagacaaggaagcaggagagcctgtgagccccaaggcacaggtttaaaatggagataaaaggatagcacagagaagagctgagtcctgaggatcctcagaaatcctcctgggaagcctgtctaggaaaggctgtgccctttcactgctcacaggagtgggtgcagaccgcccgtcctggcctccccgtgcttctctctgcctctgcctccccgtgcttccccatgtttctctctgcctctgctcccctcgggctctcacttcttctctttttgggccagtgtcaccttttgtgggccagtgtgcgcatgccctcttctctgtctttcgttgtccctggccctttccccctggtgttttgcctgtgcgttcccatctttttgctttgtgtctccccgcaatgtctctgagcccggatctcctgctacctttccagagtacgacttggagccctgtgaggagcccgaggtcccagcctacagcatccggaagggcttgcagtttggcgtgggcgacaccttgaccttctcctgcttccccgggtaccgtctggagggcaccgcccgcatcacgtgcctggggggcagacggcgcctgtggagctcgcctctgccaaggtgtgttggtaggtggtcacgtgctttcattttgcttcactaatggggtgggacagattatagtcaattgatgtgaggtggtggacggcacacaggccaagaggctgacttagcccacacttaccacacttacctgcagtgggacccggggcaggtaacctaacctccttctgctccatcctccttatctgcaaaatagggatggcaatccctgcttcatcaggcagttctgtataaactacagtgacctttacaaattaggtccacagtgggcactcacatgaagtcgatttcagtactcttacctccccaccctcagcacacagacccatggcttaaggatgcctcttaccgaggaatctggatgggcactaggtgggcctgtaggaggggtatatgacctttgcccagggggagtccccatctggaggagtagatgggtgcttttactaatccaatggcggtgctcactcttagagacgccttaggaaggcttcatccattcagcaggggaggacaaaaggaacaggggcggggtcatttatagatgacccactacatctcaggcatctgctaggttctgaaggtacaaaggtgaacaaaacagagaaattcttcactcgtggtccacattctggtggtggggacacaagctgtgaatatttagatatgtgatgtgtcaggcagtgttgaggcatacagagaaaaattaagtcagcttagaaagtgctggagctagggttgctcttttatcatggtcagaaaaggcctctctgatgagttgacgtttggccagagatagatatctgggagaagagggaacagaggaccaagacccaaaccatgagcatgctcagcatttgaggaacagctcagaggccaagctggagcaagcggcagggagaacaggagatgtggaggttagaggcagctgttggaagttggaagtgggccctgccagcctccttgcaagagctttaaagaagtctgttcagagcgctgtgcccaggtagtaggggaagcaagtattttccccagggcggagtgattgctgtctgtccctaatgtatgaggctcctgggtgcctgtttgctcaatccttataatgtagggctggataaaacactagctgcattcatggagtattttccatgctcactgttagccatggacctcacgtaaagtgaaatagtatataaaaccccataaaaatatacaaaacagatcaaagcagcactgcactgactgaaacagggaccagcatctcaaatgccagtgaggtcagctgtgcccgagacaagtccatggagccctcaggctatgccgaggacagcttagacaggctggcaagatgagccgggcccaggctgtgcactcatgcaggccaaggtggggtcactgctctgccacttaccaacgcctagatctcaggcaggccagcaaacccccttaacctcagcttccttgtttataaaacagagataacagcatccaattcacaggctttactctaccttagatgacatcatttacataaaccaagaggtggcatataattatcagcattttgccaataacatttttatctgtatttatcaataaccaattattgttattttgccaataaccttttacaatctcagaaaggaaacattaaaacaaagagctacagaattccatttctgaacaattaaataaccccagggtttactccgtctcctataaccatccccaaaggcatccacccaccctgatctggccacacacactcagaaacacatagaaccccgccacccaccccaggaaggttcagttcatgtctggctgctagcagctcctttagtctctgggaaagcatcctcagctaaatggttctgggggaaattctccttgaatggaattaaccaggaccacagatgcacacagcccttaagctcttgcctcattgatctcattacataaactcattctttaacttattattccaattactgtttgttcatgacacctcacaatattttcattattacatttgtcttctgtttcacatgttattaataatgcacagtagttatagtcacctctaattaccaccagccctgctgccgaggctcaggctggaggcatctcaggaatgcccaccgggggctgctcccagtcgccatgcaaattggatgatttagtccacatagtgctaccaggaacatttccagccgagaaggagatgaacagccctgggctttaatgcatggtgtgacgtgggtggcggggagggaggtgacatagcccctgacatcaggggcccctgaatttgatgtagaagagacagccctgaccccaggggaccccagtctgcagcaagagacatggccctgtccttgggaatcctggtgtgatggagaagacctaaccctctgcctcagaagccccaggctgatggataaggtacaacctctgcccttaacgagaccccttctgatgggggcgacagaagtcacagatgccagaatcagccacagcacttacctgtggttgtgactgtttgtttctctggaacatttatttgtttccatttgtgcctgtgtttggcttctaagttcatctgttcacctcccctgttactttggagactctcccggaagcaagtgccccgtccctctatccctcctgtcccctccctggtgcccaggacaaaggcctgacagggagtcaggacctggggattggccaaggactggccacatctaaagctatcagcccctcctcgtaaaggtatcaggcgtgtgggaaggaggagaggctcgtgctggggcagaggtggggcacatagctcttatgcaggaagcagggccaggaaggaggtccaaaaacacacccaagcccatgtttaagggaagccagctgtcgagaattaggcagagggcaagaggcatcaggaaccatgagggtgctgtgagcctcgggcagctaatgcacgcttcccatatgcttctcaggctttctgccagtcccagaatccaggcagttagggttccaaatggaagcaggtaatccatgtagattcacctgggacattggtggagaggctactatgtgctaaccattcccctatgtttacctatcttatatataaaatctcatgcgttgattctacagtcttatgagaatgctattattgtccagatgaaggcagatgaagagattaaatttcagtgagttgacacaatgtatctaactccaaagtccatgatcatcccactgcaccacaggcctctgcctagatggaggggaaaggtagtaatctcagagaaaatggagagatgcttcagaaggctgcccatgtgatatgactgagtaataagtgtttacatatgcatggccctaagcaactccccctccccccgacaaatcctcaccctcaccctcatctgagatcatcaaagaaatgtacacatgctggaaacgtctatgtaaattatcagcagccactgcccccagggagcctgcccaccactgtcccttgagttttatgagccatctcagcacattcatcatgatatttggaagttttgcaaacagactaagtttaaaagtactgtaaagttagatttctcctccaagagaaataaatgaggccatatataaagtcttaggaaactgaagctggtcctgaattgagcaggacacagggaggagggtccattcagaaaagtagggacttggtggtgggacatgtggcccccatcttcaaaggactaatgaggagccttaggacaagataaaacacaagatgtataactaagcccatgagcagcttatgtttccatgttctgaaggtttccatgttctccatctatgctgcctcagcctagtacgctcctggcttagggtaattagggttaactataaggcccaagcaatggccctttggtcaaccccagggcttttctagccacagactgtgcctggactgaaggatactgagggatggtttagagaaagcagatttgctaccagccgcctgaaagattcaaggcatgctccaaattccccatatgtccacacgaataacaggcctgccatctggacttgtatttacatccttccggaacctaattattatttttaggactgtacatcttctgaggtcagtgtactccatatccattcattcattcattcattcattcattcagtaaatatttattttacagacaatccaggctaagccttggaaattcatagattcatccagcatgaccctagccctcaagttactgacagtttaggtgggggacacaggacaggcagcaagcaatcaaggtgcaatatgggaggtgctcagatacaggaaggaacagggaggggccccccaattattaaagatcccattcctctgtgcatgccctaagcctgccctgcctacgcactgtgtgggtgttaaggagacagtaacacgaccaagccccaaaggatccacagtgcagtagaggacatagaaatgttaacaaataagtgaagtaaaatgggatgactactataaataaaggtatgagaacaatggggaaagaatgactaattctggaggaggagaagcagtttccagaggagggtgtgatttcattagctgttgaatgaaacaggctgcaatgagactatgctaaaaactttccccaggacccaggaggttgagttctcagccccctcctcctcgtgaatccacagagaggcttggtctcagtggttgagtacctggttccttatctttaaaccagaaatgatcattgtgcctacattatggggctggctgttgcgactaatgactgaaatggtccttgtaaagtgtcaatcgtgctgttttgcacataagggttagcgattatgatgtgatcttgccccctcttagtttctattctgtgatactgaaaggcttcatctctcctcacttaactgcccccctcttcccctgacctcctcctcggtcatttctgttgctacgctactatatgaataggtatgtggcacggctgctttatagcactgagaaattgtaaaggatgcctggtgggttagcgtctgtttctgtaggagagagacagacaaacagcacaagagacagaaacaaagcaggcagcaccataggtagggaagtattttttttttaagtttgagaggcatttctgtagacagtccaacaactggacagacacgcaggcaccttggcaggtagacaggcaaacgacttgtcatctttgtcaggttcttcagagctgtgagttgctttctggatgcagctgatgggggttaatctatggttattgtgattctctttccagctgagtgtgggaattcagtcacaggcactcagggtactttgctgtcccccaactttcctgtgaactacaataacaatcatgaatgcatctactccatccagacccagccagggaagggaattcagctgaaagccagggcattcgaactctccgaaggagatgtcctcaaggtaaaattgatcgatttcagagtatgtgtgttatagtatgcaatagtctagtcaatactcactcctttgtctctgtgtgaatgatccaaactttctccttccttcctgagtcccaaaatactgtcctcactcatctgggagaaagagaggaccaaaagagaggggtatatgggtatctaagaatatggttttagagtttgtttagaagctgcctgctatcaaatgcatgtgtaattgagtatgggttgactgcataataaaagacaataatttagcttagggaacatggcaaagccccatctctacaaaaaatacaaaaattagctgggtgtggtggtgcatgcctgtagtcccagctactgggtaggctgaggtgggagggtcacttgagccagggaggttgaggttacagtgagccatgatcatgccactgcactccagactgggtgacagagtcagaccctgtctcaaaataataataataataataataataagttcggttggagcagccaatggatccagttttccattttgagccctgaccgtcaacatggatgatgaagagctcatagaacatgtatatatatgcatgtgtgtgttcatttgtgtagctatgtatttatggatatagatgcttttttaaatatgtttccacctgtgtgtgaatcggtgtccatgtatttatttggttttggggatctgtgtctgtgcatacctgtgtcagcatattgtgtgtatgtgcacttgtgcattgtgtatgttttggttgaataacaggctattgcagtagcttcagtgtactacgatgatggcctggtgtggcagtggggttaaagaaagtgagtttgagacatatgtaagggaaggaaatgataggacttggattacagagaaggtcatagagagggatttgttaagacactgagcatatatgtcttatgtttctttgcataaatacaaagaatatgtgattgagtacctccaataatgtgtggtgtatgtctgtgtaatcacagagttgagcgtggagaatttattaaagagctgccttaataaaatgaatgataaggaaagcctcatacaaagcatgttcattttcattctaggccaaggaatttttttagctttttctaatatagttttattccttgtagccagagaagtccttacattggaaaaagttgaaccagagcccactactctggaaaatccaaagataaaccattaaatttccatgctttcagattatctccagatgtgataaatgtgctgtcctttttatgtacagatgatggatactcttggccaaccccctggggcatatgtcctctggggtgtatggtgtgtgtgtgtgtgtgtgtgtgtgtgtgtgtgtgtgtgtgtgtgtgtgcgcgcgcgcgcgtgtgcacgcgtgcgtgtttgaaatgcatttctcactcttacctaatcctttttgaacccaagaagattcactcatgagatcactggctgggactggatgtgcctgaaatgggatagaacaatctcattggcttcttaagctctgctttccaaccccacataaaaacagtgtgtgtctcccaacaagagaatacaagacaagggttttatgcccttccaataaccatgtctttaggcatcacccttgaccttcacttccctccatccatttgagtctcagagggtgcaatcagtacagcagcaccagagggacctcctctctgtagaggtacagatggagtaacgcaagctgggcaatgcagaggctttcttggatgaaggccattagcacaaaaagccagctttgaggcatagtttacaattttcaggttttgaagggagtataagcagtggttctgtgcaagtgacctgatagagccagcagaaatggctcccaggttgctggaggtcatatggagtatggccagtgcccatgcttcctcactaagggggtctagattcagaatagcacctaagacatagtcagcaggtgtgcacactcaacggcaccgtcagggttctggcttcagggtcaggtgggcagctcagtagataagcagagagagtctttctgaggtggtcagggtaagaaaggaggagggacatggggcataaaacctaggtcagagttcagggaggactaacagaggatgcaggagcccaggtagtgcacacacatacgtgcacacacacacgcatacacaaacacatgcacacacatgcacacgcacacaatgcacacacgcacacacacatacacacgcacgcacaaacacatgcacgcgcacacacacacacgtacatgcacacacacacacactctttagcaccagggtaggaaatgctcctgctacggcctctttgagtttagctcctctgctctcccttagagactgctgagtgtttccattcccaatttccattttccctctgttgtggtgtgccaacaagaaaattaactggatatgtgtaaatattcagtagatcagaagaagaagacatgtcttcggaatcagagctaattgcccctctgtaggcaacgaagaacagagacatactttaaaagctcctaatttgtattcttaagagaatttgagagaatattatatttatgacacaaaaataggcaataatgaaaacagagcaatctgagatgaggagagattgaatagagatgaaaaacatgatcacccaattaaaaaatggaatggaggcaatgaacggaagatggtaaaccacagaaaaatgaaatcagtttattaaaagataaatttgagaatttctcccacatctcataaggaaatgaaaaagaggattattttatattaataaaatggataatcaatccacagtaaaactttatgtgccaaataacatagcacgaataaattaaataaaaaccgctggaaatgtaaaacaatttaataaagttacagccatcatggaagattttaatatacctctgtaagtctgtgacatatcacctaacttaacgataaataaagatttgggtagcttgaataatgtaacataataaatcagaagaaagtaggagaaagatacttttaaagataaaggcagaaatgactagagaaacaaaactaaaaagcaatagcaattgtcaaccaaaccaactgttttttttttttttaaataataaagtagacaatactagcagaactgatcaaggaataaagaagccacaaatatgtaatattaggaattgaaaagggacataatcaaagatataggagagattatggaaataagaaaatgtttagggatcacgccactgcactccagcctgggcgacaaagtgagaccctttttcaaaaaagagaaggaatgtttaggaacaactgtaagccaagaaatctgaaagctcagatgaaatggaaatttttatagataaaaagtactaatattaaaaaaaatctgaaaaaaaaacaatgaccattaaaaaattatgattcccccgtatcctctctcaaaagccccaggccttaactattttacaggtaagcttaacaaaacttcaagaagcaattaatccctgcaataaactcttcagaagagagaaaaataaagaaccatctcccaactcattttttcttaatgaggcaagtagaaactttggtatcaacgagtaaaattatggttaccaggggattgagggaatggggagataatggtcaaagtatagaaagcatcaattagacagaagaattaagggtttctttttcctttgagatgtattgcacgttacagtgaatatagcaaataataatgtatcatacatttcaaaatcactaaaagagtaaatttcaaatgttctcaccacagaaaaagataagtatttgaggtgatggttatgttagtttgatttactaattccacatcgtattcataaatcataacatactttctactgcatgaatatattcagctataatttatcaatttataatttaaaataaaaattttaaaaagaacagaaatcagaaactattagggcagtctcacttttgatcacagatctaaaaattttgagtataaatctgattgaatttggctatgtattaaaacaaagatgagaccatcctggttaatacagtgaaaccctgtctctagtaaaaatacaaaaaaaaaaaaaaaattagcgggacgtgatggcgggtgcctgtagtcccagctacttgggaagctagggcaggagaatggcgtgaacctggaaggtggagcttgcagtgagccaagattgcagccactgcactccagcctgggtgacagagagagactccgtctcaaaaaacaaacaagcaaacaaagacgaccaagtaggtttgattccaggaatgtgaggatgtgtcaaaattagaaaagctcataatgttatttgttagacaaaccatatgaaattgctatttttgtaggtcaaaactgttaaaatattggcaatttcatggctcaacctaatagcctataaacagattagcaaagaaaaagacattatcctgctaatacaccccaaaacatcatgtgattaagttcaacacccactcatgatttttgaaaacatctcataaaactacaaatagaactttcctaacttgataaaaatatttctaccaaatgcctatagcaaacattatacttaatggcaaaacttcctaaagattttcagtaaagtcaagaacaagatcaatagttctactatcaccaatagaacgcagcattgtactgaagagacaaaccattacatttataccagaaaaagaaaaaaaggaactataaaaattagaaaggaatatagaaaattgtgacttttgtttcaaaaatacaaaacaatcaactaataaactcaaaatcaataagaaaattcacaaagcttctggtgtttctataaccaaataaaacttgcaatcaggagggaaagtctcatttataatagaaacaaaaactgtaagacacctagaaataagccctccaaaatgtgcatgatcttaactgagagaagataaaattttattttgatattgatgtaactaaaataaatgcagggagatttcattctcatggatgcacagagggtatgaaaaggcaggcaattcacagaaaaggaagtaagaactgttgataaacataaaaagatgctcaacttcaatggcgatcaaggatttacatattaaagtgagataccactttacactcatcaaattggaaaacatcataatgccctaaaataccaagtatcagcaaggatataaagcaatgaaagctgtcagacgttgctggtgagagagcaaattgctattccttttcaaagagcaatctggtaatatctaaccaaattgaagatgtgtcatccccacaaccagcttttccatgctagatgtatgctctagagaaactcaagcacacgtgtgcaagcggacatgcaggaatattcatagaaattatgcttacattgtttgtaattgtgtatagaaagctttctgcttagcatattcattttgaaaccagccatcttgctgacctgctttattggatgtaatggatgtgcatagattctcttggatttctcaatcacctgcacataatgatgaattggaccatcaagcaatattctgttaggaaataaatgtatacaaaggcccaattcccaatagcaatcaaaaatataaaaatacccaggaataagaacagaatggtagtgagagacataaaagacattttgattaaatggagctagacaccatgtatatggattggaagactcaatatcacatagatagatttttctcaaatccgtctatacatttaatgtagctcagtcagaattacacaagttttgttggggagttttttgttttactttttataattcaggaaaattcttgagtttagaagagtacatctgggagaattttgtttaagttaaaagaagacaaatgaggacttttcctactaattatttaaatatattgtaaagctacagtagctaaaacagtgtgggtcatgcacaggaatagacaaatagacaaatgcaatagaatagaaagttgacaaacaaaaccaaatgtatataattatatgttaattatatatgtgataaagactgatttgaaattagtagtgtgtggaatatttacaaacagagtttggttaaatgactaatctatcagggagttaaggtagaattgtatatcatatcccaaaataaattccaggtagatttaacgacatgaattctagaggaaaatattggtttatttatcatacatttactgagtgagccttatgtgccagagcatatattttgggcgctgatatgtaaataattatcttgcagattgggttaatttttattatagaaattcctgccaccatttaaatgctgttatggaaaaaatatttaatgactttaaaaatatacacattatattaagtgaaagagcagtttgccctatagtatctataattcgatcttattgttataaaaaattataaaaacataaatttatgcaaggaaataaatgcatagaataaaggctagaaggacacttaccaacatgttgtaagttctgaaagttatttgcacatttctgttttataagtttttctgcaattaatattgtaatgatgcaagtaacatttttgttcttgatgaattaggatgaattatgcttggaaattaaggaaaatatcctgttcccatcatactttttattaattaaccataatttcttaatagcatcatatatccagtgagggtttaaatttccaattatctcatagatgtcataatattttttaaatttatagtttatttgaatcaggattcaataaggtccacacattagattcattgtctgatgtgttttttaatctgtaggtttctccctccatctcttttcttttcccccttgtaacttacttgttgaggaaatcagatcatttgttcagtggaactttccactctggattttgctgaatgcactcacagggtatcatttcgtatgttcctctgtcctcggtatttattgcctgtaagttggaaattggatccagtggcttgatctgatcaggtctgattttttgggcaagataactccatgggtgatggtatatcttttattaaagaaacacatggtgtctgattgtctttcttactgcaattgatgattattatttcttattgcaattgatgattcctagtccattgatgataaatgccttggtccattgatttccatatgtttcggtgattaaaaatatttttgtaacaatttaagctaaactctttgaacttgtattatcttgatgtctgttggaaccccagaattcactcagtctatcagtgatacacagcaattacacaaggatctggaaacagacttcaggctcccaggagcctaaacaaatctctgtaatatacaacactgttagtttgaaggatggcttcttttagaaagctttgcttcataaatagtacaatggaaatattgtgccaatttgctggcagctggcatcacattgtgtgccatgcacaaatattcatcacccactcagagatcccatctttgatatttacaaaagcaccagggggtctttcactcaatcacaacttctgttgttatttgtacaattatctggaaaggagcagcaaccttgaaacctggggagccagttcattattctgatgattgttgtctttgctggtactaagaagttcaggggacagatgggagtgagggaagccagatgcctgtacgattccacccttggcaagcccagcaggccctagctggagccctcattttaggagggaaggggcagaggctgagcttggggaagaaaaagtcaccatgacatgctggtgtctggatcccagggatgatgtccagcagagtgctcaagacaggctactgccacagtggggtgggatcaggtgagaggatggctgtctcatctactggaaggacaggattgagggtttagcaatgtagagatgaatgctttcagcctgtctctctgaagaaacagatggtttgacaagcaggcaacccaaacctggcctccccaggctgctaaagagtaagctggtgctatatgggcattgcgggaacaagaacaaatctccactggaaagattagaatagcaatgagttcccaaagactagattcacactaaagatgggctgagcatagaactgacatcaagggaaaacgagataacttgctcagttgatagcttccctctgccatcttccttgcatctgataactcactgtgcctctgatagttgttaccagtgctaaactccaggagtgtgggttgtggggtaaggaggtgttgttcaacataaggccatgctgacgacattgggttgggggtctctcctgtgtccaggtttatgatggcaacaacaactccgcccgtttgctgggagtttttagccattctgagatgatgggggtgactttgaacagcacatccagcagtctgtggcttgatttcatcactgatgctgaaaacaccagcaagggctttgaactgcacttttccagtaagtctttcttgcatctgtgtggacaaggaagtcagggtttcccattttattcatttatttgagcttctgcttgctcacgagatacaaagaatgtgctcttaagactgttttaaaatccaatatgtatccatcagtggatgcatgggtaaacaaaatgtgatatgttcatacaatggaatagcatttgtccataaaaaggagtgaagtggccgggcacagtggttcatgcctataatcccagcactttgggaggccaaggcgggtggatcacgaggtcaggagttcaagaccagcctggccaagatggtgaaaccccatctctactaaaactacaaaaattagctgggcgtggtggcgggtgcctgtaatcccagctacttgggaggctgaggcaggagaattgcttgaacccggaaggcagaggttgcagtgagccgagattgcgccactgcactctagcctgggtgacagagcaagactgtctaaaaaaagaaaaaaaaaaatggagtaaagtatacatgctttgacatggatgacccttgaaaagattgcagtaagtgaaagaatccagtctcaaaggccacatattgtttgagctccatcatatgaactgtccagaacaggcaaatccatagagccagaaagtaaagggcagttgcctagggctgagggagttgggggaaaaatgtgtatggaacttctttttgaggtgataaaaatgttctagaactgattatggcaatagctgtacaactctgaatctactaaaagacattggattgtacacattaggtgggagaatgtatggtatgtgaattgtatctcaataaagaaagctattggggaaaatcatgcacggagtatagtcaggtttcccctcgtctgggctcaaggctgcctggcagaggatccttgcctgttacagcaagaggttcagtggaagaggattagagacacctttgaattccacttctatcatgtgaaaattgtgtaagtttggaacaatttatttaaccttcccaaatcaatgctctccgttgtaaaatgcagataattatacccacctgtaagactcctgtgaataacaaatgagagagaacacatgtatagcgccgtagagtgggagctctgcataaatctgtttccttttccagcccatttcaacagcgtatgtttaagcaggtcataactcagcttttaaacatacatttaaagtgacttctccatattacaccatcttatcagaatgtctcaataagcaaaatgaaaagaacgctcctgctagcaaaaatgctacggggtcaaacaaaagaaatagaaaatgcagaccttaggcctgaaaactattaaaagcagaaatcatttacatatagcaacagagaaatggatgttccttaatataccctcaactgagcatagaaatgaggaaatcctgactggtgaatccatcagaacccagggtccgtggctgagacagcttccttgaggacgtgggctttgagggaagagaggaagcatggtttctgccacaataggtcttactcactctacctcttctctcctcaccaggctttgaactcatcaaatgtgaggacccaggaacccccaagtttggctacaaggttcatgatgaaggtcattttgcagggagctccgtgtccttcagctgtgaccctggatacagcctgcggggtagtgaggagctgctgtgtctgagtggagagcgccggacctgggaccggcctctgcccacctgtgtcggtaggagggctcttcctctgcagggaacccttgggtctcccataataccaagctctagtcctggtctcattccagttagaccccatgctccagggcctgggggccatcaacttggactgaatcctcttgttaacaggcatcatggttcacctgcaccccttctccacttcctcactttcacacctcattacacccatgcagcagtgcagtcaggcgggtggcttgcctttgtcgcacatttagcaagtgggaccacagccaagtcatgccctcaaaattgtaacgcgggtgatagcgatgaggtgggagagtccattagaaagggagagatggggcttttgcctgagttccagggcttatcgtaacgccaagactcaaatgagtctcccacccactttaggtctcagtttccctataggtaaaatggggctcattctccctttactggaggaatgtcaaaagacatagtaagataaagaacacccattgctctcactgataaagaatgcaataatgaacttgcatcttcttaaacctgtgattcttccagaatgtcatcagaggttctctagaatctttacacatgtgtcacaggacaagagacagtgatctgaggcagaagtgcaaaataggcaaaattggttgttctgtttggccttttcatctcttaccacccatctccctgctaatgtgagttcccccatactgcttcgtcctgcctcctacctttccaaaaccagatctgtctctctctccacccccttccccatgtcccacaacctcaacgtgtctgtgccagcactggctaatcttgtaagaacaaaacctccactggaaaaacacatacatgcctaccaagccccacatgccaaaattggtgcacatgtatgtctgggtatttgtggaggcagagaaataaatgaagaataaaacctgttcactgcccttgtcagggcccatactccagcatggagaatagacacataaacagataagtataatgtaagagaagcactgtaaaaagagttaagtgcaaaatgttgggaggatatgagaatgttttgcatgggaggtgatatttcaattgagacttggaagaatggattagaattcaccaacaggagggagaggaagggaggttgacattctagactgagcacgtgcaagggtgaaagtgtgaaccagcatggtgggaagtgttaaaggccacagatgcttttcccctagacgactacattttcacaggatctttaacactgttatacaatggagggtctaagtggaccctctgcaagtggacagaccgaaacagtagcctttatggaacctctagggtcttcctctccctttgcctttgacctggtcttcaggcatatctcccctttcgccctccatctctttttatatctcccctcattcatgtgccaggaactatgctaggcactaggaatacagagaagagcagatctcaggccaggaagggtgatgcttgcataaacacacaaccgtataatgccacagacaagcaagccagagcacacaaaatgaaaaggagggatgatgactcgtattacaagataattatttgctttgcagaaaagattcactgtaagattactttgaatatcaaatatgccagttggactggacttattgggttcactcaagcagtataagagcatttaaacttagacttacactagaaccttggaggccttccccattgagactgcctctagcctgctaggggattgaggctgtgtatttgagattatgtgcatatttttgtatatgtcatgttgtggtcgacttcatcatggtctaccacaaatgactgctatagcttaaaacatccaaatgttttattcttcggtgagtggactctgcagcccaaacaaagcagccaagactcaagggtgggaagaagggagaagaccagaaagagtagacttacatgttctcaatgttgttgaatctgctacatgctggcccactcagccccctcctgcccacctgccaggccccaggtaaggtatctagttgtccatgatgacatgttcccagtgctgctgcctccaaatcctcacttcccaggaagcaggaggtccttctctgtctggaatatggaaggaagctctaaccaaggacatggataatgccctcccacctttctagctacttcctctatttgtggaaccagtcaagcctcctccccacaattgtagtccatcctctcaccagcaccctactccctgccatgggtccattcagcctggcatctttcaatcaggttggcacctcccaccccaacagcaccttggagagaagagtgaagcttgagcagagggtcttgtagagggcctctcctgcaacccttccttagtggtcctgtgtgaaaccaacgggtccatgaaatgtttgatgtgtcctttatagcaacaggtaggggtcagtcttccatctgtgaccctgatcccttcttctcctatttctagcatcttgcctaatcaactattccttttcctaaatagctctgcaatgaacatcctcctcttcatttgtactcattctcccttgattcagacgcttatagtaatttgcatggaaagcaataatctgcttccattcatttgattgtccagccatccattaattcaataaacgttaagcatctataatgtgccaaacagtatactaggtacttgatgtgcagatataagacaaggtccctgctgccaaggagctcttagtcttgtggaggaaatagacatgattttaataacatgttacacatgctatagtagaaatctattcacattgtaatgcagacacaaaggagggcagtgtcagttctacctggggaggggaggtatgtcacaaaagatgtcacagcgaggatgtttattcaggtcctccatccaaatagagcttgtggacttcatcagcctagaccaaagagttcacggaggccaaagggagccactctggtgggctcagtgggctctactgaaaagtttagacttcatttggggagtgaatgcaagcagtgacttgtttgcatttgataaagatccgttgatggcactgcctagagcgtgggcaactctgccagcctagagattgtgagggcctgagtcaagactccagcaatgtgggcaaagtagagtcaaacatgaataataccacacaggtttagcgactgggtctcagaggcagattagatgtcggggaggaaggaggagaacaccagcaggaacccccagcttctgacttcagtgactgctccaatggggaatgtagacctcttcacctgcctccctgcctccagtttcacccctgctgtaccccatcatactgccaccacagtgactcctcctaacatgcaaagttcactgatgtgtcatgcagtcaattaactcacatgtataatcactgcaattctttcctggaacagtgaatatatgacagcctggtatccaaggtccttcaacctgtgatgcttcctcacctttccagtcccatctcccccatctccctatctcataccccagcctccagcctgccatgctgttcctcacctccaggaactttgcagttactcttctgtctctctctgcagtgccctccttcccatcctacccttgccacccaaccgacctggtcaactcttgcttctccttcaaggttcatttaagaccagcaccctccctgaccctcgctgtcctttgctcagggagattggtcacttctgctgctacttgttgttaggatacctagcacacagtgtggctgtcttctctactagacagtaaactcttccaggggagggcagtatcctgttgatctctgctgtcctggcagccagcagaggtcctgttgctatcaagaagcaggttgaagtacttgcatgttcctccctaggaggctttgaggaggttggtcacagaacaggcaatcagccctacactcagggaccatttttatttaccagtgtacaattcagttgtttgtagttatattagtctgttctcacactgctgtaaagatactacctgagactaggtaatttgtaaagaaaagaggcttaattgactcacagttcctcatggctggggaagcctcaggaaacatacaatcatggcggaaggggaagcaggcaccttctttacaaggcagcaggagagagaaaagtgagagaaggaggaacttcataagttctgatggaacttataaaaccatcagatctcgtgagagctcactcactatcatgagaacagtatggggaaaactggccccatgatccagtcacctcccaccaggttcctccctcaatatctggggattacaattcaagacgaaatttgggtagggacacaaagcctaaccatgtgagtagtatactcacaggcttgtacagccatcaccacaatctaatttttgaacattttgtcccccacaagagaaaacccatgcccattaacagccactccccgttgtccccttccccaggccctggcaaccactaacgtaccttctgtctccaagatttgcctattctaggtatttcacataagtggaatcgcacaatgtgtctgacttccttcacttaactaatgttttcagcgttcatctatattgtagcatgtagcaagccttgattccttgttgttgttgttgttgttgttattgttttgagatggagtttcgcatttgttgcccaggctggagtgcaatggtgcgatctcggttcaccacaacctccacctcctgggttcaagtgattctcctacctcagcctcctgagtagctgggattacaggcatgtaccaccacgcctggctaattttttgtatttttagtagagatggggtttctccatgttggtcaggctgatctgaaactcccgaccgcaggtaagccacccacctcagccccacaaaatgctgagattacagggatgagccaccatgcccggccgccttgattcctttttatggttgaatactattccattgtatggctatgccacattttgtttattcattcatcagttgatagacatttgggttgtttccactttttgataactatgaataacgttgctatgaacattcatgttcaagtttttatgtgaacatgttttcatttatcttgggtatatgcctaagagcagaattgctaggtcatatggtgactatgtttaacattttgaggaaccaccaacttgtttttgaaagcagctgcaccattttacatttccatcaataatgatgagagttccagtttctccactccccacctacgcttgtatagtctttttgactatagacatcccagtgggtgtgaagtgatatctcattgtgagtttgatttgtatttccctaatgactaacaatgttaaacatcttttcatgtatgtattggctatttatatatcctctttggagaaatgtttattcgaatcctttgccttttataaattgggttacttgtctttttattgttgatttgtaggggttctttataggttctggatataagtctcatccagagaccttttaatatgctgtgctcaatcacttgaaatgaatgggagagggaagggactcaagagcaaacaggcaaaaggagccactgagtgactgctggcagctcaggccaccccatgaagctcactcttttgggatttctttcagccgagtgtggagggacagtgagaggagaggtgtcggggcaggtgctgtcacccgggtatccagctccctatgaacacaatctcaactgcatctggaccatcgaagcagaggccggctgcaccattgggtaagtgtcagggctgacaaagtaactatcgccagttgttcaggggagccatcatcagcatcatcaccaggccatccagctagtgcctggcctgcctgcctcacctggagaaccttgtgatcaatagtggttgctatactggatgccttagaaaatctagaaaggtcagtctcagcctctcagggcttcatgccaagtccatacacctcactggcccagatagcacagttacagcagagtagccgagggcatggattgaaggcatgcagacccccatttgaatccaacccttccatgtactgtttgcaggactttgggaaagttccttatcctctctgcatctcattgtcctcttctgtagagtgtggatctcaggataaagcacttgaatgagatattgcatgtaatatgctcagtatagtatttggaacatagtgaaatatttaataacagttgctgtggttatttctgacagttagcaagcactaactcagctttagctgtatggcccctggcagattgcttcccttttttaggctgtttcctcatctttaaaatgaggacagaaatgcttgtattttagagttgtggaggaagtaaatagcaaaagaccagcagtggtatgtacttcttcaaaagataaattccttcaaaataggtatgccatcaaaatgtaacttccttccaggcattccttattggaatttcaaggagtcagaggagaaagaaccatcaccatttactgaacacagagcctaccttattaactccctgcaatagccctattgataataatagtaagccctaataacaaataggcattattgtaattcccattttatagatgagaaaactcagattccaagaggatgcatagcatttctaagtttgcacagggaatcaaaactctgagatccgaacccaggtctttctgaatcttcacactattgcactgctggcaaaacggggccttgagccatggctcaggtgagttaggaggaaaagagcaggttggggtagcagtatgagcggaggtatgaaaggaggatagaacaagggaattgggggggaaacagtctggctggagtaggggaaacacatgggtaaggaatgggagatagataggggtaaagtatagcctggttatggaccatcttaaatgccagtaactaagagggagccatggaaggttcttgagcagcgtcggtccaccagggttatttgcagtgtagagagctcatggggagacaccatcaggagtctgttacaatgatccaggaagtaagtgctaaggatttggaatagtgaggagccaagaaaaggaatagaagtatagctaggagaagattcctgcatgtaagagtttccaattaagaagaactggctgaatgggtgttttgctgcaagaaatatagatattcacttatgtacacagttcaattaatgttaaggaaatgtattaagtatttaatatgtacaaattttttagctaaactctgaggaaaataaggtcagcagtgtacatagggactttgcattgttagggaacaagttaaatatgcacattcatcctgcacggcactgctgggataaccttctgaaagcatacctgatcaattcaccctctgatcagaaaccggattccatggccaccccacgctcacagaataaaagctaaacattttattctggcctttgaggctacagcgacttcagcctccctccccaaccttattttccacttctcttcaatgacattccggcaaagcaaaattattggtgacccctgtacatggcctagctcagggcctagctcagggcctttgtttctactctgcccttcctctggaacgccctcctccctccaaaggcttacatctaaaattatccatccctcaaagtcaagtgcaaatgtcagctcacccgggaggtcatccctcaccccctctcttgcggggctcctaggagtcctttctgcctcttttgaacttccattacctgttgcatatattttcctgatgacactgaccacttttctcctttatttatgctcatgccttacctcccctcctggagctgtggtctctgcctgattcatctttgcaagtctcccagctcttagcacagtgcccccggctcaacaagtgtcaagtgtttgatgaatgaaagaatgaatgaagcaagacccaagtataaaggtagttatatgcctagtggatctatgatagttcctcggtgactagtggttgaacaatgagtggatcgagaacataatgactatttcactttagtatacacatgtgcaaatcaagaggttttcccactttcttcacttggagcatcattcattgatgcattcattccctcatattcacaaatatctgtttgtttactacctggttgtgcctgtgccagatgctggcattatataaatgaatgagatgtggccatggttcacaaagagcagacgcacatgtctgtccagaacaaggtggtggcacaatgaggaaggggaatgaaaaagcaggacaggaggagatgggagaagttattctggaaaaggtgaccctagagctgagtcctgaaggaaggagaggaggttgccaggtagccaaggaggaaggtgggtgggagggtaatgggcctctaggcagagtgaagcagtgtggtcagcctcaaggagctggaaatggttcccgcagctggatgatcacctgcgatttggtgggtggcggcattcatgggagatgaagctggtggtggaggctgtggggagcacagagggcgttggggctatgaggctgcgttttgacagctcctggcagtttggaggagaatgggcggagtgggacgggctgggccggtaagcgcagtgaggaagctgcctccagagtgtggctggggacgaggaggccagaagtcaggcagtggcagtggagatggagaagaagagaaaattcaggggacattcaagtgatcacaccaacttttctcaactactgtttgtgacaacaatacaccaagtacccgcgtacctaccgcctacacccaaatggcgttactattttgccatatatgcttatgtgctttctttgttcttctctttccatccttttgttttcctttttgctgagctgctggaaagtacactgtcaacatcatgatacttcatttctagatgctttggcacacatcgtctaaagagaaggatgtgttcatccatggcatagcggccgtaatgtacctaaaaggcacagcattaattctctgggaattaaggagagcagagcagatctaggtgtggctggcacaaggaaattacaataaactgatgaatggatttctgggcagtagtgaggaccattttcactgatgagaatggtggctatgggggtggaggggagacaggaggcgcctttctagccctcaggaagacaagatcaaaaccaatacaggaaacgtcctctccagagtaacatagcaagaaatatgaagtcatggggggcatgctgaggatcccaaaatgggaagaagaaagtaaaggtccaaagaaggtaaagataacatcagtccttagtctggatggcttcttggagccacagcaacctcaaaggagctaatgtgaagtaagaagatgtcttcccagtttcactgagagctgcagaaagatggagatagagtggcaagacactgtcccttcctcattctcccaccccagtctgccatcccagccagtatgcatagcatgcacacgtacagctgtatttatgtgtgctcactccgtcctccccctttctctccccttcccttcttctttcccactccctctctccctctcctcctctccttccctccttctttcccactccctctcttcctctccttccctccctctctctctttttctcctctccctccgcctcaacccccaacacacacacacacctgtcttgaataaccagcagcaaagttaggataactcacactcataattagacaaacacaaaaagcccctttgtgtttgagtccttatttagttattatcttttttattagaaatatctttatagaatttttctatatacaaattaggtactcttttttttggaggagggttggacagtcttgttctattgcccagactggaatacagtggcactgtctcagctcactgcaacccctaccttccaggttcaagcagttctcatgcctcagcctcccaagtagctgggattacaggcaagcgccatcacgcctggctaatttttgtagagacagggtttcaccatgttagccaggctggtctcgaactcctggcctcaagtgattctcctgcctcagcctcccaaagtgctgggattacaggtgtgagccactgtgcccagccagataatcatttttttaaaattcaaaatttaaacaaatttataaactcgaaatgaaacgtttccacaatcttactctgtaatcttactcctcctcacaccccacataaaataactattaatgtctgtctgctctacttattcttttggatattttgtgtgccaatatgtacataaagcaaatgtaatgcacatgtttctaaaccaagttcatccacatgcatggcttagtagcttgttttctgttttacctcttaatcatatgtcaccatctcatcatgtcaatgtctatagacctacctcatcctgtttgatgggtacagagaattctattgtatgtaccaccataatttatttaactattcccctgttgaataagtgaatcttttcagcttttcactccaacattcttattcctgaatcttcgaacagttgtccatttatttccttaggatatatttttaggaggtaaattttgatacatgacctcaaattttcttctagatattatagcaatttacaagtctaccagaagtctatgggaaggcctgctaccccacgcagtatcactagacattgtcaatactttcagtcttcaccgcttagatggacaataggatatttaattgtctttgctgtttctggttctttgtgtgttttctgtttggacaatttgtctttttcatatagagtgttcaactgggctcatttctagtctataactcatttaggtttctcttaaatccaataatatttaagaattttttcagttactaagtggtttatagatcttgtatgcttttcattatttttattttgactgcattgtgcctttttttacttttcaaactttttgttttatttatgttccatgggcattgaagaatatgaaatgagtacaaggggctatatttcttttacataaaatgtattatgctttctttcaaacagaatacattatgcttctatattgcttttttttattgttaactcttcctgttgttagctgatctgctttaattggctttttgttctagtgatttcagagttctatatcctgtttttattttgccagtgatcttgtgttttcattaattcagttctcaacagtaattatcctgttctttaccctctttttgttttggaaatcttgcttttgtttttatttcaaggaaactaattttctgtttctagactgctcttgacagcctacttttgtttttatcaatatgttatcatcttgtatccctgagaatactatttgtgttttgttttacaatggttgtcagtttttccctgtgtcaactgcattttgcacttgagccatttggtttgattattcagctggattctttatgtcccatgagttttattgtttattcactatcaagtcatagctaagcgctggactctggtaccagcctacctgaactcttatttgctgtgttgctcagggaactctttaagccctctgtgcctcagttctcttatgtttaagatggtaattaaagagggtaccctccttaaggttgctatgaagattgagtgaacatatataaagcacctagaatgtggctggcttgtaattcccaaatgatgagaactcccacctggagctaggtggatagttgttcattttacccaaacagagtattcctaagcacagcaggctgtaagtcacccctaaaggatctcaggtggtgggtgctgtactgtgggtgggagcatgtgtgctaggtgggaagggacatgggctaggcagcaggctagccgatgaggctatttccaggggcacagacaggagaaggcttgcagatgcatctccctaccctgcttcagccctgatccagcactgagggtgaccagagggatctgtagccaggtttgctccagcaagctgggcaaggatggtcccttcccaggagtgcccaagaggcaaagtagttggctgcaggaatctacagtcaggcttacccttgggtgtggtccaagctggaaaatgggtcctgcctggatgtgtgtgacaagagtggaatggaaggcagcccctttccttgaaccctggtaatacctacagcatctggcaagtgcttcttcctaagtgccaagaatggggtggatgagccaatgcactccatccaggcctggcagctgacagcaggagggcagacccatgagctgctccctccctgtcacccttgcctgtgtcatcagtacatagaacacagaagtttcatcctataggagtggaaactcttctcagcttctggtgttgagctggagggttttgttttgttttgtttttaataatcagtgggcgagctcagatgaaaactggaaaagaaagggagggaaagccctttgctcttggttctgcccctctaaaacattcatcaaatacctatagcacaccaggttctgaatcagttattactgtccccattttatagatgagatcatcgaggcccagaaagaatgaatgaccttccttgagatctgacaattacccagtaatgtgggattggaacatgttccgtctaatgtcagtctttgctctttcccatctgccattcaggctgtggtctgattccatctaacaaaatatgcaatgattacctgctctgtgccagagactgtgtgatgctgtgcagtcggaaacacaaagtccagaccaaggccaggccttgtctgccaagagttcacattctagtggggaaatagtcaaacagacaggtacctccaagataaaatagatgctataagtgcaagccaagtgacggagttcagtaacagagaagagagagaggagttctgcctgggactgtagaggcaatctttccagctaggggtaagagagcaaaggtatgaacataggggaaaatacaggatctggccacgaaagggcactcacttgacgtggctggagctgcgtgcatgtgggcaaataaggctgtgtgggtaaggaggagtctttacacactgaaggccaagacaagaactctgaatggatttctcagtataataaggagctgttggaacactttaaagacagtaacaacattcagttcaatttaaaaacttggagcatttactcagtgctgggcattctgccaggcacgggggtataaatataaataagaaacagcttttccccttgaaggtctcagtattatagacagaaattatatcagttaggaatgaaaatagaaaaacggactaaagctggcttcaacagatgggggttcatttttctcctggaacaagaatctgaaggtcccatccagacttggtaccgctgctcaggaagccataaccttccttcttggtctgccatcctgaggctttcatcctcgtggctacctagttggctgccgcagctccagacattatgtctgtgttccagtctaaaagaagagggaagaggaaagggcacggagctctctcctgatgaaagtttgcttgtgtatttgggaagaaccactatccttagagatactgtcctacatctcattagtcagaacttgccatgcctggcagggaaaaagtgggaaatcaattttgctttgcttttagagcctcaatagtagagagatgagaggtttggaaatgaagcacagatcatccaacccacagtttctgctatagattctaagataatgtgatgaatgctatagtggaagtatgcacgaaacacaatagaaaagtgtctgcgaggacagatcataattctgtatggcagttgggggtggactacagggaggaagcacctttccagctgcactttaaagaacagtaggagctcaccatgcagggtggaggtgaggccctcccaggcatgtgaaagggaggaagatatgaatgtacacagctgcttctggaagagctcattgtctaggggggatatgaggacttcaggaagatctgtggcagcagtgcagaggataaattggctgggaagccagggaggagcctaggagcactgttgagggatcctggttatattcaaaagaactgagtcatttcttatgcgcaaatgtggttcgggttgaagctacggttgtctggcttcgtggagggggaaggaagaagggagaggagacagtcctctgccgatgtgctttccctgcagagatctgggacccatggaaggtggagaacttctcactctggacactcggatttctgctatgcccataaagctcatatttggctaatagtccttgttttttaacttcagggatacttcttaatgattaacacacagggaaaactgaaaactccattcttggattttggtcaccatgcagcaggcattggcgggcatggttttgattaaccaggacccctgcccagtggagcttatcttcctgggaggatgctgggctagaaaaacatctggttgtgcctgaagcctggattcccttgctgtcgtttcagatcagtcacagggcagcaactccccacagtggtcagtgttgcctccctccagccagcaagtgggcagctggcccagaggaggcagaaggcaccagaagtgaagcttgcattcacagctcttgccaggaatcatggccacaggttcagcagcttccagagggtttatttctgagcaattatagcaagttaaaccttaaacagagaaggttcgtgtacttacactgcaagagctgatctcctaaaggaactgaacagagaagcacacacacagtggggtattcctttgtcagatttaagtcttcaacaaattggagaatagccaaaaggaatgtacacattttttgaaggagaggatgtggatagcctggaaggtataaatgaagctttgagaatggtggcactctccggccattcagtttttcatagaacacctctagagaaagaaacacaaactacttcaaattatcctcatacgataatctaaccgagctacactgagtagttgaattggccagaatgcatcaacttgactgccagtttaagatcccaaaactgaattccaacatctcttaggaggaaaataaactattcaaccaaagaaatgcacgttccctgtgggttgaccacactgaaccagtatagatctctccctttccaaaaataagtaaagaaataagcaaaaagtacataaaataaacttgtatgatgccacttaaaacataccactcattaaaagagaaccatctccctaaaaaaatacaaaatttttttctaaacatgttttactataatagacatgaaaatttaaatggatatagacataataatctcatttaaatataagaaatatgcatgatcaatagaagatggatgatgaaatgcaggaggagagattctgaaatagacagacagtgattaaggtaagaaaggaatgcgaagaaattaaacacacagcaacaactaaaatccacaatagcagcatttgccttgtaagaaataaaagcattgaagtagtagacaagctagactctaagtaatgaaaagtagacaaacatggaagacaaagtgccaatccaggaagcacaaatgcagaagagcaatgaaactgagcagaaggaataataatatacaaaaggccatcacctcccctggggaaaaggtggggagtgggttgaccaaggctaaaatgtgctcagtgaagtgaaaggagtcgttgaatttccagggaaaaaataaattagatacaacgtgatgaaaaatgaaatcgttccaaggggtgggagtgcttactccacaaagtaattcggggctctagaccttgggtgaggtagaagggaaagggggaggcagaggcaacctctagagcagaccaagggtataggagctcaggatgaattataaaaaatccctacaagcatttggcaaaaccgactcacacaggcaagtacatagtcatccctcattctataaaatattcatttacaaaaccaccacaactaatccaaccctcctaagactccttttcttttccataataccaaagtccaaagtcagtggtgctattggcctcaagaattgttgattcagccaggaaatatgattcacttacaaaggtaacatattatcctcagatatgcacaaaagccacataaaattggctctcatcggcttcctgaggaacttacaaaaacattgtagtaggttgaatggtggcccccaaaaatgtgaggttccaatgcgtggaacctgtaaatattgccttatttggataaagggtctctgcaggtgtgattaaattaaggattttgaaatgaaggggttatcctggattatctgggtgaaccctagatgccaccacatgcaactttgtaagaagaagacagagggagattttatacacgtagaggagaaggtgattcaaagacagaggtagaggttagagtgatatagccataagccaacgaatgccagcagcatcagaaattggaagaggcaggaacagagtctattctggagcttccagagggagcatggccctactgacacattgattgaagcgcagcaatactgatttcagacatctggcctccagaactatgaaagaataaatttctggttttgtttatgtttgtttgtttgtttgatttggagtctcgctctgttgcccaggctggagtgcagtggtgcgatttcagctcactgcaaactccacctcccgggttcaagtgattctccgacctcagcctcccaagtacctggggttaaaggcacctgccaccacacctggctaatttttgtacttttagtagagacagggtttcatcatgtttgccaggctggtctagaactcctgacctcaggtgatctacctgcctcggcctcccaaagtgctgggattacaggcatgagccatcatgcctggccaaatttctagtgttttaagccaccaagtttgttgtaatatgttacagcatccacaggaagctaatacagacatacaatttttagccaactgagatgtttagaaaaactacacggtactaagaattggtgactatgaaagattgtgtgtaacttgggcctctagtccctacttatattgtcaatggtttgatggttgggagagggcatagggaaaggtgaaacctttttaagatttactgtcttacataagaagaagtaaaatggtataatatattatttttcttaaatttgatgattagagaaaatacaagtttaggagtacttttgaaaatgcttaaagaaaaccacccatagaatttaaaataaaatgtgtactttgcaaatcactaaagaaaacttacaaactaaggaatattacccaaaaaagcaagaaaatataataaacaaaagcataaaacacagccaggcgtggtgtctcatgcctgtaatcccagcactttgggaggctgagggaggtgaatcacttgaggccaggagttcgagaccagcatggtcaacccagctaaaccccatcttactaaaaatagaaaaattagccaggcatggtggcatgcacctgtagtcccagctattcaggaggctgaggcatgagaatcacttgaacacaggaggcggagcttatagtgggcttagatcatgccactgtactccagcctgggtgccagagtgagattctgtctcaaaaaaaaaaaaaaaaaaaaaaaagcataaaacaggatgatggaaataagcttgtattattagtcaacagtaatggctaactgatataacagataacccccaaatctcagtggtttaacacaataaaggttaatttttcacacacttcacagtccagtgctagtctgcagtggggaacagggtcctgggtggggctggaggtgtctgttccacaaagtaattcaaggctccaggcctcatgtagggaaaagagaatggggggagaggaggcagcctctggagcagatcaaggttacaggagctcaggatgggcaggagactgagaggctgaccggatataaggcccagagcacagaagtgctaccgtctgaggcttctctgaaggatcagcaaagagctaaagtcaggtgcctgggcggagtgcaagactcagatgctgagcaaagggtctgcaaagggagcaaacacaggatcccagagagaggccccaagacgacggtgcacagggaaaggaagcctctaccgtgatgtgtagagtaactactgactgacctgtggcagggaaagcaggagccgtaaagagctatgagctggtgcccacatgggaaacattcatattgcaaggcaaagattcttgggttggataaaatttaaaagaatgctgctaaacagaagaacaacaaaatattaaaaataaaaggttgggacaaaagaatagcatgagaacacatggaagtaaaaagcagggatcacaatattgcttttctgttaaaaaaaaaaaaaaaaaaaaaaaaggcgaggccatcctggctaacacggtgaaaccccgtctctactaaaaataaaaataaaaaattagccaggcgtggtggcgggcacctgtagccccagctactcgggaggctgagacaggagaatggcttgaacccgggaggcagagcttgcagtgagctgagattgtgccactgcactccagcctgggtgacagagcaagactccatctcaaaaagaaaaaaaaaaaaagtaaaattcaaggttaaataacattaaaagagacacagggaatgctttcatatgataaaatgcatagtccacaataatgctaacagtcatgaatctgcactaagtaacctaatgagaaaacataaagcaaaatctgtcagaaatatgaggagaaattgacaatccttataggagactttagcacatctctcttagtcaagtaaaaaataaaataaattgaacaaaaatggaattattttaggtgattttaccatttgatgattatttaatactatgtgctagatgctttctatgtgatttcatttatgataatactcttagcaacgctgcttgatagattgaaattacagccattttacacgggggtaaattgaggctctgcaaggtcaccaagttagctctctcagaactagtatttgaggctgggcgcagtggctcacgcctgtaatcccaacactttgggagaccgaggtgggtggatcacgaggtcaggagattgagaccatcctggccaacatggtgaaaccccatctctactataaatacaaaaattagctggatgtggtggcatgagcctgtaatcccagctacttgaaaggctgaggcaggagaatcgcttgaacccagggggcggagattgcagtgagccaagatggcaccactgcactccaacctggtgacagagcaagactctatctcaaaaaaaaaaaaaaaaaaaaacaactgcaatttgaacccaggtctttggttccacagccagtgttttgactttatggaaacatttcttccaaggacaaagatacattggcccctcacagaatccctgacacctacagggcagactctggactctgtctagtgataggcagtctcagagcctccagtgacagggtgatgaggaagagagggcagctggccggaggtcacccagcacgttagagggaagcacaaggtcacagcttaagtccaagacagcagtcactaccctggaacattctgcaacgttttcagtgacctgaagcccagttttatttttccactttagaaaataaccaaagaatcttttatttcttttgcatgccagctggtccctgaagagaagagccttttattttgctatagacaccaatgctggatttgggctttggtctgtcttctcagtttttgctctttggatagcgtgatacttaattattattgtctgctattatgatcatggtttaattgttggtttgcagctcggtcagcttagaggggggcatttgataaaacaagtattattttcttattgccctttccgatgtcaccaaggataattgcagctgcattctcatgtggggacaggagtgatttctgacccccttccccctgcagcagctgttcattcacatgccattttcccctaatgtaaagatccaccatcatgactcacatcagcgatgggtttattgtgttcctgcagtggtgactgttggttgggaacatccaaagccctttcatattctggggcccagtcagaaggcaagtgaaatcaacaggtcaaggtgccatgaattttttttattttctcatttttgcatgtctttctttctttttttttttttttaatttataaagaaaagaggtttatttggctcatggttctacaagctgtacaagaagcatggtgccagcatctccttttggtgagggcctcagtaagcttctactcatggtggatagagaagggggagcgagcatgtcacatggcaagagaatgagcaagagaagtcggggaggagccacgctcttttttttttaattttattattattatactttaagttttagggtatatgtgcagaacgtgcaggtttgttacatatgtatacatgtgccatgttggtgtgctgcacgcattaactcatcatttagcattaggtatatctcctaatgctatccctcccccctccccccaccccacaatagtccccagtgtgtgatgttccccttcctgtgtccacgtgttctcattgttcaattcccacctgtgagtgagaacatgcggtgtttggttttttgtccttgtgatagtttgctgagaatgatggttcccagcttcatccatgtccctacaaaggacatgaactcaccattttttatggctgcatagtattccatggtgtatatgtgccacattttcttaatccagtctatcattgttggacatctgggttggttccaagtctttgctattgtgaatagtgccgccataaacatacatgtgcatgtgtctttatagctgcatgatttataatcctttgggcatatacccagtaatggaatggctgaatcaaatggtatttctagttctagatccctgaggaatcgccacactgacttccacaatggttgaactagtttacagtcccaccaacagtgtaaaagtgttcctatttctccacatcctctccagcacctgttgtttcctgacttaatgattgccattctaactggtgtgagatggtatctcattgtggttttgatttgcatttctctgatggccagtgatgatgagcattttttcatgtgttttttgactgcataaatgtcttcttttgagaagtatctgttcatatccgttgcccactttttgatggggttgtttgtttttttcttgtaaatttgtttgagttcactgtagattctggatgttagccctttgtcagatgagtaggttgccaaaattttctcccattctgtaggttgcctgttcactctgatgttcgtttcttttgctgtgcagaagctctttagtttaattagatcccatttgtcaattttggcttttgttcccattgcttttggtgttttagagatgaagtccttgcccatgcctatgtcctgcatggtattgcctaggttttcttctagggtttttatggttttaggtctaacatgtaagtctttaatccatcttgaattaatttttgtataaggtgtaaggaagtgatccagtttcagctttctacatatggctagccagttttcccagcaccatttattaaatagggaatcctttccccattgcttgtttttctcaggtttgtcaaagatcaggtggttgtaaatatgtggcattatttctgagggctctgttctgttctattggtctatatctctgttttggtaccagtaccatgctgttttggttactgtagccttgtagtatagtttgaagtcaggtagtgtgatgcctccagctttgttcttttggcttaggattgacttggtgatgcgggctcttttttgatgccatatgaactttaaagtagttttttccaattctgtgaagaaagtcattggtagcttaatggggatggcattgaatctataaattacgttgggcagtatggccattttcacaatattgattcttcctacccatgagcatggaatgttctttcttttctttgtatcctcttttatttccttgagcagtggtttgtagttctccttgaagaggtccttcacatcccttgtaagttggattcctagctattttactcactttgaagcaattgtgaatgggagttcactcatgatttggctctctgtttgtctgttattggtgtataggaatgcttgtgatttttgcacattgattttgtatcctgagactttgctgaagttgcttatcagcttaaggagattttgggctgagatgatggggttttctagatatacaatcatgtcatctgcaaacagggacaattttatttcctcttttcctaattgaataccctttatttccttctcctgcctgattgcccaggccagaacttccaacactatgttgaataggagtggtgagagagggcatccctgtcttgtgccagttttcaaagggaatgcttccagtttttatccattcagtatgacattggctttgggtttgtcataaatagctcttattattttgagatacgtcccatcaatacctaatttattgagagtttttagcatgaagagttgttgaattttgtcaaaggccttttctgcatctattgagataatcatctggtttttgtctttggttctgtttatatgctggattatgtttattgatttgcgtatgttgaaccagtcttgcatcccagggatgaagcccacttgatcatggtgcataagctttttgatgtgctgctggattcggtttgccagtattttattgtggatttttgcatcaatgttcatcaaggatattggtctaaaattctctttttttgttgtgtctctgccaggctttggtatcagaatgatgctggcctcataaaatgagttagggaggattccctctttttctgttgattggaatagtttcagaagtaatggtaccagcttctccttgtacctctggtagaattcggctgtgaatccatctggtcctggacttttttggttggtaagctattaattattgcctcaatttcagagcctgttattggtctattcagagattcaacttcttcctggtttagtcttgggagggtgtatgtttgtaggaatttatccattttttctagattttctagtttatttgcatagaggtgtttgtagtattctctgatggtagtttgtatttctgtgggatcggtggtgatatcccctttatcattttttattgcatctatttgattcttctctcttttcttctttattagtcttgctagcagtctatcaattttgttgatcttttcaaaaaactagctcctggattcattgattttttgaagggttttttgtgtctctatttccttcagttctgccctgatcttagttatttcttgccttctgctagcttttgaatgtgtttgctcttccttctctagttcttttaattgtgatgttaggatgtcaattttggatctttcctgctttctcttgtgggcatttagtgctataaatttccctctacacactgctttgaatgtgtcccagagattctggtatgttgtgtctttgttctcattggtttcaaagaacatctttttttctgccttcatttcgttatgtacccagtagtcattcaggagcagattgttcagtttccatgtagttgagcggttttgagtgagtttcttaaccctgagttctagtttgattgcactgtggtctgagagatagtttgttataatttctgttcttttacatttgctgaggagttctttacttccaactatgtgatccattttggaataggtgtggtgtggtgctgaaaagaatgtatattctgttgatttggggtggagagttctgaagatgtctattaggtctgcttggtgcagagctgagttcaattcctggatatccttgttaactttctgtcttgttgatctgtctaatgttgacagtggggtgttaaagtctcccattattattgtgtgagagtctaagtctctttgtaggtcactcaggacttgctttatgaatctgggtgctcctgtattgggtgcatatatatttaggatagttagctcctcttgttgaattgatccctttaccattatgtaatggccttctttgtctcttttgttctttgttggttcaaagtctgttttatcagagactaggattgcaacccctgcctttttttgttttccatttgcttggtagatcttccttcatccctttattttgagcttatgtgtgtctctgcacgtgagataggtttcctgaatacagcacactgataggtcttgactctatccaatttgccagtctgtgtcttttaattggagcatttagcccatatacatttaaggttaatattgttatgtgtgaatttgatcctgtcatgatgatgttagctggttattttgctcgttagttgatgcagtttcttcctagccttgatggtctttacaatttggcatgttttgcagcggctgttaccagttgttcctttccatgtttagtgcttccttcaggagctcttttagggcaggcctggtggtgacaaaatctctcagcatttgcttgtctgtaaaggatttcatttctccttcacttatgaagctagtttggctggatatgaaattctgggttgaaaattcttttctttaagaatgttgaatattggtccccactctcttctggcttgcagagtttctgccgagaggtcagctgttagtctgatgggcttccctttgtgggtaacccgacctttctctctggctgcccttaacattttttccttcatttcaactttggtgaatctgacaattatgtgtcttggagttgctcttctcgaggagtatctttgtggtgctctctgtatttcctgaatttgaatgttggcctgccttgctagattggggaagttctcctggatcatatcctgcagagtgttttccaacttggttccattctccccgtcactttcaggtacaccgatcagacgtagatttggtcttttcacatagtcccatatttcttggaagctttgttcatttctttttattcttttttctctaaacttctcttctcgcttcatttcattcatttcgtcttccatcgctgataccctttcttacagttgaacgcatcagctactgaggcttgtgcattcgtcacgtagttctcgtgccgtggttttcagcaccatcaggtcctttaaggacttctctgaattggttattctagttagccattcgtctaatttttttcaaggtttttaacttctttgccattggttcaaccttcctcctttagcttggagtagtttgatcttctgaagccttcttctctcaactcgtcaaagtcattctccgtccagctttgttccattgctggtgaggagctgcgttcctttggaggaggagaggcactctgatttttagagcttctggtttttctgctctgttttttccccatctttgtggttttatctacctttggtctttgatgatggtgacgtacagatggggttttggtgtggatgtcctttctgtttgttagttttccttctaacagtcaggaccctcagctgcaggtctgttggagtttgctggaggtccactccagaccctgtttgcctgggtatcagcagcggtggctgcagaacagcagatattggtgaactgcaaatgctgctgcctgatcgttcctctggaagttttatctcagaggagtacccagccgtgtgaggtgtcagtccgcccctactgggggttgcctcccagttaggctactcgggggtcagggacccacttgaggcggcagtctgcccattctcagatctcaagctgcgtgctgggagaaccactactctcttcatagctgtcagacagggacatttaagtctgcagaggttactgccgccttttgattgtctgtgccctgcccccaggggtggagcctatagaggcaggcagggctccttgagctgtggtgggctccatccagttcgagcttcccagctgctttgtttacctactcaagcctgggcaatggcaggcgcccctcccccagccttgctgccgccttgcagtttgatctcagactgctgtgctagcaaggctccgtgggcgtaggaccctccgagccaggtgcggaatataatctcctggtgtgccgtttgttaagcccattggaaaagcgcagtattagggtgggagtgacccgattttccaggtgccgtctgtcacccctttctttgactaggaaagggaatttcctgaccccttgtgcttcccaggtgaggcgatgcctcgccctgcttcggctcacacacggtgcactgcacccactgtccggcactccccagtgagatgaacccggtacctcagttggaaatgcagaaatcacccgtcttctgcatcactcatgctgggagctgtagactggggctgttcctatttggccatcttggctccacccccctttgcatgtctttccaatttgcaatgggatagagataaactgcctataagcagggaggtgggaatcatttgtttgtttgtttttgtttttgtttttaaaaaatacctagtgtgtccaagtttccttcagagtaaaagaactgaggaccgtgatctcagaagcaagttttgcctgtgggcagcacttgagagggacgggcccctgcagtgaaaatccactgtcctcccagcttcttagatttaggctctggtagaaaatctcctgttgctgaagctgagtgttgtgaaccttacactagcctcagcaaagcacagtggagtctcagagggggctggtgggaagaggtacgggagtgagggccaggtgggtccacccttagctagggcctgctattggttggtgggggcgtgggtgtggcagtgggaggtggaactctgaaaacactttgaggaaaggcatgtggagatctcagacttgaacagggttatctgcacatcccagggtgtccctgcagccagcaatgaagtcaagatccagcccccgcagagcaagcagaatttcagggcagccccaccaaggaatgggagggagaaccaggggcccagtgagacccagttacctgagctggcatacttgctggagttagactgcagattatcatgagtgcccaagatgcaacctaggcaaaccagataccagacttaggatgatgagaccaactcaaaagccctcctttggtggaacccctccctcactgccctcagccctgccccagcaccaaggaaactgctctcactaggagaatggggaccatgaattcctcactcctctgcagcttggacattatcaccattccctgagccacggcttcaggtctcagccacccgcatttcatgctttgtcttcctgaagagcttgtcatttcctgggtgggccagcctctacatcccctctgtgtctttgcataccctattttctctgcctgcattctgtccccttctcaccctcctcacccacccccttcatctggactcatcctgttaatctctcatctctcttttctcttataaagatatcaagactcagctcagtagttacctctcccaggaggcctggtctcatacccttggcctaagttagggggcttctccgtacatacctttactgtagactgtaccacatgcaggggtggaagcatgccatattcttatctgaatcaccagtgcctagtatgctatctgaacctagtacttactatttatagatttaaagtatgactatcagtatcactgtaggctcagggaacctacagggctggattttaaaagtgtgagaccatggttgcagtatcccagtttctcccagatttagattcagcagtgagctctggcccaggttctgtgtggctagattctatgtctttggtagtgtagagcaccaaagatacagctgtaagatccgaggggctagatgtggatggtaaaggaagagctcagaacttccagagaaataggaagtatcctccttagtatataggatttgtttaagttgcctcttgtagagtgacagatgcttggcaaggacagtgggtgagtttggatgaaccacaggggtccctgaaagctggtgagccattcgttcattcatcaattcagtcagacaacattcaccaaggggctagtacaggtcaggcctcatgctgggtaccagagatatagaagtgaatgagacactggcacaagagttaagggattcagcaagacagggaagtcaatggatgactctgatagagcaggagcctgtagagggagcatctcactagactgaggggatggggaggacaaggagaagcctgtggaaaagctccccactggatgtgaggcacctaccagtacacatcagtcagggggtagaagaatttactagggctgctgtaacaaactgaatagcttaaaataacagaaatgtgttttgttcacagttctagaggctagaagtccaaaatcatgttctcaatgggccaagatccctctggaaatactggggaagaatctgtctcatgtgtctcatagcttctggtggttgccaggaacccttcgcattccttgtgttgcagacacattacttctatctgtgcctccatcacatggtctccttccctgtgtctctcctgtgtctctgtatccaaatctccctctcttttctcttacgatatcagtcattggatttacggcccaccctaatccagtatgcccttcttgtcataacttgattacatctgattctatttccaaataaggtcacagtcacacaggtaccaggggtaaggacttgagcatatccttttgggggacacaagtcaacccgctacaagtggcatggggccatttgcagggggaacttccaggcagagagaaggctctgaagcaagagaataagaaggaaatcagtaaagggttagaagaatgggagaaggcaactggggaagcccaggggggacttggtgtgtcccctcggaagtctgactttatcctgtagagaaggaggagagactgggtcagaggagtggttcagaaagatagacgtggtcctgatggaaaaggtggattgaaaggatgggaggggaactggatccaggaaggccagttactctttcgattcctcttaatttgcttttccctcttttgccatctttctctccctcaatttctccacactttcctttcttcaaaactgtttcaaagacactgcctccttgaagctttccttgcctcttcaaattaaaagaaaaagaagatggtgtaaaagaaaggcctttggtaccagacagacatggtttgaataccgtctctgacccttgctagttgcctctgttaatcccttggaacttcagttcctccacagcaaaatagtgagaatacactctcaactgcagggctttatgaggatattcagcaatgtacataaagcagttggcacatgggagattttctacaaacgtttagctctttttgtcctccggttattttgatagcatcttatttattccactctttagcacctattgcacatattattatgttttgggtgtctccttcagtaagtttcctccagggcaagcacagagccttgcacatttctgcagctctcaacacagagcttgacatgcaacatgcttcatttctcttccctggaaatggcctgttttgtgtttgtggtccaaagaaacgcacacacagacaagcaagtcatcaataggaaggaagatcttttcacctctttcctccacttcagtttctcctacctaggggcacagtacaatggggaggggagctgcaaactgttctcaggatatcaaaagccagaagaagacccagtgttcacctacaggggagctgctcacacaaaccacaatggctgttttggcctggaattatctctgtcgatcagaactgctcattagcatttatagactctgatttctataagataagtattcaataagagtcttaataaatgtggttgggttggcaaaccaagtctttactggccatcatcaaaggtttataataaaaggggtcactggccccctgtggcagcccctagctaatttccctgcatccactcttgcccttgtcaatcttttcttacccaggcaccaagagtgatcgcaaaatgtaaatcggaacctgtcagagctcagcttaaaatataccaatgacttccctcagctcctatagtacacaccaaacatctccccccatccacggagtcccgccagccctgcccctgcctacctctcctggcccagtgtcgcctccatggcctttccattgtgacctttgcacatgctctcctttattcactgcaggcttcctcccacctctcacccctcctgctctccatgtggcttggcatcttgcttaaatgccacttccttagaaggtcttctccggccactctgtctaaagtggatgctctgcctcagcactctgccatgtcctgccctgtgctagacacagctgataattttttagtgagtttgtgtctggggggttattgcccatctccagaagctcccggagaatggcaccctgtctgtcatcttcactgttatacagcagcaccccgcatatgggaggcgcttaagtgaatgagtgccgaaaggggcttgaactttagcctctgtcctttccgttgccaacttgtattgttcgtgcacacagagaaccccgccttctcctcccttcttctgcactcctctccgcaacatcaatgccaagcctttgactttgtctgtttatcagatcagctaagccgaatgcaatcaactggcatttttaattcatatcagcttacgtatgactcacatataaactgttgatgattgatagagcctctccagcccctgcctagctctcaaccacagcctcttcctcccagagatgtgggcagcattgttaggagagagtagaagcactaaggtctgacctggattagtattaaataatagcaattccagcttactgtctaaccagcccatgaccttgtgcaagttacctaccctctcagagcctcagtattctcattgttaaagatgagactagtcctagctacaaaataaagatgcttgcatggactccatgggctaatgtgaaagtgccttatacacagtggttgttatggaaacacgttttccttcatgtctatttagtccccatattcttgcttttctcagcttcgtgtcagactggggtttcattcgttcattcattgattcactcactcattcattcagttgttcaccctcaggatttcacatggcctctagagtcagtctctaactagaatacaataaagcccaaactcccatagctaattttgagactcattctcttccctctctcaatcagctgtattctctatggcatcctaataccacctgaactcaagtatggagttgcctttcttcccggacagcttcacctcctctctgcctccaggtcttatctcatgttattaaatccaaagaaagcactctcctttcacgccacctaaacttcaggtctcatttccttttgccttccctgatgagtgtggcccacaccgatgtcttttctgagagcacgtacagccacaccacacggctggcactcggtctcctcttggctgctgatttcacagtgcattgatcaccacagagaaagcagagaaggcagggggcagcctggcacagcagtgagtatgtgtgtttgtgctctgtcctagggatctccttctcctcttttcaaatcaaatgtggggccccagccttacacaggtcctggttttaaggaatcccctcctatatctataaaagattctacctaggaaatccaagagattctgttggtttctaatagtactaactagtgaccgaaagtaagaaacacacacacacacacacacacacacatatatatatctgacaataaataactagaaaatgtaactaaacattaaatctcattcacaatagaaccaaaaccataaacttgtggactgccaaagaggaaatttaacaagaggtgtgcaaagaagaaaaccataacaaagatgaaaaacataaaactttgcaaagtacataaactaagttatctacaatgttcctggctggggaaaattagtaacataaagatatcaattatctccaaattaatcaatgtgtatataatcccaatcaaaatctcaatcacatttttttgggacttggtaaccataaagtttatctaaaagagtaaatttgggaaattagtaagttttagggaaaaaatcaaaatttgagaatatggaaacccaagtaaggtgagtagctacgttcctggtaccacaagtagattctagtatagggaaaggagagatcactggacttgagagaagagtccagaaacagcccgcaactaaggggatatttcaaatcagtagggagaatcaggattcttcagctatgagcgtgtcatcatccatgggtatcatgagcaccatccaaaatgtcagatacatcttaggcaaacaaggcctggttccacactcatgaaaattatgatctagttagggagaagcatagtctacaaataggtacactaaagatagactggtagatgctacggagggagtaaacagatgttttggtaggcaaagtgtggaagaggctactttagataggtgttgggagaattgagtgtcaatttggaagagtaatgaacttgttagcctcaaaaaatgaaactagccaggtgcagtggctcacacctgtaatcccaggaattttggaggctgaggcaggaggattgcttgaatcccagcattcaagaccagcctgagcaacacagaaaaaccccatccctacaaaaaataaaattagtcaaacatggtggcatgttaactgtggtcccagctactcaggaggttgtagtgagttacgattgcaccactgaactccaacctgggcaaccagataggccctgtcgcaaaaaaaaaaaaaaaaaaaaaaaaaagagagaagaaagaaactatacaagtcccaggaaagtattaaagttttgattaaagttttgttttgtttttgaatcgttgggtcggggagaggtctgcccaagcataacatgacatccagtatccttaaaggaaaatattaacgtatttggttacataaaattaatcacttcttaccaaaatggataccacaaaccaaagttaaatgagaaaaagtcaccagacactaggagaaaagattagcaacaaatatatcatataaaagagaaatcaaaaatataaggtaaataaaagtcataatatataagtagaatttcaaaagtttgcatccatcaattaagatggataaagaatttgaaagctacaaatgcccagtaaatatgtgcagagatacccaaccttactaaatcatctaaactcaaaactgccagagagattccactgtggtctagcagatgggggagtattttcgtaaagaatatatttacaacattataatatctaatgctgatgaggtgaactttagagagaatagtaacatcaatactgattagtgcgaatataaattgaaacaatcacttgagaggataatttagcaagatttattttaaaatttttatttattttattttctttttatttatttatttatttatttttgagacggagtctcgctgtgtcgcccaggctggagtgcagtggtgcaatcttggctcactgcaagctccacctcccgggttcattacattctcctgcctcagcctcccaagtagctgggactacaggcgcccgccacctcgcccggctaattttttgtatttttagtaaagacggggtttcactgtgttaggatgatcttgatctcctgacctcgtgatcctgacctcctgacctcagcctcccaaagtgctgggattacaggcatgagccaccgctcctggcctaaaatttttaaatagatgcccttcttcccctagaattactttggcaagtcaactgaaatattagcagaaatgcacaaagctacataaagatgcaaatgttccttgcaatttcatgtgaaattgtgttatataacaatgtccatttctgcagaaaaatgagggtgatgtttttgtccatgatatagtattaaatgaagaaagaaagttatagaaaactacataaaatatgtctcattttgagggaacaatatatttgcgtgctcattgaaaaaaactctggaagcatatgtaccaaacctactattaattgaatagctctggagaacaggttggctgtgtgaaagagagacttttttaaaattcagtacatctgtatattgtttgccttttctctgccttgagtatgtcttatttttaaaatttaaaaagatatttttaaaaagagatagtgataaatggattggatcctggaacacaaaaaaagacatcagtggagaaactggtgaaattcaaataaagtctggagtgtagttcatagtaagtatgccaacattgctttcttagtcgtgacaaatgcaccgtggaaatgtaagatgttagcaatagaagaaatggtgaaaggtctatgggaacaccgtattgtctttgcaacttttctgtaagtctaaaattattccacaataataaaaaaaattaattaacagagagagtcacacaggcttgtagccaaggtatctttggctgttggaatctttggttccagaaaaattcaggttactacttgagctcccttgctctgagagctctatctctgtcctgcagacccccacacagggagactcccacctggcctcctgaggtctgcagagattatctaagccaggcctacatatagctaatatccccagaattctgctctgggaaagcaaggtatgaggtcacccctacctgcaccatggctgggccagcttctcagagactccacagttccccctgccctctagccccaattatttttttttttttacctatatcctttgtccaagccagatcctgccttctcagtattccccttccaacctagaatggtaacaatatgggctcagggagaggtctgcgggctatgtaaggttgaggagagggatgcagtctgacaatggcaacatggagctcataataagaaaaggatgcacaaaacctacacctcgcacccttgtccccattgctggaggccccagtgggaggagctggcctggtgaaatgaggatgctgccagacgctgccttctctcccctcctgctgggcttcggaggtttagggctttgtaggtttagggccagtcttcgtaggtttaggaccttctgaccagaagcccctggaaagaagggctgagtccagatgaccactgcctcttctctccgtgcaggctacacttcctggtgtttgacacagaggaggttcacgacgtgctgcgcatctgggatgggcctgtggagagcggggttctgctgaaggagctgagtggcccggccctgcccaaggacctgcatagcaccttcaactcggtcgtcctgcagttcagcactgacttcttcaccagcaagcagggctttgccattcaattttcaggtctgtgcgtgccctctgccagccccactccacatgtcctgacacatggcacccaccttcctctggccctcactttccttcatccctcagtccatgtaaagatagttattgaacatctgctatgtgcctggtacatggttagcacctgttcaaatgtctgtgctgagctcactctggtagggaagacaggtgggttaatagacacatacaaataggtaagcatctggatggagacatacggtccataatggtcaccttggagcatcaaggaagatgttccagaaaagatgatgtccaagctcagacccaacggacaagtagaagttactcaagaaaagaaagtgtttcaaggagcaagtagtcatctatgacaaggaaaggtgccactgaaatggactttggaggacttgtgcacccctattagatggaaaagagagaaaagggcatcctaggtgcaaagaacacatgaacaagtgtagatgcaggaatgtgggctttggaagtggagggctaccccatgtggctgaagcacagggagcaaggagggatgtgggaggtacaagtagacggtggcttggggcatggttatgaataagctgatgggacatgctgcacgctcaggttcttagttgagtgcagatctcagcaaagactggaagtgaacatgagtcatctaaatttaattaattaggcactgcaatagccaattatggaggagcatgacaaagagctacccaaaatggccaatgctcaaacatccaaatcccagtatgagataatttatatgattggtcctgcctctccctggaatgcatcatctcatctcctctgaagtgcctcttccatcattcctccccctgatcaagtgactctgcttcggtttctgctcgtgtttattatacagcagctgtcttcattaccatctccttactccactgtgtgtgtggtgggagggagggggggagtttccatggtgattccagagcaatttcttgtggcacctgtgccgtggctttgcccccgagctctttcccagttggtgtatcagctaagggtggttggggtatatccctggcaccactgagattgttacagagttgcaaatcctgcttctagctcttttctgctacgtctgtcatctctgtggaaataagcatttagcagcgtggggagcagatgagagtctccaggatcacattgctttatacttataaatttgtccatttaacactcatgcatgcttctagtctagcattttccatctattcctaagagttccatggaatactaattgatattgcaagaaaaaagaagtttgcatgatcaagtgatgctggggaggtgctcaggctgatgcagacccaaggaaatgatctgcaatatggggcctctgagaacgtttgctatgctaatgcccttaaattcaaaagatgtctggtaggccacaatttccaaacatattccatcatggatgacttttttcaaggccatctcaagagactaacatttcgtggaacaaacttgggaagttgctggaataagcaatggaaggatctcccagcagtaaggagggtagaatgctaaagagacggctcgatccactctctggggaaagaagtattatgaataattaaagccagacatattttctccaactgcgcccaagctgatgggtgcggcttaaaagaaaagaaaaagcccataattatgctgacaaattcacccacagatttgcattatctgacctcgactgcatactcagtgtagccacgcgggacagagtccctgggtgctctcctatgctgtatgcaggctgctttctcatgcattgcccagctcatggaagtcctattcatccttcaaggttcatctcagatgccactgcctcctaatctccccattcagagtaaaactgctatagcccacggcaccctggcactttacttctatttattcaataccaggcattctgtctcgtcttgaagctgggcacctacttgacatcccactaaaagctcttagaagacagggtcatgccatgcctcccgactctctcatagtgtatgtatgcagcaggtgctcactcacagcttagtgagcaaatgggcacatgaagatatgaacacatgaatggatggttttctctaacagaagggtttccttgggcaagctgcccttagcattgcttaggcagagtagcatggtcaaagctacctagcctgggctccagaaaggtcatgacagcctggcccagtgttatgggcataaccaaggtttgggaaaggtcaccttccctgttgctgtcatcagttagcaaataccaggactactctagggaagagagaacggctcaccccatgttaactttatagtgtgtatttgacaggggattgtacagaaatgccagggacgattagtgcaggcttggctttattaagtaaacatgactgtgtaacatctaacatcctgtctgtaccacgtggatccagcctttccccgggtgctttgccaagcagctccaattcaggagcattaaagagagaaagtgagaacaaaaaaaaaggtgagcgggaagcataatcacagccattcctattgagtggctgccacactaagctctccactacatcagctcttacaattttcacaaaacccttacagtatgggcaccattattactccatgttgcagatgtgggctccgaggcttctcatacaaggtcatctagttaatagcaaaaaccatgtgtctgtttcttaaacctaagctgctaatcattgtactctattgcctcccatataaataatccttccaagtatggccagaacaatgagctatttttcttctaggggaacatttacatgtgtacagtgccctataaagctagagatgaaagctaagtctgattttaactgggaaggaaaaagattgatgcatatttgactttacaaataagttcagtagctgtcaaatgttgatatgtaaacaaatgagtgtgcctgtgttccagtaaaactttatttacaaaaataggcataggcccagatatggccgtgggccatagtttgctgtatgcttccttaggtgttattgagtagaaggtatcagattgtgtaactcaagactcgtatacaatcccagaggttataattagtgacatcagtgtatacagttgccctaggctgccgcttctcaaacttttccgctgatgtcctcctgatagcagaagagaatgggtgtgcatcctcaggatgtctggtggctgtagcaagcacaaaatatctttaaggcttcacatttttgcttaaaaactaatatgaattttaccttgtaatccagaataaattcttttgttttagtataaaagtagtttttccttaaattgttgagaaaactgatattccaatcaaatcagtattatttatcctgtggtttcaagaacctccttgccctagagtgccctgagcacaggctatgagggatgacatagctggggactgggaccgggccccgctgtcagctctgggctgtggaggcagccagggttgttccagctcttgagattcctttctctggactaactcttgcacccattcctccggtgtgttttctcatgccacatttgttcatttattcacccactcattctcctatttatgtattccttccatctagcattcattcagtattcgcttataaaacacctgctctatgttaaactaggttaggtaatagacacgaagacgtcgcaaattcctgagtattttgaatttttaatatatctcagctatttttgaattcttctctgcccacttgctacaaatatctgacttttcttcaaatatggtttcagtctaatggatccttggttgtctgccattgcaagagagagcatgatcttgacctaacttcagtaactcccggtaacctcacaaccactgcttagcatttaggcaggccaactcgcaaagtcctttgcaaacccttccaattgaatacatggagtttatttgtttgtttgttttagagatgagctcttactctgtcacccacactcgagtgcagtgacatgatcatggctcactgcagccttaacctcctgggcttaaaggatcctcccacctcagcctccagagtagctagaataacaggcaactatcaccacacccagctaatcttttttatttttttgtagggtcagggtcttgctgtgttgctcaggctggtctcgagctcctgacctcaagtgaccttcctgccttgacctcccaaagtgctggaattataggcgtgagccaccatacctggcagcatggagtttagacttaattatcttgtcacttcctccttctgatcatgttagttacattatacaaaattgcaatgctttgtttatgtaacaatgcttgtattcttaagctgaattcaattctataattataacagtataatcatgcttaactcatagcatctcatgacaggcagatgacagtaatggtgaaggtactggaagaatggtagtggtgatatcagtgagagtgacaagtgtgatcacaattggtggtggaggcagtgatagtaatgggagtgagaatagtggcactgtggctacagctgatgatgatgatggggaggttctggtggttgtggcaatgcacggatgatggcaatcagtgagggtgatgagctgggagcctcctgagtggcagacacccaggcgaccttaccctctcttctatttccttgccccagtgtccacagcaacgtcctgcaatgaccctgggatcccgcagaatgggagtcggagtggtgacagttgggaagccggcgactccacagtgttccagtgtgaccctggctacgcgctgcagggaagtgcagagatcagctgtgtgaagatcgagaacaggttcttctggcagcccagcccgccaacatgcatcggtacaaagcagctgcagggtgcactctgctcttggggctcacagttgtgtgctccagaaccttccatgcacagcagctgcatcttgggcctggggccaagagaattgaaacagacaaaagttgcagaaaacccattgtttaccctgctttgcatgcatgtgtccccacacgcactcactcacgttcacactctatacacagagcactacaaattcctcacttgctaaaattgtcccagagatttccaagtcagacaggtctgtccctttctctctggcccaggctgtacaggtcagaaggaggacagtgggtcatcttgggtaataaaggctaacagattccgaaatgacccttctattacctgaagcaatagaagggcacccacagcctcagaatgtaaagaaaagaaccttgcttttgctgttctcaaggaaattattggttacctgggttttggttcttttaggttttagagatagagtctcactctgtcgcccagactggagtgcagtggcaccatcacaactcactgcagccttgacctcctgagctcaagtgatactcctacctcagcctcccaagtagctgggcttgcaggcctgtgccaccacacccagcaaatttttgtatttttgttgttgttgttgagatggagtctcactatgttgctcaggctggtctggaactcctgggctcaagtgatcctcctgccttaacctcccaaaatgctgggattacaggttttgtttctttagatctgtcctcagtcttaaaaccttcctgtatgagagatgaagacatgaaggacctgagacttgtctaaggtcccatcacttaaaaagggtggggcctgaaaaatcctgcctctaactacttgagactgagaggaggagggaacttgaagggaggctgggatgggaaagaaaggtaaatagatagagacaaaccctccaggtgcccacttccacatgtctattttgctcaggtgaaataatgagtgtttatctcccctgtcaatgctggctgttagaagagaagagaacccatggtcactgagtccttactgtgtacttgccccatactggacatttacttagataacctcatttaactttcccaacagctctctgaaattagcaccatttcctcatttacacttgaaactgaaacttagacaaatttggatatcttgtcccaaatcacagagctaggatatggcagagccaagatttacacccacgccagtctgaatgcaaagcctctcattttcctacctcccacactgcctcccctgctggagatgggtgtaaggggcttcctgagacagctcctgcaggagcgtctgccctggcctgcacctctctcactcaggcttaatgggaggcagtacgctgcccaggcctctgaggactggcctatgacagtcatggctctgaggcctggccctgaagttgacacactaaatcctgctcctcagtgggaattaggagccgcataggtatgtggggcaggaggttgagacctgggtttcagatccagctgagttcttcactacgtattctgctgtgtagggaacagtatgggatactgaagtagacacatccagatttactttctagctctgccatttactactttggtgaccttgggaaattacttcaactctctgagcctgagtttccttatctctgagggtaaatacacttcccttatggcattgtggggtgaggacacgcctaaccccaatctcaagaaatactaatttccttcctttctatcttccttccttccttcttttcatccttcccttcttcgattccttctttcaagtcttcagactcccttccccttccctaagccagaattccatctgctcaagggaattctgttgaggcccaggagagaatctgggaacctctgaggctccttccaaattcagccttctgcaaggctgtgattccttagacttattttacagaaaagcaggtcctgagatgagattgtcccaagtggagaaggaggattgtgctaagctgaggagagcaataaatgtgcagtgggtagggtggagaggttaattcagttttcatcacccgttcttctacactcggctttgggaaatgttcctcaggcaacagaataaatgcctttgcctcttctctcaaatgaactggaaatcccagtgacatgcttctgatttccagctccctgggcgttctgccatgagcgggtctagctggccctgataacccttcattacagggaggaagcaaaggaagaaaacaaatactcattggatgctgtccccgtgataggcaccgggctaaacattttagctacattattgcagctgaaatcactctgtggtgaggttagagctcgggattccactccctggctcaggtctgccttcaccacagcaagctgtgtggccttagacaaattgcccaacttccctgtgccttaatttcctcaccagtaaaatagtgaaaatggtagtacttaccatctagcattgttttgaggattaaaaaagaaaatactataaagcaataagaactgtgcctggctcatagttagcactgtgtatgttagaagccattatcatcattattcttttactttcgagatgaggaaatagaggctcagaggggtggacagctggcccaaactcacacagccaatgagtggcattgtcagaatttgtgctcaggattgtatgacttccaaatcaatgccctttccacaactctcaccctcagtccaacctgcccacttcttggctgtctagaaggatctgcagcttgcacccactcccatctgggcaaccatggtttagtaagctcaaaaggacccctcgactaaccctgagcagtaggagccttcctgttggcgaggcagcccagggatccaagcaaggccttggggcacaactggcagcagccagggaagcccatgcccgatgccatggaactatctagaagagatctgtgcccagacagcagcctagaacccagagacactgatagtactttgggggttggtgggagagtaacaggggcagtttcagaaacacagagactcaccccatctgtggcaaacttaagggaagaagcccctgagctggcaaagggacgtggaggctgggaaccagaatggaggcctcgttgtgcccccttgggaagatttccccagagttgggacttctgatatgacactggctttccactctcactggccacatcagactctgtttctaggctggcctgggcaaggccacgctccatggactggacattacagtcttgctttgttaagctcaagggtctagactgattgtactggcctctgcttggccccacttatctagccctctgctcctgaaggattcagtggtggagacacaagtgagacataagcagacccaacttaaggcaccacctcgctcagaagctcctgcaacaactgtgctctccctgctggccagcggggagaagcacgcctcctctactctggctactgctaccgactgtatggaagtagaaagggggaaaacaacagactttggagccagtcccatgtgagtttgagtctcagagtgactctgggcaagttacttaggctttctgagactcactttcctcctttataaatcaggaagaataatccattgctcattgagttgttaatgagacataaatgagatagtgtatctaaaatgtgatttgttaagtctaatacgtaatagatgcctatttgagtgtttctgatactcaggatggttcttgggatatattttcccatggaacaaaaagcagactactcatgaccactcggattttatgttcagccacattagggctcttatggcctgacctgaagacctaccatttgtttgagaccctgttagggattgacccagccctttaagcctcaccctgagtaaaagccacagccagaggtggctccatgacacagctaaagtaccagtgctcagctctatgacaagccaaaggctgctcctaactttggagtcaggtatacccttttgctccccccacaaagactcatcttggattttctagccagcccttaaatggctctctgtgttcctgtgggctcagtgttgacaacctctgatggtgccctgtggtttccagaccaaaccatacctatagtcttggccatcctgctaacgaccccacacgcttcccagctcttactctatccagtcctcatgccacggtacagcagccccagccatggaggaagagacctgatccaggctctggggaagctgccccagaaggtccctaggtaaataggttgctgtgtcacctggccactttctccctccccacctgcttgagagacctgtcatctcaggggagggcgaccacgtagactgattggggattaataatagctccatacaactgaggtacacacatactcttggacaaggccttttggaaagttggaaagtatctgcagccgcgagcagatgccaggagcactggcagcgtaggagaccagctgcgcttggcaggcgaatgtgagcctgtttcccactcctcctgacattgagtgcacgggaactcacagtcagtacccacaaagcttgccgggaagccgatgtgaggcagtgaaggaaggccatgtacttcataggtgtacagacagtgccggctccgtctatcaaccattcactctctaccaaatacttcagcagacatctccaataatctttacaaccaccccacagagaagatattgtctctttttatgatacgggagagacatcgagggctagagaggctagatgagttccctgagttcacacagctaggaagtagcagggtcaggtatttttaaagaataatttattaggccgggcgcggtggctcacgcctgaaatcctgtgactttggaaggctgagatgggtggatcacaaggtcaggagatcaagaccatcctggctaatacagtgaaaccctgtatctactaaaaatacaaaaaaaaattaggtgggcatggtggcgggcgcctgtagtcccagctgcttgggaggctgaggcaggagaatggtgtgaacctgggaggcggagcttgcagtgagccgagatcgcgctactgcaatccagcctggggctgggggacagagcgagactccgtctcaaaaaataataataataatttattgaggtgaaatgcacctaacataaaattacctgtttttcaatgaacagttcagtggcatctggtactttcgaaatgttgcgcaaccaccaccactatctctgaaatattcccaccctccaaagtagaagtccatcatttcaccttctcctgagtccctaagccaggttcaacttcagcctgtcagcctcagcctctcctctctcaatagtgcattagcaacacccatgaaaatgagcccagggtgaagaggcagcctcaccctcgtcttcttctctcctcagctccctgcgggggagacctgacaggaccatctggagtcatcctctcaccaaattacccagaaccctacccgccaggcaaggagtgtgactggaaagtgaccgtctcaccagactacgtcatcgccctggtatttaacatgtatgtacctttcccccgggtgggagacgaagggttcagagtggctaggggctctgggacctgggtctccaggtgagtattcacaggtctgtagcagagttctcagctccagggaggtgaagaagccgagagagagagaaactagcatttattgaacatctacgtgccaagcactgtgctcagtggtctcatgcatatcatcacatctaatccttgtagtaatttgtgaggaagcaattattatttcctctctacctctgaagatactgggacctggaaaggaggcctttgttggatgcccttgccctgccctctgcattcccagtctgcttccccggccccttccaccccactccagaggtataaacaggcgggcttgggtcccaggcaccccccccaatctagctcctgcacttgcttttccattcctgctacagaaaagctcttcaaaagaactgcctctgcctttctctacttcctcacctcccgttcactctcaaccccctggaacctggtttctgcctccatggttctactggaaactcctctgataaaagccacccacgaactcctggttccaaacaaaatgggcctttctgtgttttatccactccacctcttgatcaccctttccatccttagactgctttttcccttggtttgtgtgaagttactcttcccagttctccaagctcttctgtgacttcacgtggacctcttgttaaaccatcttcttttgccgggctttgtcaaaacctcctcttcttcccctacacccctttcctggacaagttcggtcattcctgtctccactctcctcttataagtggaagactccattctgctgcccaccctggctttattctgagcgtcagcatcgctatccagatgttgggcatctctgtctggggcctgcagacactgcaaatgagcatgtacaaaatcaagcatattttttctcccccagaagagctctgttctgagccttggggctggcattgacacctgctctcacggcttcttccactagcagcaaccaaggcatgcagcctctatcgccttcactctcctcatgtatttcctcttctccatcctcctagctcctgtcctggtttaagtcctatcatttcccatctaaattactgccctcatctcctagctggttcctctgccccatcttgcctcccatgccgatctctcccttagctagctgtcagagtgatcgtgtcactcaaaaatgctgaaataaccaccctactttccattttaacatcctctaatgacagtgctcagcaataaaaaagaatgaactactgatacatgcaacaacgtggatgagtcccaaaaatattatgctgagtgaaagaagacagacataaaaaagtacataatgtatgattcaactcctataaaattgtaggatcagcaaaactaatccctggtgaagaattctaatcagtgttggcatctgagggtagggaaggttgaatgggaaggggcatttggaactctctggggtggtgggacagttctgggtcttgatatgcatgtgtcaaaactgatagagtggcacaccttagggctgatcatttcacacggtgtaaatcatacctcaattcaaaaacaaagaaacaaacaaatagatcctttatttttaaatcctatcatggccctctattgcttataataaaggcccaaactttggagtttcattccaaacaatctggtgcttgcctacctctccagtcagccccccaccccatcctaagcccaccccatcctaagccctaagctccagccagatggaactccttgcagtttcagggcctcacggattctttcatgcccttatgactttgcctctgtttctgccttcacagcaacttcctgttccctccttgtcctatctgtaagggtcttctcatctcccaagactcagttcaggcttgatttcctccataaatgtttgatttttcatcctccccaaggaaccttgctttgtgtttctgctctgcctcgggctgacttcatacattattttgttgttgatatatctgtcacttcctacagcaccatcaatttttgaaggcagaagtggtgtcttacatgtccccatgtccttggcaccttgcacagtgcctggaatatcgagggtgctcaaaatttgatgatggaagggagagacagaaagaaggcagttagttaggaagtggtgatgccatcatttgtgaccaagactcactccctccgaaacccttcgccggtgactttcaaaagagcagatgtcaagaagctgaattacaggggcaagaagaccgtgtcacccagccatggtgtgttgaccccgcaactgacaccagtgtgacaaggtgccaggtgggaaggaggccagtgcgcatctggctctgtgccccgtgcctcccagtcccccatcctgtctcttagccagccttatctcctttgtcctagagatgtatgacctcctccccctgctatatatcttagccaaaaggtagaacagtcattttactctcaatctcaaatagagtacagtaagtcctcagtatcatcaacaggttcttggaaactgttgactttaagtaaaacaaagtatagcaggtcttcaaatgtttccttcaatgtcatttcattatattgtttttgttttgttttgtttctgagacaaagtttcattctgtcacccaggctggagtacagtggcacaatcttggctcactgcaacccttccttcctgagtttaagcaattctcatgcctcagcctcccgagtagctgggattacaggtgcatgccaccacacccagctaatttttgtatttttagtagagacagggtttcgccattttggccaggctggtctcaaactcctggcctcaagtgacctgcccaccttggcctcccaaagtgctgagattacagacatgagccactgtgcccagcctgtatgttgatgagaaataaacaattggttttgttatatgtcatttcacttaaagtcatggtttctgagagcctgtggacaatgctgaggacttgctgtatctgagtatcccagaccatggctgggcaggagcaaatttgcatctgaaatctattctctgcaagctcatttacttttctattgttttcatctttgcacacttgattggtatcaattgcctttgttagatatatacttaagagtggaattgctgcaccagagcacaggcatacaggggggacttcaaaaagtttgtggaaaaattgaatttaagatgaaaataaaaaatataaactttattactcaacataaactccatcaagttcaagacacttttgtaaccaactattccagtcattttgtccatccctaaagaacagagggtcctggtaatttaaccatgtcaatgtagtcttttttactttattaacggaagaaaaaatgggtgctctttaaagatttttttaagattagaaaacaaaaagcaataagaaggagccaaatcaggactgtaaagtggatgcctaatgatttcccattgaaactcttgaaaaattacccttgttggatgagagaaatgatcaggagcattgttgtcgggcagaaggagtctctctcgaagctttccaggcactttactgctaaagctttagctaactttctcaaaacaaactcctaagaagcagatgttatcattctttggcccttcagaaaatcaaccacaaaatgtctggagcatccataaaaaagaaaaaaacccattaccttgacctttgctccacttttgctttgactgtacacttccattccctggtagccattgctttgattgtgctttgtcttccggattgtactggtaaatccatgttccatctcctgttcttgggagaaatgtttcaggatcttgatcccacattttttaaatttccactgaaagctctgcttttttttttttttttttgagacagagtctcgctctgtcacccagactggagtacagtggcacaatctctgctgactgcaaactccacctcccgggttcatgccattctcctgcctcagcttcctgagtagttgggactacaggtgcccaccaccacgcctggctaattttttgtatttttagtagagacggggtttcaccgtgttagtcaggatggtctcgatctccggaccttgtgatccgcccacctcagcctcccaaagtgctgggattacaggcatgagccaccatgcccggccaaaagccctgcttttgtctgcagctgatctaggcacaatggttttgacacccatcaagtagaaagtttgatcaaccttaattttttagtcaaaattgtgtaatctgaaccagtcgagatgtctatggtgttggctttcgttagtgctattaatcattggtcctattcaattaggacacaaacaagattaatttttttcctctccaactgatgtggaggtccgccttggcaggcttcatcttcattatcatcccctcccttcgtgaaacaagttatccatttgtaaactgctgatttctttgggtcattgtccccataaactttttgtaaagcatcagtgatgtcaccattcttctacccaagcttcaccataaatttaatgtttttccttgcttcaattttagcagaattcatgttgctctgatagaggcttttttcaagctgatatcttgtccttcttaatgcctcacattagatcctgtgcagacatgttataacaagttagtgtgagtttattttggtgcaaaaaacttttgaactccatgcataattttttcgtaatatgcattttccatcattttcactcgagccattccagtgggataaattacattcatgaactctaatattcaatttgctcaactaagtttttaaaatggatttttctctcataccagggtcagaatagctaagggttaggacatttgtgggtgctaggcgtggggcaatagcagaccctgaggagagctggagcactggcttgggatgaaggcacaaagctagggtccttcatggtaacaggtcccttcctccctgagaatggcaccatagttggctcattctctcttagaaaatgaggttcagaagagcacagtataaggacattagtgtcaggtaagagagttgggttttggacctactttggttgacagcttggtgtccagagttggcaactcattttcccttctgtataaggaggacgttaggttttcagctccagatttttagacactgactggaatctgactcctctgcccctgagcctgcctcttccatcttctcacctgactgaggtcatcagggcctcatcttctcccttcccaccagccagtcttcaggggttgggtaccagtgggatggtgggcttgctccctgggaggccctatgctttggttgagcctaagaccccggcaaaagcctttatttgaccttagtggggtgggggtgggatgtttttgttccccagctttaacctggagcctggctatgacttcctccatatctacgacggacgggactctctcagccctctcataggaagcttctatggctcccagctcccaggccgcattgaaagcagcagcaacagcctcttcctcgccttccgcagcgatgcatctgtgagcaatgctggcttcgtcattgactatacaggtaagggccctggtgccagagagtactgaggacaggtccagctaacaaggcagagggcaagtagtgtagcgtagtgaggagagccctgggctggaccacagcaagcccacaccaaccctagcactgctgccgcctgcagaaacctgcctttcctgcggcccccatctgggcttagtctttcacccctatattctccaggggtgggaaaaaagggaaccagcattctttttgcacctcatctatttccaaccactagtcctcttctctttttctatgagggtcattcctaactctatttcaacctcatagctatcagctggtatcttccttcactccacttcactaaagaggattctgatatgaggcacaatcttcctctccactcagagcttctcaccatcctgggtaacttcaacatccctatggacagcccatctaatcctagggtcatggtgcttagacctctgtcccaaggacactccttggccacactctgacacctcgtcatagactggtcactttctgatacctcctgatcacatttgctcatccttccagctgtgctaattaaggcaagttcagtagtgttgtggtagagagcaagagtcaacaatttttcccctaaaaatagtaaatattgtaggtttacctatcacaactactcagccctactactgtagtgctaaagcagccacagacaaaacagaaagaaatgggcgtggctgcatttgaagaaaaattcacttacaaaaacaggctgtccctgcccagttaagagcattgactgtcaaattaattggattgaaagttcatgtttatgacttaacatttgcgtgaccttggataaagcattgaacctcttgaagcctccatttcttcctttataaaacgatggtaggaaaattcctgcttcatagaaatgtaaagatcagtgagtccacacatgaaagtccttggtacagtgcctggcacatatcatgcattctgtaatgttcaagtatcattagtagtagtaagaggagttccaggctctcgagcactccactgtcttctacgctattatctctttttgaccttttagtcttccctaattatcccaaatcccattatctaaatcccagctcccttccttgcttgatttgtgagcttgacaagtattatctcttggaacatcatctacaaattgttgctagtaataattatgttgcaggaggttaagattaaaagatattttatacatgcatattttatatatgtgtgtgtgtgtgtgtgtgtgtgtgtgtgtgtgtgtgtgtgtgtgtgtataatgctccatatgtactaaacactctacagatgctctgggaatgatagattttgttattgttactataacccgggttcacccaggcctcatcagcctgagcatacaaatggggtcgcattaccagctaaaattaaaaattttctggctcatgttccccacttgcataacataagacctcagataccttttaaagtgtcccctaattaaatatttccggccacccctgggaatatctcacatgagctcacacataacactaattagaacaatggcaaacttagtgttttcccactgccagcaccagcctaagtgctctatatccatcaactcattggactcctcatagttcttgattatctcctgtttgtcgggtacagttctagaagactggtgtgcaaaatggagaatgttttacttgtagtcttcttgcctcacggggctggcctaggcaatggatattctgccatcctttcttcctccaggcacctgccatttggtaaacctcctgggcccaaaccctcttccacacactgatatcagcacagtcagacactttggaattctaacaaacagaagccacaacttagacccagtctgggacctccattgctcccaccaccaccatccccactgccatatcatcaccatttcttattattcatctcttccttcatattctcatcagtaccctcaattgtcctgcccgctagtcctccaagtgcataaaccttgcaaaactgtaccctttgttgaacccacacccacacagctgaggacacccagacaaagctgcacaaacgtgatacttagagtcactacgagtgatgtcctttcccccagccaagccttagcaaccaccagagctgcctccgacttgacccaactgagttcttcttggcagagattccaaaattcaccccaaatgtcaccccgtcagcctcattttttataagatgatttcatttcagcttccctggatacagtaagctattgggtagaaaccccctgagcttcctctccagtcaccttgttcatgcctacctgcctgtggccatctctcccccaggtcttctccaaggaaattcatggtccgagagccatactttcaaaacctctttcccagtgaagttctttccacttttgcctgttgacccaaggtgggtatctagaggggtctttaggtctaaaccataacccggggaataagacctccccagctgccatcggagccagccaagcagccaattactggagagaggggagaagagaggcacatcctacagacgtatcccccatcaccctattaggatctgtagtgcaagtaccaagataaagataactatgtgtgtttgaggggtagggggtgcctgttggaagcctcaagcatccttcattatttcatttgttccttccttccttccttccttccttccttccttccttccttccttcattcccagactacacacctcctaatattagtcaccctctactatctccctgggcctctggtctagtagcccatttggtggaacctagggacccctaccttaccctctggtctgcttctgcctatgccaggatccctggattcctggaatgggtctactttgctatcaggtcccatggctttgaggatattttcccatgtacactatctttctttatagggtaggctccatcacttcataactgtatgccctgaaacaagttgcctaactcctctgagcattgcttcctcatccatgaaaaagggacagtgacactaaacgaaggagttgttgtgaggattagcacataggcacagcatcaagcagagtgcccagtgccaataagtatttgatatgtactttgatccacccactttcatcccacctcctttttcctacgtcactggtattgcatttgttgtgcctttgtttggaagggagaatggggctaacccaggggaacacggtacatgttcttttctgtttactgaagatgtaaagtgtgagcataatgttttgcacatgtaataagtgtgggatatttataacatgaatatttgtgatagacgtatgtgtcccatatgctttgccagcccatagcaaagaatttagacattccacaccctgtaagtctggagagaaccatagatggagaggcagcccactgaggacctccacagggaggcagggctgggtcctcaggaaaagcagaattggcctctgcatccaggaagcatctgtgtccatgtcttttagagagatccagggctctgctaaaactgagagtctgggtatcctgggagctgtggcttcaggggtcttgcttagggaggtgaaaggggcctacgagcgccccacatagagagatgttgctggactcagttgggctcagcacaggggaaattactctctgagattaacccttcccctgacccaaggcagagagaccaggagcctttctccacacacagcttcccaagtgagaagcagaaacagtttggtagaatcttaggaaatatcaaaaaaccactcagagcaacttaagcaaacaaaggggtaacttattataaaaacacaagaaacagaaacccactcaaaacaatctgacacaaaaaggagacatgattatgagaaaacaactaacagcctaagtaacttaagctaaaaggtttctatattttaacaatacagataacaataactctgacacaaaaaagcaaaatacttttagaatacaagagcccaagggcagaaagcataaactcccaaaggactggaatcaggatggcagaggcacagactgagaccatcatccgcactccagaatcgttctctctcctccctgcctccttctgagcacttgctacattctcccctccctgcagatcaattttccttgcttttccattctcctgggataaatgtggctgtctcactcctgactttttttgtttgtttgtttgtttgttgttgttgttttctttcctttttttttttttttttttgagacagagtgtcactctgtcacccaggctggagtgcagtggcgcaatctcagctcactgcaacctccacctcccaggttcaagtgattcgcttgccttagcctcctgagtagctgggattacaggcatgcatcaccacacccggctagtttttgtatttttagtagagatggggtttcgccatgttggccaagctggttttgaactcctgacctccagtgatccacccaccttggcctcccaaagtgtgatacagggtgtgagccaccgtgcccagatcactcttggctttgaatcacttcccagtttagattccagtttcagatcccaaaggatcatctgagggaacaggcttaattcaagtgtccactgagcagcatcatgggattaggcttttgcagaaggggcaagagcaggtcaggcatttttatttatttattcattcggtaaatacgaattgagcagctaccatatgccagaccttcttacaggggctgagaacagaccagaaaaccaaacaaagtctctgcctccatggagttcacatcctcgtgacaactagaccgacggacccttctgtagatgagatgttggaagcccacctggttctaaggcaaagaggggtgggtttttagatgtctctgttcagttgcttctgaagggtgactgtagtgtcttagtcatctctgggcagactttctaggagatgattctgaatgcagtcatgtcatctgtggatttctattagaccattgatcagaggcacttctattctgaattcatcctcctgggtggctttaccctttgctaaaaggaaacaaagaacagcagggatcctgtgttttggatacagttaccaaaatggagtcacagggaggtttatgtctttctccaggccacggatatcaacagaaccagtggggtggaaggacctttattctcatataccagcatgtgtggcagccttttcctaggcaggaatgtgctgaaacatccacgcacatgcaagacatattcattcattcaacaaatgcttgatgactcctacttcatgccatgccctctgctgggtgttgagaatacagcagggagcaaagtaatcatcatccctaccctaatgtaacttacaggtgagtgagggaaacagcaagaagtaagaagcataagaagttaggaaagaaaacaacaggctcctctgagaaacaaatcagaagggttgctgtgaaggcctctctgagcaggatccatttagacagagccctaaaggttaagtagaagccctctgtgccagagtgggggccaggggcgtttcagagggaagagtttgaagtgtgtgttagagaatctgaaagaacacaggaaagaccaaagtgaatcgatttttaatggaaggtcctaaaaagcatgtattttctctttcaagcccttggaagtaacactgtgggcctggaagctacggccacacctgctaccacccctattcccaccacctgctgctgttatgggtcattcttcttaaatgcaaattagaactatcttatattctgcctccttttaaaggaatgcatgtttgttggaaaaattcaaacaatatataagcatataagatatactcttaaagacttagcatgcccccaaataccatcatcccgtgcaataccattattaacagcttggtatctcatttcggatactttctataaatataaagtaatgtaaagtctgtatcaggagttggcaaactttttctggaaagggccagagagtaagtatttttactccagatggtctctgttgccactgctcagctctgcttcgtaatgctaaaggcagccacagacaatatgtaaacaaatggctgtgttccagtaaaactttatttacaaaaccaggcagccaccgacctgtgggctgtagtttgctgatccctgttctatatgaatgagattgcaccatatgtactcatctgtaatctgatttttttgtatgtgagcccaagaatagatcttggactccttcccatatcagtattcaaagaatagtgctattcttttaaaaggctgctagtgtttcagtagatggccctaatccaccctttgtaaccagttccttactggttgaatgtttgggttatattcagatttttgcagttataaggtttggaagtaagcctcatctattaggaccagagagaagctggctcttctcattttcccattttgaagggcttgggttttatttattataatcaccatgatgttttagtcatttagtgttatcattcacagctgagctttggtttggctgactaaagacctgattttggtcttaattctacctctaaatagctgaaaggcttggaagactcatttggcctctctgatcaccatattcctcatctataaactgaacatgagcataaccggccctgccttctgcagagggtattgtgagacacaaatgagataacggcttggaaagtgccttgaaaattatgaagtgatattcctatgtaaggggctatcatcactgtcattatccatgtcattattattaatgtggtaatgcttgggatgatgagctcatctttctcttacgtgtgagtaaatatagaatagagtctgtagttggaatcgttgatgtggttgttgattttccaagcctcaaagtattcagccaaacaattcagcagccatttattaagcctctattatgtgccaaatagggctagccttggtgccaagttctgtgctagttgccagggttatgagaagatcaggtgatgaaccttctcctccaggagttcagaacctactggaaagaaatacccttacccaagttaccaaaatagcgtgatacatgttataaccagggaaagaaaaacagaattctgccagagagaaggtggcattaaaagtgtaggattttgccacacaaataaggaaagaaaggacattctgacatctgtaaagttctgggccagtcattcccagctagggtccaatgctggtgcagcagttacccaaaaacacagttgcctgaacaaggtagacatttatcagacttcctataaaagaaatctggaggacagcgcccaggattgatgagggagctccaccttggctgcttttgtctccctactctaccatgctagtccatggatcccatttcaacgttatctccgatccaagatggcaactgaggttccagccatcatgtctgagttccagactgagagaaggaggaaagatgcaaggaaggaaaggccaataagcatttccctcagctgagtcaacttcccttaaacagtctttttaaaagttccacaataatccactgaagatatttgttaagtgcccaccatgtgacagacactggaatatggccgtgaacaaaactgaacagctgcccttctgaaatctatattctagtggaggaagacagaaaaaaataaggtcaatatagagtcgatgagagagtattaactgcagtggagagaaatatagcagaggagggtgttgggggcattggggagaggagtattgcaattttaagtagctgctcaaagagtgtcactgaaggagaaattgagctaagtcctgaaagaggtaagacagggagccacaaagaccagaggccagtgtcgttggagcaaagctagcatagagacgacaggagctgaggtcacagaggggactattggggccacatgtgcagggccttgaaggcctgtaaggattttggttttaccccaagtgacacgggaggctattggattgttttcagcagacatgatctaactcgtgtttacacaaggaggctgggaaatgtagaatttagctgatgccttcaagctctggataaaattggagttctgttattgatggatgaaggtggggaaagtggttattggggactacagctagttttgcctcttatgagctgtgtgaactttgattccaagttacttaatttttctgaactttagtaagatttaacccactttgaatttataaaaaggatagatgaaacaaaagacatgatgacaggtccctggatctctatgactcacatatgggtcacccagtggccagttctattctggccagagacactaggcatatggagaagacagatttgataaaggaggtcaaggcaatgcatcacggggcacatgaggaaaccactgaggagtgccctgtgacgagtggccatgttgtcggtcccacttgggtttaaatgcagtagtgcatccagagctgctccactctcagctgcgggcaacgacttaaggtgcaggatcttctcacatgctcctgtgcaatagtgagactctcagagttccatcccatcagtcaaccagatgattggcagctgagtgacagcctcaagtagtggccgcctcctgtgtaggtaatctaaaaggtacccaggtgacaaggacggccctcagcaaaattcctcctgagccattcatctctgatgaatgaacactgatcccttctattctggttcttccctccttaactccactctttgaatttctgagtccttctgcaaggactgtcagcacccttttgtgagtccccatctctagacctctctgttgccccccaataatgtatcctccaaaatgctcatcagtcaacctgatactcagttgcatctccctggtactgactggcctcagctgtatcctgttactgcccagccctggtgacaaccctcttgaccatcagttatcttagaacaaggaggacggaggaaaggtaatcatgcatagaagcgtgagcatgggctcccagttgctgctcaggatttccagctgatggtgagggatgctggagagtgtcctactccagagatttgggacttggactagtactctcaagccacaggcaatgtcaagagtggtcttgtttgatgcagagcgacagagtagaggactgtttattcataaactgtatgactgatagggaagacatgtaagggtcaatagccacatgaaaaaaatactgtggttttcataaactggcaagcacccaatacccagtgcagagccctggaaaactgcactggagacatcaacttatcccaccggtcgggtaacccaacccagaggtggaagtgagttttgtacttcctccctgaatctaagtattggtacccatgcactcagaagaacctgcaacagatgggtatgactgggcctgcagaacagatgccagctctactccccagccagtggtacagatggggcagaagagagaggaagagaaagagcatctccaaaagcagactgtctgccctgcttctcaggtgaacacaaaaggccaggaggctgctgagtgtggggggtcaaagatgagtaaagtgatgggctgtacctaagcactgacctttaccacagtgaccctgccggcagctgagatgtggtccagggactgtcagcccccaccagccagagaaacacatgtttcccttggggaggagcaagcaggggatgagagagggcctcagcgattttgctgggcctccttcctctgtgggtcaaggcaagaacatggggggaggaggggaaattgccctcttcaatgtgatttccatccttcaatttctacccaaatttagagacgtttctagacctgaggggaataggagccacagtcacgcatccccgtgtgctctgtggctaattaaagtcgggttctcctcatgggcactggagcccaagaatagcctcctcatgagccctctgtgtgtgtgcacgtgtttgtatttctttttcccagaaaacccgcgggagtcatgttttgatcctggttccatcaagaacggcacacgggtggggtccgacctgaagctgggctcctccgtcacctactactgccacgggggctacgaagttgagggcacctcgaccctgagctgcatcctggggcctgatgggaagcccgtgtggaacaatccccggccagtctgcacaggtggtggaagcctggggatggcaggggtctgaggaactgagggcatgccaggggcagagggtgctgtgggctggggaagggaggggggcaaggtcctcaagcccggctcctccaagcctggcaaacctgggtttgccgtggatgtgtatagaagtggcttataattcactaggtgtgcagttcctttcaaggtatcatctcagaacccatggtgtccctacccccattcacatagatgctcatgccctcaacagaggcccccagacatgccacatcagggagctcacaccagggagaagtcatttaaaggtggctcctggactagttcctaggcctagggaaaatcactgagagatcagatatgttgaagtaaggcccgcagggtgtgctgattccaggtgggtctgggtgagccatgggggtcctgacaagagagataggaatgagtatcagggctttaagagcttggtgaccacccattgaaaagccaagcataccccctttgtcatggtaagagaggcaggctcagacccgccccttgtggaaattgggcaccttggagaggaacagaaggtggctgggtcacatgggctggccactccccatggggttagtccggggaagcttcagctccctattcacactgacactcactgtccaggttagatgtcagccagggcagcagatcatttctaggctccacgtgtaagcagaagaggttcctaatgtgctccctaaggctgtgacttcagggaccaatgccagggttaataggtagagggcaagaactgacacctgcccaagagggccctcggtagcttcagggcaagtttcaggctacatgccaggccaggggtgcacgttcttgggcagggcagggtccgcaggacttgccttctccaagctagggcctgcccacctcagggcagccctactggggccagaagctcaggctggggcagaacagaggatggtcactggtaagaggcccacaaggtcacctgactctctatctggtttctctttcagccccctgtgggggacagtatgtgggttcggacggagtggtcttgtcccccaactacccccagaactacaccagtggacagatctgcttgtattttgttactgtgcccaaggactatggtatgggttttggttgttgttgttcatatgttttctgactcctcaccctcattccaaaatgagcaattcctcagacgcctcccaattatatacagccccattgtgggaatcgcagaacagtctccccaaaaggacggccgagtgctgacgtttctcaaacgggctgcagaatacattccggacacaagagggcagaagggcacaagtgagccccgccagaaccaaggggacagagttggtgagaaactggccaagacagagggaaggcaaggtgccccaggggactacccagtatggcccaagtcctaagggaggtgccgcagatctagacctgttaggaacccagggtgagtggccaaggagcaggagggaggagaggaatgggatggagctgggcttgaaagtgcaggtgagggagaccaggagccacatcattctggtgtcccatctgagaaccaaagcctggtccagaagctataggtaggacaagcaagaaaaaagtgaaaagcagaccagtgccctgggaagacagagaaacttccagattccaagagatgtgggcagaaaaaccaacccaggctcattacctggttggcagtggggacattcaagagtcctgccagccttggaggcattcaggaagatgaagggcaaccaggtgaccaggctggcttctttcttcctggatctcctctttgtaggaggactaacaaccatatctaaacacaattgatgttggatgtggcaaaggacatcaacatgtcccgaccacccaggggaggagcaggacggagggagcagcctgcagagagccagctccttattccccaagacaggatgggcaagcacagagcaaggcctgatgcttgaggcgttcgccaaacatttagtaagcacccattgggggccacgcactttactgggtcctggagttgcagagatgagagagacatgttctctgtcctctataaattcccagtctcatctctacccatagctccagccatcagtacacccactcctgccccagaaccaggacacctatgtacatgtacacacactccccaatatactgaggtggcaggggcctcagacctgcaggatcgcagttagaaaagtcctgaaaggctgtccaatctgatctgctacccagagcagaatccttggtaggtgggcatgcagtttgtgcctggatccctccagtgataaggagctcacagcactgactacagatctctgtatacagttttcaactcaatgacactgactaactgacgttgggacgcatgaatgtggggtcctgacatcgcatggagaatgagggatggtacccaaagccctctgatggcctccagatagctgctgcagctgctatctgggaaaggaacaaagttggctccatttcgcctctacccgcctgacctttgggtgcagccctccatgttgtcttgacccttgtgaaggccagcccggccttcccagctccccgcctccctgtgccgggtgtctggccactgccagactgtgccactgcactaaccagtgcagcaagccacagcccaggaaccaacaacttccccagggctgccctcctcctggcttgggcccctagacccctagatcccctctcctgcccccagcgtgcctgcccagtccccacactgtgtctcctccacagtggtgtttggccagttcgccttctttcacacggccctcaacgacgtggtggaggttcacgacggccacagccagcactcgcggctcctcagctccctctcgggctcccatacaggtatccggggctcggccagtgtggggatggttgtgggccgggggcatcacgtccggctaaaggaaggaggctctagaagcaccccatggccgcaggtggaaccctacggctctgcgtgcctgtcgtgttctggtgcttgtctacaacgcagcagccagctcgtgagagctccaactagcggggccttcagcagctgccctcacccagactgtgtctacaccgcccccttgtggtgtagccttctcctgttggttcgtattcagatgcaactttttttcttactataaatgtattgcattttcattatagaaaacttagtgacaaaacaaaataattgcatacagaatcaaaataaagactaccccgaaagagccactgacaagatgtagtggatttccttccagtctttgtatctacttcgacgtttacatattttattcaacaaaccaatatacatattttattgaaatattcgctacgagcttttctctgtcattttttttcttctaggctaggatttttaagtgctacatagtagtctctcatacagttagttaaaatttatgtaacgaattccctattattgaacatttagattgtaatgttttgtgcttatgaatagtaatgcaatgtattgtacatacatctttatatacatttctgttactttagaatatctagaagtggaattgtcaagttaaaggatatgtgagatctttaaggctttttatgcagattatcaaatatccctctagaaagatcttgtcagtttgatcaccaacaagaaagagggcatgttttattctcacaaaaaccaggtaattaaaaaaacaaaagcgtcatcagtttgaaaagtgaaaatggtatctcattttctaatttgccttgttttattactagttaggttaaatttttataatgtgtttattggcctgtgcattttttatttgtgaatttattgtgaatttgtgtcgatttttctacaagcacttattttcttatttattgagtagagctccatattttataagctacataaatatatataatatgctataaaaagccctcctctccagcttgtcttttgctatataattttcttcagggtgctttaatgtcagaatatgtaaatttcccatgctatcaaatctatcaatgttttcttatatagttttctcctttgcttttatgctggtcaaataaatattcctctgtgttttctttcacttcttagtttcatcacactgctttaatacctttggaatttattttgatttattatttgatatagggaatctaaccatattctttcaaatatagttaatcagttgtcctagcagaattttcaaaatgccaaatttacatatactaaatttttatgaagggtctgttcttagactttttatccatttcttccaagtgtctatttattccttttttagttttaattattataacactataatagtgtttactatataataattttaaatacatggtactataagtccccagagccattctttgttttgaatttttattggctgttgttgcttacttttgcctccaaattatatttagaaatattttgttaagtttaaaacattgcatcagaatcttgactgggatttaataaaacttacacgttaaattagggtgaactcacgtttatattaactcttcttcccatccaggaatacaatatgtctctccatttgtttatcttctgtagcccttgggagggtgctataatttttatttaggcagtattcattgtttgttaactttattcccagatatttcatggagatttttgttgctgttgtaaatgggtcttttttcccccattatgttttctagctggtctttactagtatattcaaagactgttgtttttggcatatttgctttgtaaagtcatcagactcttcataatactgcttacactgccaactaattctcctggctcctctaggcaagaagtaatatcatctgcaaataaatttgtctcattattttatctcctccttttcagtggcttttcttttattttcttccatggttattggtctattcaggtatattactctaatatcaatgttgatattttagcttttagtaaaaaatccatttcataatttcatttacatttagtaccacaatgtatataatgtactatggtgatgtttaccctgctttgtattagtggtgatattcctgcctttgttatcctgcatcgtgcattcatcatcccctttttactcggctgtaccaggtgttttgtgtttttgtgggttttttttaatttttattgctgcaatttatcaattattctgcagtttgttgttgcttttttttattaatctctgcctttatttcatcatttccttcctcatatttttcttctgattattttgttcttgttctaacatcttgaattgagagctctgttcattattttctctgtgtaataaagaacatgtttacagcgatgtattcacctccaagcatagttttggcttcatgccataaattttgatatgtactatgttcatcatcattactttttaaatagctcatcatggtgttgtttactctttttgcccaagtgttggctaagaatgtcttttcttttcccctaagaatatggattttgttcttattgcattaaacttttgtgttaatttatatttttatttccatgtagtgaaagaatgtggcctgtaccatttcttctttggggattaattgaagtcccttcagtagccaaggacctttttttttagttttctaaatatttaagaaggatgtgtgttctctgtaaggtagagaagcaagacgaatgagctcaggctctacaatcacactcttttcttagctctcctatttgttttctaggtgacttaaggcacaatacttgacctctctgagcttcagttttctcctctgtaaaatgcaaagaaaaagagtcctacctcctaaagttagtgttaggagtaaatgagttttgtaattgccattaaatcaatcttactcaattttgttattcagatctattgtatcagtgattctcaaccaaatgaattttttgtaaccaccacctcacacatacacacccaaccaagagtgtaaatcaggaactcctggagtaggatgccttttcaaaacagatagatagataatgtatagctatagatttagagttatagtaaggattttcaagtaaagagctatagagaggtctacatttaagacctatagatgtaaatatggatgtagatataggtgtataggaccaatagaaacaggaagtaaggaaggaaggaagcaaggaaggaaggaaggaaggaaggaagaagatgggggaggaagatgagagagtgagagagaaagagagaaagatgtataagacctgtagatataaaactcctgacctcaagtgatctacctgcctcagcctcccaaagtgctgggattacagtgaaaccccatctctactaaaaatacaaaaattcactgggcatggtcgtgggtgcctgtaatcccagccactcgggaggctgaggcaggagaatcacttgaacccgggaggtggaggtagcagtaagccaagatcgcgccattgcactccagcctgggcgacagagagagactccgtctcaaaagaaaaaaaaaaaacctgtagatatcaatatcagtatattcagagagtcccttattcctcatttggagaaacactgataacaagccattggtactgatgggagtgcactatgtccctgtccctgagttgcgttgggggagaaaaagcttaaggaccgctactcaacagtcttcattttgtttttctatttgatgtatcaatgattgtgaatgttgcatgaaagtatttcccattacagttatgatattttgttgtcttcttgtatatctagcaatttttgcatctgttttcctgacatatcttctctcattttctccaagtctttctcttttaagaggaagttgactcatttattttacaagtgaattatttggtctgatatctgtcatcttgtgttgttctttctgcgcttttgtttgtgttgttttgattttgcttcctcgcttttccatacatacctgacccatctctaattttcaagtttttcttgatatatttggacttttatattaatgttatagtagttattttttaaattgtggacttcttccccaagagcaaatttttgaatttgcatttgcattttgttttgttagctcattgacaatagttattatacttttctggttgtatttatccctgctggtgtctgaattccctactttagttttgggttttgtttttttttttttcagtagggcttataactgcagtactttctgtaccatgcatatatgagaatgctttccttttgacatgggatataaatgacaccttgattgtaaatcaaattacgggtcaaactttatctttcaaaactgcagtaattattccactctattccaacatttactgttacagacaaattggggtccaacgtgattctttgtccttgtaagtaacctgtgcttttctgtctatgtgattttctttttttgttgttgttaattaaaaagcccactgggaggtgttgtggtggaggtctcttctcactaattctaccttgcacttggcaaatatttcaatctgtacctcacatcttaggaaaagtgtcttctttcttaaatgattttttttttttttttttttgagacagagtctcactctgtcacccaggctggagtgtagtggtgcaatctcagctcactgcaacctctgcctcccaggctcaagagattctcctgcctcagccttccgagtagctgagactccaggtgtgctccaccatacccggctaatttttgtatgtttagtagagatggattttcaccatgttggtcaggctggtcacaaactcctgacctcaggtgatccgcccgcctcagcctcccaaagtgttgggatcacagatgtgagctacttcaccctgccttaaatgattttttttctccttcaatttctctgtcttctctttctgaaattcctgatacatgcatatggatttttttttcatctttcacgtcacttgtcatttctctcgttattttaatctctttatcctttttctgtggattctgagagaatttcccaaatttcatctcgacttcactgttcagtttttgtggaatccagctgcttgcactagcatttctcatctctttgcagcctttattgatctcagatccttcttcctctgacttcacagatgcaatgctagatttaatctcatgacaaccatgactgaacatctgctgagagttttgcctgttctttgttgtggttcacataaagtatttgctttgacttcttagagtgatctccttcctcaaaactttaacattttttcttatgtccagtgattttactatttgctctcccttgaagatggaggcccgtgtgccttcagggctgcagttgacatgggttctgtgagagctcactagggtcgttatccacatctgtcaggccaaatagaaaagttgagtttcactctgctcacatccatctggaggaggagttggagatggcagtgatatcaaagggatgctttgccttcatgagtttctttctgctttggcagctacatgttagctgggggcaataactgttagctgggacaatgactcctagccaggctcagccttctgggtcacatacacatctaagcctgccttgcaaaagctctctgctcccatattggtggcatcacatgagcttcctggaagtacaggtggacctcccagtagttccgttgtgggtcccaactctagccctcactgtagtggagatagagcctggttctctgtaatccctgcttcgtcctgagaatggggtctggggtcagcagcgcttctcaggggtccctgaggctgcaggggggcagcaggcagagtggccatgctgctgcctccacccatgttctccctgcgcttccccagaatggcaactacactaattggctgcaggtccagttggtgctgtctctcccctggcccatctgtactgcaccaagcagaagatatacctttgtcttctgctacaaaagctgtcagtctaccctggtttcctgtgcccatgcaggttccccccagtttgtgtgttattggccggcaatagtacatcctggtttgcctgggacagtcccaccataactattgatagcactttctttgactctcaaaaatgttctagtatgaacaatacattacaccatcgctctggtaatcatttcacaggatggtgggagagtgtctgggaaagaccagttgctcctagatgatcacatcatcctccttcctagaggccaatgctatttttaaaaactcagattgatgtcagttttccaagtaaaccaccagtcagccggcttggtaacagctgctgtctccatccctgtcgctccacacatccctagcagccttctcctttccggcacaggtcatttaatctttctggacctctctttccttctttattaaatgagggtactgaactctgtcatgccaacctcacagtgaccacaggtcaagttaagaccgtgaatgaaaaagctttctataaactttaaattgtaaagtgcagtaaaaatacgtgagattttatttcaggaaggcctggaatgtggaaggaattgctgcatggggtactggcagcccctccttcctggccaggattttatcttctgggcccacctgctggactcactgttctctcctccttgccccttatctcggcaggagaatcactgcccttggccacctccaatcaagttctcattaagttcagcgccaaaggcctcgcaccagccagaggcttccactttgtctaccaaggtatggaggacatggacgccggaggtaggaaggtgatctcggttcttaagggactcgtgatcgaagggacagggatctttgacctctagtctgagtccctttctcagggtgtttgggggcagttactagtttgtagggcaattccctgaaatccagttaattttatgcattcacttactcagcagacatttcttagacaagttctgtgtttaatgaggaaggaaatcagacaaaggcagccagttttttccccttccccactccacccattgtctggcatggtccagatggcactgaagagaccagcccaggcatcttacctggactcccctggagcttggttttgtctgccaggcacagtaaaggtgcggggaaaacacaggctttgaagtgccgtggacatcgatttgaatcccacctccccaccttcgagctaggctccagctacgccaggcctcagagcctgtttgctcacctgtaaggagcgggcaatcacaatgcctcactgataggatgcaaagaggcttcgggaagtagctggtaccaaccagccagttggtgttagttcccttccttattggcccagaaaggtagtttggagcatcctggttttcacccccaggtcccaacctctgcttgcccaggagaacatccacttttgtagggcccaggttctaagcatggtcctgttcattcgactctgcccaggatgagctgtgtttctctttgcaggagtgatcctatcacaggggaggccatcccgggcccatcagccattctgggcggcaggagggaggggagactgggggtcatggagggcagggccccaggcaggatcttaaggcacatggggaaaacaggacagaggcagggcaaaggccctgaaggtagaggaggaaggcccattctccttgctagggaacgtgggaccctgatgagtgaggggcgtcgttgggaaagcaaagaacaaaactgggcctaaggtctgtgggaggtccacggctctacctcccgtgctttccaggagctgtgctgtagcgctgtgtgtccaactataattcggtataacaggcatcctcctagttagccctcgagcccttccctacgggagagcatccagagcctcccagggtttcatccagacggtctttgttccagacccgttgtatgtccgtccctgggccagtttctgaggggtgaggcctcccctcagtgcccttgtcccccacagcggttcctcgaaccagcgccacgcagtgcagctctgtgccggaaccccgctatggcaagaggctgggcagtgacttctcggtgggggccatcgtccgcttcgaatgcaactccggctatgccctgcaggggtcgccagagatcgagtgcctccctgtgcctggggccttggcccaatggaatgtctcagcgcccacgtgtgtgggtgagtaaccaggacccgggcgttgagggtgcggggggcggcacgtagtcctttctctgtaggggaggcagtcagccccagtgatgccccacgacacacagcagccgcttcccaccgcatggctgaggtggggtgtcccagtcaaccccagtccccggcgctgtgggctgtgtgaagacagccggtgtactggggacggggcacacgtggagagaggagctgggcccagggccccgaacagagttgcatggggagaggccgtggagaaggcaggactggggacattagggagacacccccatggggaggaggacaaacagaggctgggggccatgagggaggagtcagcttgggaaggctcccacgggaggccacaaagcctctgacccgatggcctctcctcccagtgccgtgtggaggcaacctcacagagcgcaggggcaccatcctgtcccctggcttcccagagccgtacctcaacagcctcaactgtgtgtggaagatcgtggtccccgaaggcgctggcatccaggtaggggcaagggggcgcctcggtcgggcaggtggccgtctgctcccaggtaacagctcacaggtgacaaccacaggtgctggctggtgccaaggcctgagtcagggtgagccaggaagagacatatcagccctgtacctgcccctgcggctaaggaggctcagtccaagtgtggagatgtggctcccatgcagaaaacacagcaggttccaggccccaagagcttcagggacatgcggtgggagtcgggtaacccaggaaggaggagaggtgggcattgattggccatggccaggaggggaggctaaaagaagaaatgggcctggagctggaatctgaagtgtgggaaggattcatagaagttgttcctcaaatggctaaagattttcttaagattgtgagggttagaaggggaggcagtgctaatgagaagaaagagcaaagcacccagcacagctgaagcacagagaacccccaggcacacacctagggaaccacgcacagcatgagctgtagaagctgaactgggggcataactggtacccaggggtaagagccaggcagagggaggccccagcattggcgtcaaggcagggaagagggtcaggagcctgcaaggccaacagagaggcagcaaactgggagtccagcagacagatctgggcaggagtgggttacgggctcattgctgcaggacgtctgatgaaatcaaggcaggaaagtggggaaacccaaggaacattccagagatgaggagacagtcagtgagactgtctttccacttcctggaacttcttttccccattctctgccttgcaaaatatccactgtcttctaatcatttttttccacatctgtcttccccactggacaacgagctccttggagtcggttctgcatcttacttttattgaaagggactagcacagtgttaggcccagagtagattctcaacaaattgaattaactacgggaagggcagaaagggaaagcagagaaggagggagggacgcaggctgcctaaccaacaattcactcttctcccttcccagatccaagttgtcagttttgtgacagagcagaactgggactcgctggaagtatttgatggtgcagataacactgtaaccatgctggggagtttctcaggtaagctgggtttccaggggcttcaatttggagggtagtactagagctcatcatcatgaacattgttattatcattattattattgagatatcacttatattccatgaaattcaccattttcaagtggacacatcagtggttttcaggagattcgaaaggtcctgcaaccatcactactatctaatcccagaacattttgaccaccccaaaataaaccaggtacccatttgcactcccctccccagcccacacctagcctctagtaaccagtaatctactttctatctctctggatttgcctattccaggcatttcatataaatggaagccttctgtgtttggcttctttcacttaacgtgatgttttcaaagttcccccagtcacagtatggttcagcacttcattgtaaggacagagcatattttgtgtgtccattcatcagtcaatggcttgtttccacttttgtgctgttatgaataatgctcatgcacaagtcttggtgtgaacacacattgtcacttctcttgagtatatacctaggagtggaattgctgggtcatgtgggaactctatgtttaacttttggaggaacttcctgttttccaaagtggcaacaccattttgccattctagtaatggacttctgactgagtgtggtgtataggtgtgcccagtggccagggcaattatctgaatcttttaggcccagaactctaggtggccaagagataaagaggagtcacatgcttcagataaactgtccacactgcaggactgcccagagaataatacaggtcagagttatcctgaagatggctatgaggagacccaactcatccctcaccctcctgcgggcacatggctctgccactgctcatcttacaggaagcagattggagtttcccctccctcagccagtagagacctagccctctgaggagtgctaatttgtcatttagtgagtttcataactggggacatctgggggccttgggagcagaatgtcagcaggtagcaaaatccagaggaatggggaggaatgcaagggcctggaggagccaaacttaaatggttttccctggtgtccttgccctaggaacaaccgtgcctgcccttctgaacagcacctccaaccagctctaccttcatttctactcagatatcagcgtatctgcagctggcttccacttggagtacaaaagtgagaatccagggtcttggctggtacagggttcagggtgggacctaaaagttgctgagccccttctgagcaaggattaaactggagctgcatattgtccatcccacttaagccttcccacaaacctaggtgaagatgctaaagcccagagaaggtctgaaacctcctcaaggctgtgttctcgtccaagtgtctgttactcgaaaacctgtatgcctgttcagtatccacaccaggaatgggaaggggacttgcattggccaaggtcccagtatataattgggatgtaagaaaattgtgctttcctcccccaggtctaaaacctggcctttctaacccctagttctatgatgcgattatttttgaagttcctcctttcattggctacctcactcatcttctaccagatttctcactgcaggctcaaacccttatatcctggcttctggcatccctaagtggtcactaccaaatactcttcacagagaaagatttgtggatgtgccttctggggaacaaagaaagaggtttctagggaaactgcttgcatactgggactgcctgccctaccccctttctccactgggtacaggaaagaataggtaggcagcagcattttttacacttttattcggcaaatatttattgagcatttacaacatgccaggcactgtgctgggttttgccacgattgggaaagattaagatgggtcagtcaaagtccactaaagagaggtagacacatagacagagaggtgcatgacagcattacaggtgctctcatggatggctctagatggtagagaaatggttcaagggagagaatggttgtgggcgggtggagatgcaaatgttgtgaagaaacattgagcacctgcaatgtgccccgccctgtgttaggtccccgcagtacaaaggtcaataagacaaggcccctgccttcaaaagcacaaaatctagaaggagagatggacatgggcacagtcattttagtgaaacctaagaaagtgcagaggaaaggagagatgctaagaaagtacaaaggaaaggagctaaagctagccatgtaaggccttgcagaaggggatgcctgagttaagtttgcaatgagaagtgaaaaatgcaggaaggcatggttggctagaccatctgcgacagcatgggcctgtgcagaaagaaggcccactgggtgctagatgtctgattgggtcagaactgtgttatgcacatgcccatctgggtctgtgaaacaaatgaacttcatccagctgcttcagaaagaattaaacaggtcccaggatgctcatcacctgaaagaactgaagcatgcacctggaaaaaaaaaaaaaaaaaaaaaaaagacccaggacagctagaagcagaccctgcagggtaaagggtaggacagggacctctgagactccttccagcagatatgtaaggcttcactcccctggtggagtgaaatatcctgggtttctcgactaaatcacatttttttcctttcatcccttcttctctgttctctccagttttctctatccaatattttgagctcttaaatgttccctagaatcttctctgttctttcttcttccaaagatacattttctttgtaaatcactttgccattctactgcctcattcccaggaaaaaaatccacctcttctcaattttcttcgtccaaggggactggcagttttcccagtagctgacatttcatgtgttgtcccctcatgatgggaagagctacggagaaacagagcttcccactggtatttggagactggaattcctaggagccagggccctgtagttatattttattttgtaggataatctacaaagagctcacagacaatagagaattaactgctattgtacaggcaaatggttttgaagggtactgaaaagtcacatccactgctatgattcataattgtttatttaatttaaatggaaatggagcaatatgctttcaaaagtaataaattacatatgataaaaaataatttttcctttgttgtaagcatggcttaaataaaatcaatctgtgtagcataagataagttagaatggacttttctatatccccctccatttttctcttcagcctcatctttctcccattccatttttcttcctaccacgcttttttgtcctcattctgctcttctctccatcactggacagtaagtaggtctttccaataagtaggtctagttagttgcaactactgcactaaatagtgagttttgttctacttggagtgtggagaggaatggggagaaatagacaagatgacaagtgaaacacttgaaactcagtttgatgggttttttttaatgcttgtccttggggtcttttgtctcagctgctgagagttttggacaaggctcaaagagttttcatttccaaatatcacactcatatcttaaaagcacatgtgggacaggaattgcctgggaaaagtgtgaggaatttccagagtgatagcaacgttctgtggttttgacaggtgtttgggttacaaaggtacaggcatttgtcaaaactcagcacatgtacactcaagattatgatgtttacttgattattaccatgttcatgcacagtttttgcattttgttatatgtgagtttccctcagagggaaaaaaagcacatgtagttatcagagtctcatctctgaatgtggcatgaggactcattagctgctgcctgggaagatgggttggtggctgatggtctaggctgattggtcctttcctgtttcttttccatgagcccctagctgcctgtgggcactggatacacgtgggctcctcagggagcctgtatcccccaaaggagcctgtatcccccaagggagcctccagaagggccaaggctgccatctcccacattctctgggccatgccacccagatacggtctgccatccttccatttctgccgccttggttaggaagaccactttagagtttacagctacctctccgcctcctcatgagtcttctggcccttgcccctggacaagtgccctccaagtccagtccagcaagacacagaaactttttagtgcatgtgaagtgcctgcacctgtacatggactcctgcagagcacaggagaggcaggaagccccctgtctggaaatgctacactcccatttgctgtgtgggaggcagccagggagggattcaaagcaggatgaggactgttttaggaggggaggcagggagagcaggggacagggtcagacatgggctcatgtggcctcagggcttggcttctgcttggccgacctggggtcagactgggcttggtctgaatcctgggtctgtggcttactaaggaaatgtttcagtgcctcctatggcctgtgtcctcatctgtgaaatgggatgtgaagacctgcttgaagggtatgaggggataccctcaccaatgggccccagccttgctcatggaagtgctcagtgagcacttctcttgggaagatggtatggactggcagaaaggaggaggaggaagattaagctgggtgctctagcaaaacattgtgtgcaatgccaggcatgtaatgaggaataaatgagtgcaggttgaatttgaaaagtcaagaaaggagactgaaggaggagcatttgagatcctgtggaggtgatcttgaaagaggactaggccaagatcatgaaagtccttagaacatcaggatgagaaagttggattccatattataggccatgaggacctgcttcaaatcactgagcaaggaggtcccacaattcaaggagagattttaagcaacacgagttgcctgtgagtgcagggtggactggactagcagtggcttggggtaggggatgaaggagggttttagcggggccagtgctcagtgaggccagagctgaacacgggagttgaagtgtgagaggccaccagtgctgctcccagaaaggggctggcctgaccttgaaaacacaacaggagaaataaggcagtggagagtcttatctgctaacacacttttctcagagtcttggaaagtcggactctaactgagcccctgagcatcgctgatgtgtccctccctgctctccttccttcttgaccttcttttccctctctctctctctgtctctctgtcttagcccacaggatctgtcttcttagggtaaggaagacagaggggagttaagagtaagaagcaggagggatgtgggaggagagcatgcagagaagtctccctagctaagccccctagctaagagctcagtgagtggacaggacagccagcatcccctgggatcacacccaccttctcaaggagctttggtctgttgagcctccgtgccatgtaaatatactctttttctctgtgtgctgcaaggtgaagagagttgggaagaactagcctacaggatgagagaaagcacaaattagaagcaccccttctccctgccaccagcatctcaccccagcctaccgccacgttgacctgctgggctagtccattctcctttccttctgtctctgtcttgtctagcggtgggcctgagcagttgtccggaacctgctgtgcccagtaacggggtgaagactggcgagcgctacttggtgaatgatgtggtgtctttccagtgtgagccgggatatgccctccaggtacctcccctgacaccctagagcaggaaacaggtgtcccctgagatgtggttggccagccttacaccagcagagctacagtcaccaaagaacagggagcagcccccaggtcccccgggtaccattatcctctcctggagctgttcatgcaaaagataaactctgctgactttaacaatttggcacaagccaacctccaatgtgttcctgcaaagttgggtttgattcggctttagggaaatttaatttccctttgaaggccatcagggaatttagtaattaaaggactctcacaaggaaacctctaataatgagaattctttagtaatcgttgttaataattgtccttccccaaattctctctccctctacctcactcccatcccacagtggatctgtgtgtctttgtgtatcttgttccttaacatgaggcccctgaaccagacccctgtacagcccctggttgtacatacaattgtgcccacggggacagctagcccatccctgttcctgattcctccagggccacgcccacatctcctgcatgcccggaacagtgcggcgatggaactaccctcctccactctgtattggtaagacagcccagactttacaattcattccaaccaattttctctcagggatcttagctcagtagtgtatcattgagttcaagttcaaatcagaagaaagtttgatattctggatttgttccaagtcagtcattttaaactgatgtttttataatctctaactcccatttaatgcagtcatcacttttggaaactctgccccaccaaatgaaaagttacaggaggtctgcccatttgaaaacatgatgatgaccgttctggctctagttaatcaaccagatcccagatggaatttctaggcactttgggcttcccccgtgacttcttgtgggacagacagacaaatctaataaagaaatgatgaggttggccgggtgcagtggctcatgcctgtaatcccagcactttgggaggccgagtcaggcggatcacttgaagtcaggagttcgagaccagcctggccaacatggtgaaaccccatctctactaaaaatacaaaaattaggcagatgtggtggcacacacttgtaatctcagctactcaggaggctgaggcaggagaatcacttgaacccaggaggcggaggttgcagtgagctgagactgcaccactgtactccagcctgggtgatagagcacaactccgtcccaaaaaaaaaacgaaagacaagaaaaaaggaaaagaaatgctgagggctacgtgcgaaacaaggacttggcttcgtcccttaccctgtgctacggcagtgatgagcagatcagcagacacaagaaaagacagcatctccccttcagaagcttctggtccagttaggcaaagaagaaaggcacatttatttaatatctactatatgctaggcatggagcttcatatttcctcagatcagccctgcaggggaggtaccattaccctcaatttgcaaacaggaaatctcagtcttttaggattaaaaaggaagtggcagagtcaggaacggaaacctaaggttctctggtgcccagtcgattgtgaggtgcccctcaaggctgaccttggggcagggaggtaagggagtgacactcaagcacgatggcatttctcttctgtggtttcaccacggtgtagggcataggcatctgtggagcaggtcagaaatgtgaacggtcagcccaaggcactttcccccattagagactacaaagaccttgctatggaaaccattcatttaacggcagctgctgttcattaggggtttacaacatgtgccagccttgtcccaagtaaatgcagtcctttctgatatgacctcacaacaaccccattagaagggtgctgtcactagttccattttacagttgtgggaaaccgagttctggagggttttgaacttgcccacggtcccatcggaagtgaaggtgggattgtgacacaggcagtcgaggctggagcctactctgcactgttttcgggtctgtttgccaagctgtcctctccccagaaagcacttgcctggacctgccaatccctgttctatgatcctttccctgggtctctaagactggctagcccctttctgttcacacaaccttttcctaataagatgcaaaagaaaagaactgatgtcaactgaccagactgcaggggtgccccagccctgcatcctcagatgactctgaattcaccttgattggcatatcagatgtccctaagcccctgggtcactcagacagcctggtggttggctcctgtgggatgctgatcaccgtcacttttctgaggatgggctcgtggtgagcctcccctgccgcccaccctgccccctgaaatatatatttgagaagagcctggcatggtgccgggcacagagtggggacttgatgcatgccagtccccttccttcatcctttttctgcagtcttgaaagagtagattgggcagtgaggagagggagatttgggggatacggtaagaaatggttggacttcttttggcacagaacttcctcacttttcctggacatcctcaccagggaactgacctgtgaagggcatgttcaaggtcaagagtccataacttgggtttgtggacttttaggctgtcctagaatgtacctcccttcctgaatgtacatattgaatgttgcccgtgggcttagtcttttaagaagattcctttggattctcaaggggctatatgactcatgaaagcttaaaaactgctgcttgaagggagcttccaaacattggcagggccctgtacaccccttgatgttgtcctgaccctctgtctcatctcattgtcacagcacagtgtgggggaacagtggaggagatggagggggtgatcctgagccccggcttcccaggcaactaccccagtaacatggactgctcctggaaaatagcactgcccgtgggctttggtaagtctctgcagcccccagaggagacaggcttcaagcccagacccttgagcttaaaactactgtccgccaaaatctcttagcacaaacttgggccaagtctgtttagtactctgcctctctgttttctcatctgttgacctcttgtacaattgtgaagaccaattaagaatggcagagattaacatataggggggagaaaaatcttaggggttgccattattattatttgagccataaactaaaatccaggaatgtggaatgagaaattactcggattatacctaactaacactgtatcacttgatattaaaaataaaaaataaaaataaattactcagggacttaaaaaaaaaggcgggggtggggcggaaatctgtcgtacagagactggacctcaagttgtacttttaaccccagtgtctaatttatcatcctaattaaattgagccaaatcaatgagaaatcgagtttgcattcttcttcgtatgcacattctagctggcctagagactgggaaggttgtttttttggttttggggggttatttttgttttgttttgtttttggagctggagtatgctaggcatgggaggttgtcagggtgtggaggacatcagtgtgggtacaaaatgtaattgctggtgatccacatattatgcactgggaatatcatttaacccaaatgtctctgttgaagggatgagggctttgtgctgacatggaactgatgggccgtacgcacgggtcatcttgcccaagccattgcactgcttctaggaatgaaatgtcccaaggggattatgcctgcatagccctgaatgccagtctgtgagcctcagaaatgaagatctcccattttatccttcattattcagcctggagtgtgattagagattagggaaggggcttttgggagaaagcagtctaactggccttctctaaatccggttggaggggaggagagagcttggtggccctctgaaagatgttattttctgttcagtaccatcttctgaaggaaactgggtgttcagtaccatcttctgaaggaaactgggagcaaagcgatgacgccctcggcagtcttaggagactccagactttgagacattaagaggatctgggagaccctgtacctctgcatccagtcttgaggcagaaccaagatgatagaaggtggggagggcaacatccaaaggcaaacagaagtttgaatgaggtggctttccctgtaagtccttatgttcagccaccattttcacctctaaattctgggtgctaattcaggtttcagggaagaagctactgctgggtccagttgcaaaggcccgggatcccttgctttcaagttaatgttggattctgccgaggtccctaacttggtacctggtctcagcgtgtaaagagctgctgcagctacatgctgctccactagatggcggtcacagtccagttctttccttggagttcaagtcagaaattccgccatccttaaagagccccttctgtgggcctgcagcccgcagggctcctatatgaggggacgatgcctgggcagtggaatggaaagcacaggctcctcagataatgtatacaaagatgtcatcacagcctaacacggtgaaaacccgtctctactaaaatacaaaaaattagctgggcctggtggcgggtgcctgtagtcccagctacttgggaggctgaggcaggagaatggtgtgaacccgggaggcggagcttgcagtgagccaagatcgtgccactgcactccagcccgggcgaccgaacaagactctgtctcaaaaaaaaaaaaaaaaaccatcacaaaattatctgcaacttggaaacaatctgcatgttcatgagttggggagtgaactgtatggttggataattcataaaatggaattaacatgcagttaaaatgaatgaactatatttttgtatattaacatggatagaccttgaaaaacacaatattatgtaaaaaactgtatgtacagtataatatcatttatgtaaatcttgaaaacacataaacccagatacatatttaagaatccaaaaccatgaactggaaggatagcttccaaattcatgtgattgcttctgtggagggcaggaaaggaatggaacagggcaggagatgaaagatcttcaacattaagtgtcgagtctttattttattctttaaatgatcagatgcaaaaagaattatactcgtgcttattctgagcttatttgatagcacagataagccaattttaaaaatgaaaatccatctataatctcatcgtgcagcgataatcactaatggcttagtctcccagcgttaccatgtaagtctcatgaagacaaggaccttcttgatcttgctcatcctgtacaatgcctagcacagccctgatgtacagcaaatgcccagcaaatattcctagcaggcaaattaatattcttccatgttttataatacaaaaattagaattgtatacagcatactatttgtcatctgatttttacaattatcaatgcaatatgggctttttcctatgctcagtaaatatatttcttcaataacattttccatggtgatctaattttgaaaaatcttatcagtaaacaaacataaatgttcccaccttcgttcttgaaagagtatattactatgtacattaagaacttaattagatttatttaacctgtcaggttgctagaatgtcttgattaactcactaagatcccaaagtagaaactttatttggcttctttatggaacagaggggacaatgtatacttctaagccctacgtttctgaattatcataagagttctagaaaacagcagtattgaaggtcttgtcttttgattaagtattgggggtgttatttttaaatgaaaagtttattctagcaaaactatctttatgctgatattggacatatgaatcataaatttaaacaagtgttgaccctgaactttgttttcaacaaaataaaatgaactccagtggagctctgaaatgactgatgcctttatttttgaatgaataatacacttttaagttcagccctgtcaaagacaagagacttggctggacgggcaattcccaaagccagttctaggagccttggctgggtgggaaatcagtagcagggactcatggctctggcaggagctgctttcatgaggcagcacacttgaggcaggactgtgttgctttgggcactgtctgcctctgtcttgctcccaggagctcacatccagttcctgaacttctccaccgagcccaaccacgactacatagaaatccggaatggcccctatgagaccagccgcatgatgggaagattcagtggaagcgagcttccaagctccctcctctccacgtcccacgagaccaccgtgtatttccacagcgaccactcccagaatcggccaggattcaagctggagtatcagggtaaggacaaggagcaccgcctttgcttctctgtctatctccatctcttgccccagccacccaccttcccagccttccatgtgggggaaaacagaacaccataaggggtgggttgcggtggcaggcccagtcagggaagcttccttttggtggcagatctctccggaccccatttgtcagcttaagttctcccacagccttttcaagagtggcaggcccaacagcaccctctgaggctcccactctgtacagctgtccctgggcaagtggcccatctgtgccttctcaggtgtcccaaactgtccagccagtcacttcccctcgggcttgataaactgaattacttccccagggtccttccctgcacatcaagcccaattactctcagcaaagctcttcctatgacaggatggaggattctagtaacagtcccaagggcacctctaagccttgcacaaggagcaggttttcctgtgaggcccaaccacactcaccacagctccacctctctgaagtgggatcccgtgaccggccccactcattctgggacattccctggaaagagccccatctacactcaggttcccctgtgttgtagaccatccatcacctgtggatgtggagattgtgcccaacctgtgcagctgtacatggtcctgagtaagcccaacctcgcccttggatgcttcccttattgtgactgaccgaagcatttgttctaatccctttcccagattcttccactgaatttttaaaaatatttttagattttttttccaatactaattcatgtttgtaaaaaaaaaaaaaaaaatctaaacactgtagataattttgtgagcacattgtgttagctcaggctgctgtaacaaaataccataagccaagtgccttacaaacagcagaaatttatttctcacagttctgagggctaggaagtccaagatcacagtgccagcagattccgtgtctggtgaagacccactttctagttcatagacagtatcttctcactgcgtcctcacatggtggaaggggcaaaagagctctctcaggcctcttttataagggaactaatcccatttaggagggtgggccaccaaatgccctgcctccaaataccctcacatgagggattaggtttcaacatagggatttgatgggacagaaatattcaggccctaacacccgtcacaggaagtcaaaatcctcccataatcccatcctgtcactaccctatgcagagatacacactttcaacaattcaatatgtattccccgcttttctcggtatatatattgctgtagctatatttttagccaaaattggatcgtactatagttttccaattttgttttttaaagttaatttttaattacacaaacaatttacaaacatatttatcttttaaaaaaagaaaaatacaagaaagaaattaaaaccttacaagtaaggccaaagctctctttgtctatagcctccaaacccaggattattctccagaaacggctactattgtttagttgtgacctttccaggcctggatatatgtatgctacatgtacctgtgaaaaatatgtaacattttataaaattttttgaccacgttttctatataaatagtaccatcctatatgcagctttctgagagttgacttctttattctggaaataatatggtggggatggagctcctcccttgccagagaagaatactgagggggtactgggcttctcatttagggaaagccttaaagggcatcccacgaggtgggtgcaactgaatcagttctgcaggagacttcagggttccggggtccatctcagggaaagctttggtaagtgcggctgggcttgtcatctagagggagcctcaggagaagctgggccttgcacccagacagagccacttcactggtgttagcacagctgccacacccagggaaggtgtgtgcaggctcatcacagaggccagccttgcccaaggatgtctgtgcctattatctgggaggtgtgtacctgtcaaacaggtcatgacgcgtcggatggccgtgatgtcacaggagggacttggtcccaaatatgtcctctcagagacagatgcaacgccttcccccaaggctttcctgtgtcttagtttgttagggctgccataagaaagtaccacaaactgggtggcttaaacaacggaaacttactgtccaatggctctggggctggatggtcaagatcaaggtgtcagcagagttggttccttctgaggcccatgagggagactctgtccgggcccctcccctggcttctggtagttcatgacaatcttggcattctcagctcttagaagtatcaccccgacctctggcttcatcttcacatggtgctcttcatgtgcctctgtctccaaattcccaccttctataaagacaccagtcatattggatcagagcccaccctagtgacctcattttaatttccataagtttggtaaagatcctgtctatttcccataaggtcatattcacaaggagtgaagtcttcagcatatgaattttgggagacatatttcagccccttgcacccctcccaggcccaagtgctctctccctgagaccttccttctcggataaatataaggaatggcagtgccaccattgtgccagggacagctgccctgggcccaccccgtgcactgtgccttcaccctagacaatgggcacggtcctgccactgaatccctgtgatgggaccagccactcgctgtgctccccgtgtgatgagcccacttgtccttgtaaaggttgtgcctgtgtgaccgcctcagattctccattgactccctcgacagaagaggcctaactacccccacagagccctggccttgggctcactcgcccctgattccccagcccccatctttggaaatgctcccactatggccaccctgcacaaggggccccgctgtccccctgaggtttcctggacgacaagccaacattcgggactagtgtccctccctgggatgggcctgtctctcccactgaggtttgcagcctccacaggcccagtcctcctctgataactttccctgcgtagggaggccagggggcagcgagttgccttcagacacccagctcctccaccaggagttggcccaacatgtgagaggcacagcgacatccaatggggcttccaccctataatgggccccctcctcccacaagcatgtgaccttcaggacttgcctggatgttccccttcagtcccaggcacagccactccctcagcgttcacctgtctgccacagtcccaaggactcctgtggagccacacatggtgccggggcacctgctcccctcagacttgggctccacccctattaaggcttctcgtttggggcgatcccaacctcttgggctaggttgcctctagggccagaggcctaagtattcccacagaggcctcatcatttgtgataggcccaaataactctccctgaccataagcccacactctctgtttacaccttcctccgccgtacggagcggcacctcgtaagcaagctctgaccactctccccaggtttttcctctggggaaaaacccagcttcaatgaacgagccatttgtccccactgaggctgtttctgtcagacccagctctctatggcccctcgactttccttagaagtccaactctttactctttctcaaaattcctccaactgatactctgcacttcccatgctagggtcttcttttctcttctttaagtaaagattcccatcaagttcttagtagcagcataagcaactcctagccaggcctcccggtccgacatgcttaatgtgttccatgacaatttctcaggagggttctgtttataaagaacttagcaaaatggctaagatgtacaattgtccccaaatgctaggcatcatcattattaatgttttaaaataatggcattttgcttgaaattgtatctacctgattatggcactttgtttggaagtgtgttcccactgtcaccaggtgtgtccctttagaacaaacccacttgctttcctgaggagtccttctttggggaagttcatccttcctcctcttagggtttatttctgccttatatggccaacctctccctttgaagcttcttgcaggggaacaggctctgaggtttctctcagtgttgaggtactctcactgaagtttctgtctttttgaagagcctagatccttccactggagatgattcctgtaggagaggcccagctgctctcatcaaggctgctcctggcttcccacacacagccactcccttccttctctccccgtctctgagtccacgtggctaccctgagcctttctgtaaagacccaacccatcccattgggttgcctccctgggcaaaaggccccctgcttccgctgagactttcgttgccaaacggcccaaacccccgtgctgcagggccaggcctgtcctggggctaagcagccaccccacccatgtggttgctcagtttttggcacacccaattacctcaatgatttcccagggaaacctgcccagttcctccccctgagacttccctgtgaggtactgaatggaaacataacacagccacgtgagtgctcaggaaatgttatcttcaagatccgcgttattgatgttgttattacgtatgagaaacacatgtacttctaagaagcatctatccagtcccaactacttccactgaggattcccactgtaggaacgttctgtctcctcccgctgccaatttcctgagtggagtgggcgcaattactgccacgaaggctgttctgtgtcctgtggacccaattcatcaaaggccttgctcaggaatccctcagcagcctctccccaatggactggcctcagctgcttccatggaggcatctcctgtggagtcaggccacccactctcatggaaacagcttccctgccctttggagggacttgctttgtgacagccacacgtcccttagcccagctactccctctgaaaagcttctctccttgccacagatttgacttactcccaccagatttcttccttcctgagaggttttgatctctcggagttggaaagaaccaactcaactcctcccgtcgccgcttcctatgtctgggatcttgatcctggttgtgaaggttcaatgagataagcaacatgaaaggagttaggctggtgcctggcccccagtggcactcagtgaatagaggttcaattgagcaatgtcttccttgagcctccttttcctacggaattactaataatagatactatttactgagctttcaccatgtgccagtactgtggaaagagctatgtatgtgttatcctacttagtcctcaaaataatcattctatacacaggaaaactgaggcgtacacaagttaaattacttacccaaagccaatgacttgtacatgacaaaggtccatctgagtccaaatcttgaggcttcaccactatgctttctgccgctcctattttctggtcagagagaataaagtgaccttttctccggatcttttccagcctatgaacttcaagagtgcccagacccagagccctttgccaatggcattgtgaggggagctggctacaacgtgggacaatcagtgaccttcgagtgcctcccggggtatcaattgactggccaccctgtcctcacgtgtcaacatggcaccaaccggaactgggaccaccccctgcccaagtgtgaaggtatgtcgctccctcatccccagcagttcttcctggggtactcgtggagactggtccagagcaatcccatgttccacctacctgctctgtgggatctccagggctggaggtccaggcaaactgtggtccatcctgttttcacatggtgtggcccagcctctccagggagagggtcctggtgacagggctccgggccagcactagggaggacctggaggagatgtgggccacagccaagaggaagacacacccagcccttgggaagatccaccctgacagactggaggactcccattggaagggaaggctccatgtgagggagtgggagcccagtggtatgctgagagctagagaggtagagttaatccaggcacctgcccaaagggagaagagcatgaagcctctttataagaactctcttgctcccctcttcatcttccccctccctgctccattatactctccttctacacagggctggagagacctgagttgatctatcagggagctggaggtggcactttcttgggtcttcttccttacccagaaccaggaaggaaggtgaccaagagcttgtgctgcctccaccctcatctgcacacttcagttccatttgccttccctcttcattctggcatcccatcattttcctggaggagtggcagaaatttgtcttgaaaaaggaagccttagcaagggcagtaatccaggaaagagtgccccagctctaggatcagatcaccccaggctccaactcaaacccctttgcctctctaagcttcaggttcttcctcagtaaagtgggacttctcatctttatttcacaagagctggaggacttcacagatggctcactctcagactcaaactctcagtttaactctcgatggaaagaggaccttgtttgcgaaactgagccgttctggtgttggaatgtaaaaccatgatttctaaaactattatagcctcagttagtttttcagattttcagagctctgctctgcgtaaccagttggtcattccgcaattgttggcccatcacgtgctgtgcaacaagcctcatcctgggctttcttccattctcacaccttgtttgtctttttgtggcatcacaggagagagaaaagagcagcgctttctcagtctgctagcttgagccagaagctgttcttcctcctcagaagccttcttcccttggcttctctgacaccatactctcttgctttctcccatgtccctaatggcaaattttaagccccttaatatagcacacatgacccttaggttagggcctagtccctgctgacctcccatattctccagtcttgcagattttatgttccagcctaagctgaaatactttgttttccaatgtgccatgttttcttgcctctgggtcttagcatatgttgttcctttcccatacagcattcctctctcttaccttgcctacttaaccctagtcatcccttaggtctgagtataaatatgaattctagaaggagtcctttcttactctcacaaaaccagatgcagggctcccccaaacacccccgtggcattcatgatgatgacatggtccagcctgtgctacagatgctggtgtgtttggctgtgtcccagtggtgtgtgtgcctgggacagaactagagtaccttgttccccactgtctcccaggccatggctggcacccaggagatattcagcttatgtagcagggatggcgtgtacctgtgcaccactttcaggatgtacgtgcattcacaggacccctggcctctgcttggaatctgttgggattctctctcctcagtctggtctgccccaaccagatgtctgcttgatgccccatgtcagctacaacactcattattctggaccatggtgtttggggatttttgtccaccatccccatctattttcctccatggtgactgattctgaataccatgaagatgtcaaagtcttttcatcctcctgcctgaggcctaaatcagtgagactaaaattgagtattgcttttggggaacaggaagataaggagagaggatcttatctacatagcaaatgcgtcctcttccagggcctgggctgaacattttgcctgcatcgtttcacctcatcaccaccacaatcctatgggggaggtattcttagttccattttacaggtgaggaaatggagactcagggaggctaaactacttatctaagactatctgctcaatacatcgttcagctatgatttgaacccaaccttagcctcaccccaggaaccctcaactcgaagtctagaccacaagtaccactctagaaagagcagatcaaagaggaagaaagaaagactttcctaatttcttagctcttcccagcaaaagcactgcagctctgaccctaacgtctgctccctcccattcctgggaagggagaggggacagcttcagggcatcctttcttcttggcagttctcttcataagaaagagaaagagggaggctgaggcagacccacagaggggcctgcagtgatgattgagagccagccagggtgttctgtgtggggactggtgggtagaaccaggtgcagccatcctcagcttggcctccccttccgcatcccacccaacctccctgacaggatgattagttctgggagctgggatttcctcaggaaggcatctgaattctcaggtgggtaccgaggccctgcacttacgtttgtgttccctccctggcagtcccttgtggcgggaacatcacttcttccaacggcactgtgtactccccggggttccctagcccgtactccagctcccaggactgtgtctggctgatcaccgtgcccattggccatggcgtccgcctcaacctcagcctgctgcagacagagccctctggagatttcatcaccatctggtaggccaggtgccatgtcaacagccaattagaaaggagcattactggggttctacactgggttaccagtcagttacctattggtttagaaaaaccaagaggtgaatggtttttaaaggctgtcagcctcctgggtttcaaataaacatagtggaatggggctcagctccaactggccattatggctccttaaagggagaggaatgggagggcagtggctcccagcctgcaaccctgccagggccagggaaagtaccagtgggtgtgttaatgggagtaggtgtgggtacacagactttcctcggtatttccagagttcaaaccaacattctacatgtacctgggctaagccacccagactaatggaagagatttgaggtggaattttgtgatgtcccgttggtcatctggtgctgagccagcactttccagcagaactttctgcagtgatggaactgttctatgtctatgctgcccaatatggtagccactggctacagagtacttggatatgactgagggtctgatttttaaatgttatttaatcttgataatttaaatgtaaatagccatgtgtggctggcagtggctgaattggacagctcagctctgagttatgtagttatatacaacaagagttaattttacattgggaatacaaattagcatttgatatgtgcagtttcctggacagtttcttcccaaaccactggatctttggaagagcaaataattttaaaattcctttgtttggtggttactgccattctgagaatcatcggggttaggggaattctcttccaaaattcccagggcttggataactgtaaccagactgccctgggttaatttccagcatgatttccaagcaatggctaggaacagacaggaggggttagataaggtttcagggaagaaatcttttgtcccaaaaggcattgtgggtatactctttgcttggaagacaaggcaatggagcatggagccgatatgcatagcagcaggttttcacaccagctcctcagccctgtcctagtgctgccccagactgagaggacctgtggtaagacccacacccctgctccatggagcctaaatttgcccaggagcccattgggctggtgaagaatcaggtggatgaggaatcagtgtgagcttcaccaattctatcaactatgttgggagaccaagttgggaacggttgggagaggtatttagggcatggtgtggggaagtgttggtacaaaaagaatcatagcctcccactccaggtctgtcttaaggccactgatggcaccaagtggagcaggcagccatggtgactagtgacatgccaggaccttgtttcctgtgtacagggatgggccacagcaaacagcaccacggctcggcgtcttcacccggagcatggccaagaaaacagtgcagagttcatccaaccaggtcctgctcaagttccaccgtgatgcagccacaggggggatcttcgccatagctttctccggtcagtatggaagcctggcctggtgggaagggccaggctttcaagtcaaggctgagcttgactcccgtctccaccatttgcggatcatgtgaccttgagtgagttgtataacctcttggagcctcagtgtcttcagagttatgagaattaaatgtattagcctatgtgagagctctcagtgcagggttctgtaaatgcaagttttcctcctattccacactgccagggcagagaggcacagaagcccaaaccttggtgccaagtccactcattcacatcaactcactggctggatcatccctatacctgtgccccagcttatcccttagcactttctagcgggttctccttctccaaagggatctagggcttctgctgacctctcaaggagcactgtgtttttgtgcacaaatgaagatattgtgattttgagtaggaagagtatgaacaattcagagtaggtatgcctttattggcagcctgttttcttctacaagtcccaagttagggatctggatatttcctcatttttattatagtggaattgcctagagaaacttatagaatgttctctgtggacttgtgcctatctatggaatgatgcacatatttgcaatttacagatcactgcagatattttaaccagaaatcaggaaagctggattttactcccagctccaccttgggccagctgtgtaaaaccttgcacaggtcccttccccacttgagacttcagtttcttcacctgtagaattaccggcttggagtttgtgacctgtaagaattctgtgaggtagtaaggcaaatattctaacccccactttacaaatgaagaaatagggcaaaggaaggctcaagtacttgcccaaaaccatgtggatagaactggaaacagaacccagcctccgcagtatctgctgcagtatctgctacagtatctgctctggtgtgactatacagtgttattacatcatgcgtgcacttgcagaaacacactaagactgtgaaagaggtagtgaaagaaacaggaagcaacagagagaaacaaggatgtaaagaacctaagcagctgtgactgccattcccaggagctatcgtccagggtgagtgcaatgtgggaatgagactccgccctctccatctgctcagttcccatgcccctctcattgggcacacctgtcgctccactaatgaaatccaggctttaaggctctgtcattttgacttgtgactttcccatagagtgataagagtatggacttcagagtcacagacgggttcaaaccttggctctgacacatgcaagctatgtaactttgtctgtcatttcacccttctgagcctcaatgttattatgcacaaaataggaatcatataagtacctaacctcctaaagttaaatgaaacaatgcttggaaatccttagctccaggcacagagtataaaaggtgatcaataaattatagttctaatagtcatcattgtcatgattatttttattatatctagatattgacaggcttggtgtaaagttaccttggtggtaggccaggtctcttgttcctgttcctgagccttcacctgtaccagaaccaggcaaaggaggctcagcacagccccaggccatccttatttccaagttcttctcagcaaggtctttcattgagagtgcttgcctaagggcacaatgctccttctgcctctcagatgagacacaaggcccttgctatggtgtaaatgcttaggcccccctagaattcatatgctgacatcctaacccccaaggtgatggtattaggaggtggggccttgggaggcaattaggtcagacaacagagccctcatgaatgggattagtgcctttataaaagagacccacagaatcaccacactgaagccttctcagtggaaagagctaagaagcacaggaaacacagaggccgaggtgggcggatcgcctgaggtgaggagttcaagaccagcctgaccaacatggagaaaccctgtctctactaaaaatacaaaattagatgggcgtggtggcgcatgcctgtaatcccagctactcaggaggctgaggcagaagaatcggttgaacctgggaggcggaggttgcagtgagccaagatcacgccattgcactccagcctgggcaacaagtgtgaaactccatctcaaaaaaaaaaaaaaaaaaaaaaacacaggaaactcatttgctgcttttaccacatgaggacacagcataaagacagctgtccatgaaccagtaagaaggcccataccagacatcaaaattgccagtcccttgaacttggacttcccagcctctagaactgtgataaataaatttctgttgtttagaagtcacccagtctatggtaatttgttacagcagcctgaatggattaagacagccattcagtcccagctcagaccagagcccaaggcttcactgaccacaggagcaggcaagggtctggggcaagagaggaggaactgctgtgcccagatcggcaggctcaagtgggagaggcactggactaggggatgagtgagcaagagaggcacattccatgcctcatagaacttttggtaagttgtggaatatatcctacatataaaaatgtatgtaacatgtatgtgcagtttaaagagtaataaaatgaacaccatcattgagcctaagaaaaagaacacctaagcctttgaagctctgttccttcctcagcacattcccctaccctaccctgagagttaaccatgatcctgtacttttggttaatattcattgcttttctttttattttactccatatgtgagtctccaaaaatatgttgtttaattttgcatgttatttctgttatgtaaagacaatcattctataaatgttcttctgtgacctgctcttctcactcaaaattaagtttttgaaattcatgttgatgcacgtgactgcacttaactcatttttcaatgctgtatgatttcattgcatgaaaatatagcaatttatttagtctactgttaacacttaagttgtttcatttcaagcaataagaacattgttgcttattccttattgtgaacatgtacaagggtttctcttgagtacatgtctgtgtggagttgtgaggttgtaaatatccacatatttagtttcactaggtaatgctcaatttatcttagaagcagttataaccatttacactcttcccagcaactgaagtagagttccttttgctgtacatccttgcaaacactgggttttagcagactttacatttctaccagtctggtaggtgcatgagatggcatttcacttgtatgcttgtgatgaggcagagcatcctttcctgtgttactgagtgttcatgcttcctgctctgtgaaatgtctgctccccagacagctttcctgctccaaggagaaagagataatgagtaaccaagaggacaaaatttttgcaaattgtaacaaatgcttcgaaagacataaaaggataagatagcaaacaaaaagttgtagaattccatgcaaagtaattgtggaaaacctaagagaggatattcaagataagaactaaagaaaaaaaaaggagctagacttgcaaaaagtggacagtggaagggagtgggggaaagaatttttgcctttctccaggcaagcagccctaaggaactttcttttcatatgaggatcaataagaaaaaggaaaaataccttaaggagacctgtgaaagattttataacattaaaagttagaacatgaagtttgaattacagagaaaaatgcccttgaaaaaaaaacatggtttaggaactagaagtaatagaaataaattttgggaagcatcttcttctaatataagtctagataacatggactccaaataacaggtgaaatgttcagacagcacacaaatgaaaagaaagatctggccaagagataaataaaacgaaagctaaatctcttcccttccccacttgaataattcagtcctaaagctgtgagatgggacaaagcaaagacatctgatatggtttggctgtgtccccacccaaatctcatcttgaattgtagttcccataatccccatatgtcatgggagggaccaggtggagataattgaatcatgggggccagtttcctccatcctgttctcatgatagtgagttagttctcacgagatctggtggttttataaggggcttccctcttcactgggctctcattcttctccttcttgctgccatgtgaagaaagacgtgtttgcttccccttctcccatgattgtaaatttcctaaggcctccccagccatgctgaactgtgagtcaactaaacctctttcctttataaaatacccaatctcaggtatgtttttattagcagtgtgagaacagactaatacagcatccatacctgtcaggcaagagggagtgtgaaccattgtagcccaggccggggtgtcagggggagccacactgatgggctgcctggcatgggcagctggagcttaggtatctgtacagggatggagctggcacagggtgtcagagctctgcgcaggatgagcagacacccatgtagggtattggagcccaagcagaggaaggcggacagccacacagagaaggttcagcccaggaaaggaagtcagagcccaagtagggtgaggagggaggggtcagcagaaatgaaaccttggttccagatgggtgactgatcgaatacgttaatacgtcaaggacaatagaaggcaggtgtctcactgtcagagaagagggttagaactatggatagagcaaaaattataatatacccaatggtgttaaatttgaattggatgtatcagtgtgagcttatggttttcaatatgtagagatatggaagaaaatagtgtgtgagtggggcatgtttgagtacatgtgtgtttgcacatacatttcttagctctttctactgagaaggcttcagagcagtgattcttcaatagtaatgagcacatctagcaccagatattggttcctaaataacattttccactaaaatggaccagggctccttgaagaaatggctaatcccaagcctggggcagagaaagtagaagacaagccaggaatatcttatggcagaaactaaggaaatgcccaaggcatgatggagacatgtcaaagggacatagaatctggcttggaggggttctcattgaccatattggggataatttgagaatcaaagttgtttaaaatagtaacaaatggtggtgacctattgaatcaaacagaacactatgtatatccacgcagacattaaataattacaagtttttataaggaaggggatatttacataacttcaaactaccccttcccccaccccactccacacacaataataacaaagggaaaaagaagtggagaagactggaagacacgcccacctcatcaataatgggacaaattgaaatcatactccaggtgagaggatgcagtgagaagaagccagcatcacttccatgattatccagttgcagaagacaagctgaacataatcaggaggaaacaccaggcaaacctaacttgagggacggactgtcaactccctggcaggcagtcttcaaaaatataaaagttctgaaggtcaagtaaagacactggaaccattccagactaaaggagaccaaagagacatgacaatgaaatgcaacatgtgattctgaactggatcaataaattatcaaggaatttatcggaaaaacaggtgaaacttgaatgagatgtgaagattcgatggcagtaatgtgtcagtgttaatttcccaatgttgatggttgttttgtggttatgtgagagaatgtgctagtttgtaggaaatacactaagatattctggggttacagggcaacatgttggcgacttacttgcaaacggttcatggaaaaagatttttgtactatacttccaacttctcctatacctttgtggctgctccaaattaaaacttttatttccaagggaagctagatactaaaaaatagcaagactgaaaagaaacaaaatagcgtaattttcatcatcacaagaatcagcgagagcagaagcaacactgtagaaaaacaatgcaaagatgaggaggacaaacctgaaaatctcaacccaaatagggagaagggcagaggcgtgaaaatggtagagagaagatagaagataagaaataaggagacccagtggacaaagagccaagacactgataacaagcattcaggaagaaaggaaccaaatggaaatgataaaacttttctgagatgaaagaaaacctgtgtatataaaggagctctctggataccaagagaaataaaaaagaggctggcaattttttcaacttgtaagggtgaggagtaggggaaatctacaagaatccaggctgagaaagttaccttaaatgaaccaaaatcagacaattctcaggctaatttttgacgttagattacagaaaatgaaggaggtgatgtttaaggaggagaaaaagttaggggcttcatgtgtgaatgcaagaaattgttatttgcagggattcaagaatttacaattattgccactctatctcaagcggggctgtaactccaggtggctgtaactccggatgaactccagatgaaccagtaactcaaaatagagaagatgtatgaaagaaaagataaaaatggagtgttgatactagttaagcacagacttaaagctaaataataatggaacatatggattcaaagcagtgcaaatacaataattcttaaaagactacaaataattattttatattaataaatgtgcaagaaggtggaaaagggataagagaatgtccttatcttttgtgacggtggaatcaatatatattatccaattgttgactttgatcactagagaaataaggattttgaacatatactttagtcactaatatatttaaaataaagtatagtacttctaaatcactaaaagaaaaaacatgtaaaacataatccaaatataaaaggcagagaacaaaggaaactatgtagggacaaagatacagcaagcacaaaataagatacagcagtagaataaaatcattcaattgtaatgaaaaatgcaaatttactaaaattcaatttcctgttaaaaaacaaagactcttaatgatctggtttggctgtatctccacccaaatctcatcttgaattgtaactcccacaattcccatgttgtgggaagaacctgaattatgggggtgggtctttcctgtgctagtctcatgatagtcagtaagtctcacaagatctgatggttttaaaaaatgggagtttccctgcacaagctctgtcttgtcttgtctgccaccatgtgagacatgcctttcaacttccaccatgattatgaggcctccccagccacgtggaattgtaagtccaataaacctctttcttttgtaaattgcccagtctcaggtttgtttttatcagcagcatgaaaatggactaatatatttagattaacctaaataacattcaactatattttctataccaggaacataactaagacaatgtgacacagtttaaagataaaagggtggccagagattatattgggcaaacataaacaacaacagtaacaatcaaagaaaaatgcagaattcataatgtcttcaaggttccatgttatagcatgtgtcagagtttccttcctttttaaggctgaataacattccacacatgtggtatatatttattaataacgttagtacagaccacattttgtttatctgttcatccctctatggacatttgtgtggcttctaccttttagcttttgtgaataatgctgctaagatcatgagtgtacacatatgtcatgataattttttttttttttttgagacagagtcttgctctgttgcccaggctggagtgcagtggcgtgatcttggttcactgcaagctccgcctcccaggttggcaccattctcctgcctcagcctcccgagtagctgggactacaggcacccaccacctcgcccagctaattttttgtacattcagtagagacggggtttcaccgtgttagccaggatggtctcgatatcctgaccttgtgatccgcccacctcggcctccaaaactgctgggattataggtgtgagccaccgcgcccggccgtcatgataatttttaaagtgattatccaattaggaaggttgcagaaagatgcccacttagtgataggtagtttgagaattgcagatccaaaaccttaacacaatatgattagctacacattccaatcactttgtggtgcctgtgccactcataatgttctctttaactgctcctcagggcacttggcagctgtttgtacattgtgacacccctccacgcacacatctgccccccagccacagaagcttggaccagaggtggacacctgagctgactgcagcaggggcaatcagatgttctctcttgggaagttgaaataggacccaagagattctacttttgcctggacccatctcctgaaaagataaaaatccaagtgcaatggattgctgctcttctactttccatgtggaccaaaaagtagaacaatcctatgtgcagaaagagaatgattgagaagtggaaaaatttccttggtttctgatggcccttcagttcctcgtcctctacctttgtgaagtctggctgcaaacccacccttgggttctctcttctctgagaggcttttttgcttattctagcctgaattgatttatttacatccaaaggttcccaaggaatacaacaacctaggacccagcaatcctacttctgggaattatgcaaagatatgtgcatgaagatattgcttgatatgttataacagggaaattagaaataatctaaatgtaaaaatagtaagagattaggtattataaatttaaagtgtatactcagagagagagagatagggaaagatacagtcattacaaatcattcatgtatgaacctgggcaacatagtgagactctgcctctaccaaaaaaaaaaaaaaattagctgggtgtggtggtgcatgcctgtagtcccagatactcagaaggttaatgtgggaggatcagttgagcccaagagtttgaggttacagtgagagctatgattgtggtactgcactccagcctgggtgacagaatgagaacctgtctctaaaaagaaaataaaaagaatcactcatgtagaatacaattcactgatttaggaaaatgtttattttatattgttcagtgcaaaaaaagcaggtgattttaaaaactcaggtgatggtatcacaagaaaatgcagtgattatggactcccaccctagaccacactcaccactccttgtgatgttctgaaaaagagatacagacaagaaacaaaggcaaaggaaggcatttcaatattagctgggcatggaccccagattcaaaagcagagcctgagtcctttggtaagctcaaatgaaccatgtgagctcacatttttttctaagctaatttggttttaaaggctgcaaatgaggccgagcatggtggctcacgcctataatcccagcactttgggaggccaaggtgggcggatcacctgaggttggcagttctagaccagcctgaccaacatggagaaaccccgtctctattaaaaatacaaaattagccagacgtggtggcgcatgcctgtaatcccagctactcgggagggtgaggcaggagaatcacttgaaaccaggaggtggaggttgccatgagccgagatcgcaccattgtgatccagcctgggcaacaagagcaaaactccatctcaaaaaaaaaaaaaaaaaaaaaaaagataaataaaagcttcaaatgaaaggccaattcagcacacccagcagcttgaggaataacattcccaggaagacgacagggaccattgctcacaatggctgctgctgagccaactgctgcttaacattaataaagcaattgcccccaccgttcacgagttaacatgttcacacacaccagaatctggctatgctctctcaacacctcaccctcttcccctcaggggaagaagaagggtattcacaaaatgaaatggaagagtctgccttgaatgtcccctgccctagagttctgtagcaataacatggtggatacagtgggataccatcaatgtggtaagagtatatgtgtgtgtgtgtgtgtgtgtgtgtgtgtgtgtgtgtgtgatgggaaatagggagggcgtgtctgtaaaagacccaagatcctacagcaaaatcttcacaatgcttatgcctagatggtgagatttgggaaatttttgttttgttgctttttagtatcccatgagcttcccgcattaaacagaaatttgtaattttatggccaggcacagtgactcacacctgtaatcccagcactttgggaggtcaaggtgggaggatcacttgagcccaggagtttgagaccagcctgagcaatatcttgaaacccgatctctacaaaaaaaaaaaaaaaaaaaaaaaattttaattagccaggtgtggtggcatgagtctgtagtcccagctacttgggaggcagaggtgagaggatagcttaagcccaggaggtcaaggctgcagtgaaccatgattgtgccactgtactccagtctgggtgacagagcaagaccctgaaaaaaaaaaaacctagttttaaaatgtaatggaaaatcaccccaatcaaaacagtaatcacaaaatataaagtacccaggctgtatttaagtggggatttgtttttattcatttttttttcctggaaaagtttagtatgccttagaagttttgaagataagtatgacactgagaatggaaggcaccaatttttttaacttattaagaaaaattataattggctacataaaaacttaatacttctacaaatcaaaagtgccataaataaaactaagcaaatgataaactgggaaaatataattaacggctaaggtcaaccttgaatattcagagttcttcaaatttataagaaaaataggggcaaagaaagtctttcatagctagaccttctttctgcctagagttttataatgtgtcaagctgcggggtttcaccgtgcactggatgtggatggtacagtatgcaatgcacagaggcactgttttgtcacgccatattgttgggtgatcatgaagtgatgttttaagtatttaaacttctaacatattggttcatcacaactcttttaatagacagttaaaaagagaaatgcaaataggccattaacgtgaaaaatgcttagcctaattagttatcaaatgccaattaaaataaaataaatgctgcttttttgtttagcaagttaacaaagattaaaacagacgactatctctcccagtggggcctaagttctgtgagggcaagggatgtatttgttttggttgttcttgtaacctcatcacctgacacagtgcctgacccagggtgagccctccatagacaatcattacatgaactgggtgaaagaagaatgatggcacccagtgctggaggaacagtcactctgttgacagtatcaatgggaaccattttcctggagggcaaagtggaagcatgcagcaagtgtggacgtggccttcccaggcttatgttaaatcaaaggtaaacccacttggttacctcaagagtgcctcttagttttaacacccacatttcatagagcttacgtatctctcagtacgatacatttcagcgagtgcgtctatagaaaacatttacagttagatcccccaaaacatagtacaccattttcaataaatctatatgcagggaaagtctcaagctgcattccaactacagttggtaaaatgtcagaatcccatgcggacttttggaaaggggctccaattccatggcggggatgtgtgtctcagaggctgctggctctgaggtgtcactccatgctgttcattgtaaactgtactctaccacctagtgccagtcctgaatgcattcccactgagtctttcatagctagaccttctttctgcctagagttttataatgtctcaagctgcaagatttcatggcgcactggatgtggatggtacagtatgcaatgcacagaggcgctgttttgtcacaccatgttgttgggtgatcgtgatgttttaagtatttaacttctctaacataatggtttgttgcatatatttaggtattttattttgtcttaattactttttggattttgggttgaagtacaacacagtataattttttcccacttaaaataatgggatataggctcctagttaatatctttacacagaacatttgatttccaggaaaggattactgacattcagcaggagatatctgtactttcaaaagggtcatgtacttgaatcttcctagttaaaaaagaaaaagaaaaaaacgtaaaagatgcatatataaaaaaagatttcattgcagctttattttaaattgcaaaactttggaaacctaaatggttaacagagtatctgttaaatacattctagtaaatctgtatgattaaatcctatgaagttatttcaatcatattttctaagaaatgtaattatatgggaaattcttgcaatataataataagtgtgcaaggatcaacacaagctatataacatataatgcaagttgtataaaacaaaaatatttatatttgcagagaataaacactccaggaacgtactgtaattggttaacagtcgttatctctgagagggcaatggataagtttgatttcttcctactgttccatagaatacctcaaattttctttaatgataatgtactatatttgtatttattaaagaacacttttttaatatagcaaggattggggtgattggaaatagtaacgataacagcagcagtggcagcaggagcagctaacacttgtatagcacttgactctgtgttagtaataaaagccaggttatgagcccacactgaacttagcctcagtaaatagcatcctgcctctagcatcatccagtctctgcccatagggatgaattccagcctagaaaatttgtgaatccagaagtatctggtcaaagatcagaagggtcagcttgtcagctgacttcagtaggtactcgcaaaagccacatgcagcatgtagatgctcagtggtgggaagaatacagggtttgggaacagccagacctgcattcaaatcctacctgtgccacctaattcctgtgtgaccttgaggaacttacttcacctttctgaatctcacttgctcacgagtagagtaagagcacctcacagcatggtcagatgttgtgagggttagagtggcagcctataaaacgcctaatatccacgaggcactcagaaaacgctcctctcccacccttcagtgctggtgatggtgtcactgactccttagattgcccctcttttgttattattaatttcaataaggatgacagaagataagcaaaaaggacttggctaaacttgccctgtttacagataagtactcatgaatatctgtgtgtgaataaatgagggatgagaaagtgaagaattgaacaaatgaatgacggtgtacctggagaatgatgatcttaccctgacttgcctgcttttatcttttcagcttatccactcaccaaatgccctcctcccaccatcctccccaacgccgaagtcgtcacagagaatgaagaattcaatataggtaccacctcccaagccagcaaggactgtgaacccaggactggggaaggaagggaaggtggcggggggagctgtcgggccagtggaccttatcccctgctcctgtctgtggagagagaaacagtaggccctgtgccagagggttctgcccactgagtttacacccaaaataaaatcaaaaggggaggcagaaaaatagttttctttttttggttcaagtcagcatctttttgagaaataaatccatgcaagacagtataaaatgtcctggaatatgaaacattctgaggctcacacaaggctgagttgtgagaggggagcagtcgtctgggccatttgatgggagctgagctagttatttaagtctgaacagaacatgacccgcctctgattatctcacctggaagtgggttcaaggtactaatgactggacttcttaagagggtctacatgttggtctttctttgacaggtgacatcgtacgctacagatgcctccctggctttaccttagtggggaatgaaattctgacctgcaaacttggaacctacctgcagtttgaaggaccacccccgatatgtgaaggtaattgcatggagccgcatctgtatggggcctagaagttcctcctgaacaaagctcttgttttgctcctctttctattcccagttctcagctcagtcactgccccataacatgaaaggtcacttggtaaatgttgtctgatggatgagtaagtgcatgaggaatgagtgagtgatcactctagataggttctctgccctgttctgatatctgaacctgtgaattggccacagtggccacatttattttcatctgcctttttttcattcctgggaatttcttggaattgcatactgagtactggaaggaggaagtccctccctggtgtgggcgtgggctcacacaccatccctgctttactgatgcgcggatgcactcaaggtgctgtgtgccaaaccaggcaactgagagaccacagcagtctttattccagtgtaccatgccttgacagaaatgaattcgcttcagcgagtcaccccaattaagatcaaaaaatagtctccactcatcaggcatctgacctaaggcaaggtacctgattgtcctgccctcagccttcccttctataaactgaggataatgatagtacttatgccatggcggtattaaatgggttaataacataaaccagtttagaatgatgcctggcatgcagtaattgctccatatttgtgttaatattatcattagtgcgactactgtttctagaactactgctacctgcaaatattcagtagcctatggggaaacaggtcagcctttcccccacttctgggaaagcaagagtaggaagaacctgcaatatggactgtcagtaaggaatagcagacctggtagaggcaggagaggaccacgaggcctgagagaacttaagtatcaccacatctcagtgccctgtgctggtcatcggattagtgaaatcaggaacatgtcaaagctaagcgagtttcctcttagaagacattagttttccttctcctcttaaaattaaaaaggaagctctattgggaaaagtcagtgagtacctttcaaagctactcaggcagaatcctggatgcgtcctgtgaaattctgggccacagcaagactctaggagcccagcccccgtgctgattaccaagccccacttctctgaaggcagaggtgagatgggtgaacagcccatggcaaagtcttgtacccaaaatagcattacctgaaattgtaatcctgggattaatttttggtcttgcagttcccgttccagaacctcccttttagcagtgtcccagaatccagcagacccaggaagcctgtctaaaggcacatctactgcaaaacactgatttctccgtgtgcagtgataagaatacttacaactattgtcaatgcacacctttgtactgaaagaacaatgtactgaagaagttgatttagtcctcagaactttgctttggcgtccgcaacccaaacaaatggaggtggatggtcctgaaattgctttcatgctgtgatgcttgcctgtgccccaggacacagcatctcctcagtgctggggaagggcctctctgaaccagcagcttccctcccactcatggtgatgacgaaataacgaatcctgctcctccagctcctccttttctaagttccaagctcaatgtcttccttagaatgacatttttttctttagctatataaatagtactaattaagccacagccaagttctgagacctttctgttcaagatgcagttttcatcattccctctacaatttattgaagcactatgttgcatgctttacatatattatttcataatatatatatatacatatatgtatatagatatattttttttgagatggagtctcactctgtcgccaggctggagggcagtggtgcaatctcagctcactgcaacctccgcctcctgggaagcaattctcctgcctcagcctcctgagtagctgggactacaggcacatgccaccacacccagctaatttttgtatttttagtagaaatggggcttcaccatgttggccaggatggtcttgagttcttgacctcatgattcacccgccccggcctcccacagcgctgggattacaggcatgagcctccgcacccagcatgtaatattttatataatgctcacaacagccctgtaaggtctgtgttatctctgtgttggagatagagaagccatcacacagagaggagataacttgttcaagaccacaccattagtaagtggcagaggtgggctatgaatccaggtgtatttgactcaaaatcccatgtacttacctctgccctatacagtacaatctttgttcaaataaaacccattttatagattatctcctttggatctggggaagccttactgttgtctgtatgtatgttccatcctcccctactcaaagccaggtagtagaacccacaacttatctaggaagtgattccaaccaactggcaaagctcaagtcccagaaatactgcaatattgacacaggatctaagcccacctcatgtcatggagcagcacagtgatggatgtgggatcttatctgaatgtgctcaaatactgattttctaggggttgtctttagtattgggaaaagcaaatgtattggccgtagttccatctccacccccacgtacttggtgtttctctttctttctccaagtgcactgtccaacaaatgagcttctgacagactccacaggcgtgatcctgagccagagctaccctggaagctatccccagttccagacctgctcttggctggtgagagtggagcccgactataacatctccctcacagtggagtacttcctcagcgagaagcaatatgatgagtttgagatttttgatggtaagtcagtcaaatgcctcacagttctctgctgcagaagacatggacttgctccagaacccgaggagtctgtgctgcagttttcctatcagggcttgccagaagctccacaggatgtccttccctaccacagcaaccccaaggccatgggacctgaggggtggcatggcccaagcagcagagctgcttgtactgcaacttgaacctgttaccgaaccttttcttactctagctcccactcaaagccattcctgttcatgtcagcagataaatgggtcaaacagtattcccaagtgaagagtgtgcttcctccaaaacccagagatctaccaaacattgtgctgcctctttggctttaagagggaaaatgtgcaataatttgctctttaatttggagggcatgtctcagcatgcttcagaccactggaccctaaaaattcatagcagaactttgtaggatttacctcttaccctctggagcacatgcatcttgaaaagtcatcttgccaaagcactaattgtcccttctcactcatcaggtctaattaatatgatgtcctcaatagagtgaaccaatatgttatattctgcaagatgtccagatggtccacatccctttatactcggttatgacagagagcaggagaagtaacatagctctgggggaaaccatgaatgtatactgttgtctacctcatgtgaatgcaaagtgcttctgatcctcatttctgaagggtatggaaaagactacatggccagatcaacagctacattctatgtaaccaaggctgtgttaatctgttctaataaagatatgcgcctcacacagctgctacaattgaggctcctactttgttaagtgtgtactgtgagacggacctgggccaggactccatttattcccaaaaccacccttcatacaccactcctctggcagagtagctatgatagtgctttggacccccagtcatcagcatcaattaacatcctgtatccagaagtctttgatatatctgaacattccattttctataatattctgttttctgagtaaacagtagtaggtcttttgggggaagaacggtaggaacaactactatatacaattattgtcattgtgcggggtcttttttcatagggacccagcctcttgggaaatgaaacctggctcaagtctgcaaactgggcaaaggattgcacctttctgctgggggcagcttttctcatcctgcagttagctactaatgatctgttttgttcatatagttatacttgttttggctgctcttcttggcttcctatttaccttgcccttaggaacatcatgctctatgagccatcttcgtagatcccgtaggccaggctctcccagctgccattccagccttgcttcccattttagtaattatgccaactttgcttctgactgttaagtaattccacctggcctctgtgttctaggaccttctcatccccattactgctagggagcccagtgtctctccccatcagttttgacccacagaggatagccattagttactcaggttttcagcaatgctggtgctcacccgctccaggaaggctggagctcctcacctcctgattgctttagtaaatggagtgtcctccaggtcttcctgagaactatggtcaacttttacacagcagacctagcccagcatgccacttctcccagcctttcccttcacagtttgcatggcagttctggtgactctactttgtttaatatgatccattaatttttccaagcttctaagagctgtctcagtggcatagtagagccatcattcagggccttttccagagtgataaatcctgtgttatgggttatccagctttatattctgcgccccttcaaccagccccctcgggatgcaatctcagacatttaaggtaggacaaaagaagagggaggtctttctcaaagagctttcaaaagcagtattagggagctctgttacttatgaccccgagacatgacattttcctctagctttattgctatgtattcattccataaatatttttttctatatggcaggcactgagctttttttcttttctttttttttttttttttttttttttgagactgagtctttctctgtcacccaggctggagcacagtggtgcgatcttggctcaccacctcctgggttcaagcgattctcgtgccttagcctccccagtagctgggactacaggcatgcaccaccatgaccagataatttttgtatttttttttttttttttttttttttttagtaaagatggggtcttgcttgccaagctggtctcaaactcctgggctcaagtgatccacctgcctcaccttcccaaaatgctgggattacagacatgagcttaaatacacacaagagaagtagggtggccaagtggaagaagttcccagtttgaaaaccagctcttccattaaccagctacttgaccttgtcaagtctcaaaatgcaaatcaatttcatcttacctgccagcccctagaggtaggcagggacttcctagagcactgctttagagctgggcttaggagaaaagagcaccttgagcaatgcctgtggatgcagagagaggagtgcaagtacaaatgattttgctgactctgaacaagtcaccccaccctctgagccctgaggtcttccctggaggctccctgtgatggctcccatggtctgtaatcctgcgtccttctcaccccaggtccatcaggacagagtcctctgctgaaagccctcagtgggaattactcagctcccctgattgtcaccagctcaagcaactctgtgtacctgcgttggtcatctgatcacgcctacaatcggaagggcttcaagatccgctattcaggtgagtgaaaaaaacacaaataagccacaggccctctcctcatcgaagcctcaagctcctctgtggagaccgggcggccattcccctcctaaatctgcctcacctgaagctaagtggtctttgccattcccctacctcctatttttctattccattcccctcttgaacctcttccctcttttctcatactgccagcctttgtcttcaggataagtttaacaattttatatgatctgataatgcctaacagtgatcctgtccctttaggaaagttaggaaatgctaataaaagtttcttaaaactaaaaagccctaaggcatagatctctgactggcagatgttaagcatgcagcaaaggatgggctatatttcaaggccaggtgcctttcttctgctctgcaagccatatcttataaacagagtcagatcaaaaggccaaagactgacccaggcaacaatctataaggactgaaaaaaataatcctgggaatataatgagatggagaaaattgaatttatctgatctctcgtcatggggattactgtctgtggttggaagaaaacttcacaaggtgcttgatgcccactttgaagagaggtgggttcagtgaactgctgactgggctccgcaagcttggaggcagaaatgaattacttaagaccatggggggttccatcacacaccagttccctttcagcactctttcccctggctacctttggcctacattccaggcaaacaatgaacaaatttctaaagaatattggttgggggctaggtgcagtggctcacgcctgtaatctcagcactttgggatgccaaggcgggcagatcacctgaggtcaggagtttgagaccagcctgaccaacatagtgaaaccccatctctactaaaaatacaaaaattagccaggcatggtggcatgcacctgtaatttcagctacttgggaggctgaggcaggagaatcacttgaacctgggaggtggaggttgcagtgagccgagatcacgctactgcactccagcctgggcaacaagagtgaaactctgtctcaaaaaaaaaaaaaattaaaaaaaaagaatcttggttggaaggaatgtcaaattcagtgcctgaagtcccacttgccacagtccatctcttctcatgggtctcctacttgcaagaccagcccatactcagtgggtggacagtcttaaagaatccctgggtgtagctttcaggggagagccaaccagaggaagctgagggcccctgggagaaggtgggtcttgactgtctcagagcccatatcctctgcaaagtccatccaacctctcctttccctggtgcacacggagaggggtctgggtggctgcaatgactgagtgccccaatgtcagtgaccagctctctcacctactagctgtgggattattaggcaaggtacttaaccacttcaggcttcagtgtccgcatgatggaaaagaaactttaaggtgcctcttagggctgagttcctggcagctgctcactcaaacaggaaatatagcagtttggtagcatttcactatgctggttgctaaattaggaactgaacgttattaaggagttaccctttccttgatgttctaacgtgtttggggataatgagtcagttgtaattacaatacatatgccacgtagaaagtgagttaattacatggcgcaacaattagtacttaataattcagatcgagtagatgagtgtaatttgcacctgcgtctgtcactgtgactaagtatattttacaaccgagattcttgttcctgagggaggtaaccatgtggatacagcacacataggacacagcgggcaaagcaggagtagggaaacaaattcggcttggaaggcagctatttaaaacaaccatttcaccggcagacggatatgatcaccaagaaagaggccggggacctcaccaggggtggctgtaagggccccacacgcgcatcctgccttatccatctctgcctggaagaccccaccagggactcctagggcaaacaaagagaattatctgcctgctcctttggtcatccctctttcctggcctcacagaactccccctgaggatccctggcaggctttataatgtgagtcctttcaggctgggattttttgttttgttttttttgtttgcttgttttttgagacagagtctcactctgtcacccacgctggagtgcaatggcatgagctcatctccctgcagcctccacctcctgggttcaagtgattctcctgccttagcctcccgagtagctgggactacgggcacgcaccaccacgcctggccaatttttatattgttagtagagatgaggtttcaccattttggccaggttggtcttgaactcctggcctcaagtgatccactggcctcagcctcacaaagtgctgggattactggcgtgagcccaggccagggttttggtctgttttcttcactgttgtattgcaagcacttagaacaatatctggaagataatagatacttgatgtctatttgttgaataaatgaatgaaataagttgaagccatatgtggaggggaaatgagcactgtagggaaatgtgtgtcccaggttgccacaggtcagtctcagcacattcccccacacagcacaaagaaggacaatgaccacttactgagcattgaacagtgagtgccccatgctgtgctgggggctttatgtacgcaatctacatatacagcttaaattgcccaaaaatctgtgaggtgggtattaccagtcccaatttacaggcgaggaaattggagctgaagtgatttgccccaagttacagaaactggtcagatcagaaacgggactggagcccagccctcactaaggtcaaagtccacacccccgcagtcgcagctttctggaaccaaccccattgggttctactttctaagtctgtttcggagctgaagggatttgagagcctgaacttagccatacaccagatctacctttggaccgcaaaagggacccagtgcttcatgaagctggttttttttgttttgttttgttttgtttccgttgttttgtttcggctttaccaacctgactgggtgtttttcaatatccaccattcagactttcctcaacagcagaggatgtggcagtggcaaagacaaggggatgggggggagacgaaagggaaaggggcctgcatgaaagaccatgtctgtcttcctgctggtgccagttccctgaacctcatcttgttgttcagccccttactgcagcctgcccagggctccactccatggcttcatcctaggccagaccagcacccagcccgggggctccatccactttggctgcaacgccggctaccgcctggtgggacacagcatggccatctgtacccggcacccccagggctaccacctgtggagcgaagccatccctctctgtcaaggtgagaagcaggtggaaagggggtcacaaggtagctcggatccaactcatatcttgggtttgtcccaggactagtcacttccaaatgtgggtttcctctttgataattatttcattctttccacaagcatttacaagatctgtagtgcgtagcaatctcagtgttttgagatccatgggggagatgggtatgtgagcacatcaatgcaaagtggcagaggaaggaagtgtcgtgtcaggagcataatcagtgttgtgggagcccagaggtgagaaaggatctgcttcctcctggccagctggggagggctcccagcagaggggatgcttgggttccggctcatagagcaagtgggttgatcaaacacttgaaatgtgtcagtcaatttgcatgcattaccttttatgatttatgattttatgatttatgacagttttttcccttcaagtaatatacattcaaactaaaaatctgaagaagaaaaaaaaaaacggtagataatgcaaaagaaaaaaagtgaaaatgaacaataaacctgagatcaccactgttaacatttcagcacatttcctttggtcttttatgtattgattataaaaataggatcatccgtgtacaaagctcttatagattttgtttcccataatgctgtgcaaccactgaaaatcatggtgaggaagtatatttaactatatactattttttgagacagagtctccctctgtcgcccaggctggagtccagtggcatgatctcagctcactgcaacctctgcctcctgggttcaagcaattctcctgtctcagcctcccgagtagctgggattacagtcacccgccaccatgcctggctaatttttgtacttttagtagagacagggtttcaccatattggtccggctggtctcaaactgctgacctcaggtgatccgcccacctcggtctcccagagtgctgtgattacaggtgtgagccaccgcgcctggactctattgttaatattatacttcgtcaccattattttcaatagttgcacagcattatgagaaaattgtcattcatttaagtatcattctcttgttggtcatttggatttctatattctttgtgacgataaacttataattccatctttatgaatattacatatttccttaaggcaaattctcagaaatgagattctcgcatcataacgtatgcgattgacagctgtcgatactgattgcctcccagaaagtttgtcctcatgtatagcagcatgtgagaactgtcttttctcccacagtctcaacgttaggcactgcatttaaaaaaagaagaaaacattgccaactacatagacaaaaacaggaaatcacattgctatttgatttttcctttggttcccagtagtggtgaagtactttttaatgacatctctcatctctaatcctcacaaccttctcgcctgtgcctgtgctttctcaaagaacaaaaacaatgtgctattaataatctactctacccctaagcaaaggtcacagtgaactggctgtccacaaatggcaaatggcatttggctttggtctctgcgtctctaactgcattaacaaggacaagtcttttttccggagcgccagttggaacctactaagcctctcatttctgttaccttacatcaccacccaaaattaagcctccaccagacttcagttgacccatccccatactactgtgcatgtcttctccccactgcaccccttgcctcccactgatgcccttcctctaagcctcccactgtgttctctggaatcctagttccgtggccagcaagcgtacaccctcagtccctacccagctggctgtcttcacttcctccctccatggagaccatggctgtcctctgagagcacgtatgctgtggccctttcaagtggattgttaatccccctccacccacctcctacttcccacagaattctgggccaggaagggcctggcattattccacttctctactgctgtttccaaaccatgacttttccactcttcctttagagactctatgcctcctaatgccttctctctccttccccagcccactctctcacctgtgtctctctccctcagagatctcattccaccacaagcctcaaatactttgtgattgtatcccctcctcctcctacccacaggaagtgtccctcttaccaccgggttttggggactgcattttggcatggagatcatgagacacaggcttttagtatctcaggctggagtattatcttctgtccccttagttatctacaagagcaaggccaggccagggcctgtgagaagtggctgccgcccacttccttcactgccctccctggattgactctccatgcaagacaccagtggagatccaagtatttcttcccaaaggatttaaggaagctgggcaggtagttgatgtaatatgacagcttagctaacctagttccactgaaggagctcatagcctttctgattagtcattaagagtctcatgtttaaacactctcttatttctcattccttctgtgttcctgatcctcctcttctggaaagtcccacacttagatccttcttccatcttggtattccaacttctctccctctgaacagtctaccctcctccattcataatggagccccagcctgatgcctcttattggttctggaaattcttatagcatcaagcatcttgttaggcaatctcaatgggactctgcccaagcttattctggctctaagcgaaaaagttctgagctctagactagtagccagaggggatagtggatggaggcagtagtgggtactttgacggattaatctttccatctgtaataccccctgagctgtcaaagagcaaggatgatttataagtattactttctttcaaagaccaaacagtctactcttgcctaagtaattcctattcctcctataaacataatgtcgaccctactccttataaaataataatcctggccatgttgctgcaaacatttctctcctgagttgtccctttgagattccttttctttgtattcttgagttagttctgtcatttttcatatctcatatattgtcctttcctggttttcaccctctttttcatggggtatatccttaagtaaattcctcagaaagggttcacaagaggtgcattttctgagactttacatgtctgaaagtgtctatctttttgccctcacacatgtttggtcagttgactgggtaaaattctagtttataaatcattttcttcagaggtttaaagctttgttccattatctttgaacactcactgctgatgggaagtcttatgccagtttgattctcgttccttcacagttatgtcatttttttttccctctttctagtaatttggaggaatgcctgtgtgtctctggacttcttagatacacaaaattccgtgatggtgaatctaagagggattctctttgcattcctttggctccctttccatctgaagacttgtgtctctcttcagctctgagaaattttcatctatgataattccatcccatccactttttgtgttctctctttttggagctctgaacagttggatgctggaccttctgtattgaggattgatccgtgttttctgtcattttctctcattttcggtctcttttttttctatattctgagaaatttacttttcatctctaatcctataatgcttatttcggcaatcatatttttcatttcaaagagtttgtccttgttttttttttgtttgtttttttttccttcagagcacactgattttattttatgagtaccgtatgtcaccttgactttctcaagatactactgatcagaagtttaaagattgtgtatcttctgttttctaaattagctctgtttcctaaggggacatttattttaaactttatcttggtttgtcttgttcgcactgctgattttcttcacatgtataatgatccttgatcgtattttaaaagtaagggccaggttgatttttccagctatgagatgtggattacgtttgttatttttatatacagatatcttggtccacaaagtctctcctatcagtgagaggttgagttgagtatgtggcagacctgagtaggcaatggggcagcctttaggccaagagaccataaatcctagaattaaaagagctttcctctgggatgccaactcccaccataacagccctaattcatcctaagagagatcccccctcagtggaaaagaaaattctctctttcgtttggagagtagatacttgaatgtgtctacactgtgtttgtgggaacagatggcggagaactggtttcaccctgaggctccctcccatatattttgagctacagcttctttgcacttctatctttattccttcttccaaacttaaaaaaaaaaagaagaaaaaactcttctgctgatgatcctcccattttcttttttattatgatactttaccctttaattagtttttactaataaaaggaccttgggaggggaggaaggataaaaatagtttctcagaataccatcttaaaacaaatgctcatgacattgttttccttttgctagctctttcctgtgggcttcctgaggcccccaagaatggaatggtgtttggcaaggagtacacagtgggaaccaaggccatgtacagctgcagtgaaggctaccacctccaggcaggcgctgaggccactgcagagtgtctggacacaggcctatggagcaaccgcaatgtcccaccacagtgtgtccgtgagtcctcgggcaatggaggcgggtgtaaggaagggctaggtaggcagctggaaagattcctgcaaggagtgagctaaaagcaaagtaatgagggggaaaaaaaaaaaaaaacatggacatggaggttggaggatttcagaagaggaggcaggtgctgaaactgctctcagcattgataaccattgtgccctaagatgtttccacaaaccaccatggaacttaggaatggcctggtccactcccttttagatggaaaacctgtcagaaagtttgcatgaatgtcccttgattccaaagctctaaaaacaacaacttttaggccagatcacaaaatggcaacctcctcgactatgtcccatccaaagacagaggtttttgttttgttttgttttttggcctacacggtgctttataacaaattttgaattactccacaatcttttaaaatcaagaaattttacattaaaatccagatttctgtcttctcttgaaaaatgaaaatctaatcaaatgcaactcaaacattcaatagtcaaccttgactgagtactatttcccttttttaatttttaattttttagcagaactgtactccccagtttgccacatcccccacccaacccacctgttcatttaccaaacctgcctgagaactgaagattcctggattcttcattattgcattaaggtctccaagtccctagatctgggctcttacaaggtcttccagaattaatcaagtaattaatcctcctttcttttcctcatttccccagctgtgacttgtcctgatgtcagtagcatcagcgtggagcatggccgatggaggcttatctttgagacacagtatcagttccaggcccagctgatgctcatctgtgaccctggctactactatactggccaaagggtcatccgctgtcaggccaatggcaaatggagcctcggggactctacgcccacctgccgaagtaagcccaggaagggagggtgggcaagtttagcagggtccctcctacctaagctgtctcatgcatggagtgaactggggtgggggaaaaaggggtatcaccagggattgcagtgtactgctttttaaactctcatctagtagaatcaggagctgggaaaatgcctactcctttactcctttaaggaagtatttcttagcatcttctcatcttatcaaaagctgcttttgtccagatgagcatgcactaattcatttctttaatattcttaggctcttactatatgccagacactgtagaggtttgaagataaaagattttggttcctgcccacaaggactttatagtctactggagaggcagacacataaagaagtgatgataatgtggtgcgataagacctgaaatgggagtgtatataggaggaatgagggtagcacaggcgacaggtcacctaaacctgcctgccttctccattgtcaattgtttttctttggttctttaatacactttcaaaggtcggaatctctgggaagacactctgagacagaggcttattagggggtgctcttgagaacaccacctacagaagggaaaggagggaaggaagcaggactgggcagaaggagaattgagctctgatgcagtatccatgaaagccttagctcaccccccagggagctctggatggcccttcagaattgtcacaagttggagcaagggaactgttatactgccacactgaccagccactggatgcaggctggcctaggaatgggacatgaccttcctaggtgggaggactcctcaaccacagcaatctgaaaagggctgccagccaagggttgttttccagcagctggggaaataagtccctcggtcctaaaaggggctctgagtagctcatcgcagcatgcactacgatagggatatgctcatcatatttatgtgaccaatgcagatgtcacagaggaggcaagtgattgtaaagaggtagaaggaagtggtcagtgagaagtgggagtttgaaactgggaaggaggagaaatggtgtcttccaatgcctgtgatccaggttgggcatagatcccagcatttgagaggctgaagtgggtggatcacttgaggtcaggagttcgagaccagcctggccgacatggtgaaaccctgtctctactaaaaaaaaaaaaaaaaaaaattagccagcatggtggtgcccacctgtaatcccagctacttgggaggctgaggcaaaagaattgtttgaacctaggaggcagaggttgcagggagccaagactgtgccactgcactccagcctggacgactgtgcaagactccgtctcaaaaaaaaaaaaaaaaaaagccaatgtccgtgattcatgacactgttgtctttgcacactgtggtgcagactgcacagtgggatgtaaccacatatgtggcagagtagtcccaagcgtttggcagcctcactacaatgcagccactcacatttcagtgcagccttggcgattaggcctcacctcatacatcagccagaggctctcagcagtgctctgttgacaaagagtgtgaggctgctgggctcagaaaagaagggcaaggaaattgattagcagtgtctgcccagggcactcaggagcataccacagaatcgccatctcttcctaaccacagtgcacatctcagccacctgaggaggattaaaaaaatacacaggccagggcgctatctgcaaagctggtgagtcaggcacctgcagtggagccgggcattttaaataaccttcaggggcttctggagacacctccagttgaggtgccacatcacacaagtcagcaacacaacccatattctggtcaggaattccagcagagtaaggttaaacaggtcttatttttgtcacagttcttgctaagcagaagcagccatgtccctcctcttggggctggcttactgagcatcttgtgatcattttagtcatctcctgtggagagctcccgattccccccaatggccaccgcatcggaacactgtctgtctacggggcaacagccatcttctcctgcaattccggatacacactggtgggctccagggtgcgtgagtgcatggccaatgggctctggagtggctctgaagtccgctgccttggtaagtgacctctgcaggcctatcctgcccagtttttctccttgagatagattagatctttccaaagctgagatccagtctttaaacagtatcatttcacctattgacataaaatgcttaatccaaacaccaactattggccatcaggcatgactaaaaccctggaacagcttctcctgggccacccaaaagaaggagaagaacctcagatctaaagagacaagcttttgaggggttctcattctggttagaaagacaatcccttcctattggcctttgtataatgagtgaagccccagtctccatttttggcaaatttgcagacgcattcctgtaacacacctaaaataccttttatattatctattagcaaattttacacacaacatatagatctatacatatatactaagcaaattacagaaacataaaacaacctggcttccaaaggacaaagttatcatttcctccatggctaatccactccctggttctatggttctgtctcctctcacacctttcttggacccctggagtctaaaagagggccccagccacataaacctaataggatagattgaatggtctgtcctggggtgaacagtgctgtcttgccactgtctcaggcccattaaggacacagtcacaggttatttccacagagagccaaaggaagctggtagaaatgccaggaatatattctacccaaatcccatataataaaaagaattcacctaggtgctactcaaggagaaggaaggaaagatgaatttagccaaaccatctgtttttacatagttgtttcaacacagccaggttttgactgccttaatgtagacaatggtgccctccatgcagcagatgctcggtgaaaaacaagatgcccaggctaggtgtggtggctcacgcctgtaatcccagcactttgggaagcaaaggcgggtggatcatttgaggccaggagttcgagaccagcctggccaacatggtgaaatccatctctactaaaaatacaaaaattagctgggtatggtggtggatgcctgtagtcccagctacttgggaggctaaggcaggagaatcccttgaacctaggaggtggacattgcagtgagccaagatcgtgccactgcagtccagcctggcagacagagcaagatcttgtctcaaaaaaaaaaaaaaaagatgctcctgagtttgagtttttgggggcgtttcttgtttgtttgtttgtttttttatagaaggcttttttgtatctggttggtaagaaaaagtgggggatgatcctggggacagtgaggtaactgatcattttgcacacatctgtgtagagacacagaaactgaagctcagaagtgagtggccatttggggtacaaccttgggatttggggtgccaagtcctcaacactatttttgtcatgctgagggttcctgaagtcactcctagattgctactctcagggagaggtgggaaaagtaatgagttgtgggatagttggtccttttccccaccatccctgtctctagccactcagaccaagctccactccattttctataagctcctcttcgatgtactctcttccccatccctcaccaaagctggacactgtgggactcctgagcccattgtcaacggacacatcaatggggagaactacagctaccggggcagtgtggtgtaccaatgcaatgctggcttccgcctgatcggcatgtctgtgcgcatctgccagcaggatcatcactggtcgggcaagacccctttctgtgtgcgtaagtatgtcatccactctccctagtcatggggctcagattcaacatggactttctccctgtctcttaattagattagctagaggtttgttttaaatatatatatatatatatgattgctattttttttttcaaaactgaaagcattgttgatctaatgttttcagttctctgcatcattaatcactgttttcacctttattatttccttccttgtgatttcttttggtttacatttttgttcattttctagcttttgagtaggaatttaattcatttattttcattctttcatttctattgagttttattgctataagtgcttaagactatgaaatttcctctgatcactgctttaattgtatcctatagagtctaataataaatgtttattatttattagaaattctgtaattttggtattgatttccccttttacatagaaaatttttaatagaaggatttgtttctaggtggaaggcccttttttttcattgtgttattcatttctaattttattgcattgtatgtaatatttctacttcatggaattgactgaagctttctttgtgacctaatagttggtcagttgttatgaatgtcccatgtgcacttgagaagaaaggatattaggatgtcatgttttatttatatattcatgagatatatctgattgattatgttgtctatgtcctttacattcttacttttcacccactcaatctgttttattctgagagatgtgtttaaagttttctattattagtgtgtttctgtttttccttgcacttcctgtagtttctgttctataaagatggttgctgtcttatttggtgcatagatattcataactagtatctccattgcacattgtggtttttagcctttaaagattacttttttgtcacttttaacattttttagctagaattgtactttgcttgatattaggcttacaacccctgctttaattcttttgcctgatgcacctttgaccattctattttagccttctgcttctcttaggtgtgattcttgtatgcagtataaattgccttataagctaacttaaccatctttttcttttagttggttagttaaactcattcacatatattaatatgactgatatgttcggtcttaattttgccgtctcccatttcccccacttctccacccatggtaaccaccattctgctctctgtttctacgtatttgacttttggaattataatattagtttaattctatttttcttataggttatttggttgttttttttttttgaggttcctgattatttttccctttatcctaaagtctaatatttttactaggacatgcttcagagttaattattccaagacaatttccttaggtattctatgggtctttgaatatatagattcaggtctttctttatttccaaagacttttcttggattatggttttaaacactgatattgctttgtttcccactgttttttttttcttcttcatcagctctgattatgtgtatgttgaatcttctttgcctatcttctctctcagcctctctctcattattttcacctctttatctcattttaattcccttggttttttgcctgactttcttgagtaactcttattaaattatcatttgagaatattctttcttgggcctcttataatttagtcttcatttctcagatggttttgtctttttcttttatctctttaaagcatacaatcagttatcttttatattcttccaccttttgtccatttgtgctgtttagtttttgattttctgattttcatggtggtttttaaaatatctccagatgcttatttgagaatatttagttcagtttagaatgctgctacatttttcttacgcttcacatgttttgtttttggtgaggaggttttcatcagatgaaattcttgaattcttttctatttttttcttaaagtagcttcgtatacatttaggttgatgtcttctattcattttatggctttagtgtggtttagtagtaccctcttctgtcagtgttacaaagtctttctctctgattgtttttacttctttatctcattttgattatcttggatgtttgcctttgttttgtttatttattttttttaatataaggttttgtgtgtggtaaggaagaggttgtgtgtccttcatttttgtttgtttgcgtgtttttcttttgtcttgcagaaccccaggttttcccatcattgcttcttattccctttatcactcagaggatgtcactttcttttcttccagaagcaatgagggagaatcacacacacttttatgtcccttttctgtggttgtacattgacataccaagatttgttttcagtatattcatatatgagatggattttctccttctggcagtgattttagatcagtgttaagcccttcacctgctcctctcttctctttctcatacagtcttgctctccacaaaagcttgcaacagaaccatgagaagtaactctgcctgggcttagtgtatatttctcttacatgtaatttaaagtttgtagcactctctggcttctagttaggctgcaggcctgggttttctattatttattcttctggttaatctgcatttttttgatttaggcaatcactgttatgcttagctgcctggaagtaatttggataattcttcactttttaaatttccctaaagtgagcctttatgtaaagtgcaagttttccttcttaatttttgtaaggcagtttttttattttaattcttcttttggctttttatatatgggatggggccataaaataatgagaacttctcaaaaaacaatgcctgaaattagtcttaataacttcttaagggttacagaaagcaagacccaagccagatattgtagcttgtgcttgtagtcccagctattcaggaggctgaggtcggaggatccattgagcctgggaatttgaaacaagcctgggcaacataatgagatcccatctcaaaaataataaaaaataaagttccatctgtattcagtcactctttcagatgtgtctaaataaaacatgtttagtttcacccagaagaacatgcagatgccctcaggaaattggtgcacgatgtatacaaagagatttaggtaataaataatagagactgtcggggtctgggtggagaatgtctgcctggcctaaagacattgaacgttagactggaccatattcaaaggcagtgagtgaagtagttaggcactcaggtgtggacccagattgcctgggtttacatctcagctctaccatcagatctgctgtggctatgtaactctaggtaggtcgatttacctcattaggtctcagtcttgtcacctgtaaaaagcaggcacctcaaagactactgggagcattaaataaattaatacacataagatagttagaccggtgtctgatccagatgttaagcagcagttgctgctgctgctgctgctgttgtgtgatgatgatgatgatgaagatgatggtagtggtggtagtaatgctgccaccatcacattacagaatccaggatctcttacactaaggcccattctctcttggagcacagaggtttgggaattatctggaggaggaaagcaagaataaaagaacaaatatttgtaagtgtttactctgtgctaagcactgtgttagctgccagtacatacaaagtcaaggtttccaatgtcaaccagactctcaaaattttccagctgtcctcttcatttcctcagtcagttcccttgccctttctccatacagctgtttgacaattctgcctcctttctgaagacttatattccatcgcccctacctacgttctcagcaaataactaagttaaacagttaagatggcctggaatcagagaagctgggttcaaaattcagatgagacatttagaaactgtgacccttgaacaaatatcttgagtcctctgaaattctgttttctgtgggtatagtggtggtgcctacctcatagggttgtgaggattaagtgagacaatgactgcgagccccaacaattgttagctaatcatataatatcactttctattctgcagagatgatagaagccatcagaaaatagcttctcctactttcagcttccccacccacacatctgctctgtgtacatccatccttgccccttctctcccacctcagtagaagaatctctctcccagcccatggttaatccctccaccagtctctggatctccttccctcctgcctccttagtgaggttagtctattcttaatcctctcctatgttaccatggaccttccctttctgtttccctcagcttctaagaccatattcaataaagattcccttagcatctactatatgccagaccctgtgttaggtgctgaggatcaacatgaattgaatgtgtcatacatcatctctgcccttaggaaactaggtctagttgtcctgaaatgtgctcaaaagcccattaagtgctcaagcctcatcaggacctctactttcctcctaatgatgccttattcttctgcccatggcagcctgtattagttcagagtcctccagagaaacagaacaaataggaggtgtgtatagagagagagtgcaatttattttaaggaactggctcacacaattgtggaggctggcaagtccaaaatcaccagcataggctggcagggtagagacccaggaaagaatcacagttcaagtctgaaggcaggctgctagccgaattccctcttcttccagggatagcaggctgccttttctctcaaggccttcaactgattggatgaggcccacccacattatggagggcctcataatctatttcactcaaagcctcctgattgaaatgttatctcatctaaaacataccccttcacagaaacatctagaataatgtggactaatgtttggccatatgtctaggtatcacggcctaaccaagctgacacgtgaagttaaccatcacatggccatgctgcttgagacggttgcctacactaattgcctccacctctcccctctcattagcagcaaaggccacttctctgctctagccagaaagaacttccatcccagtcaacagtatctctggtcctaggccatgttctagaatgctcagagcctctgctacccaagagctgcagagcaggaatctgagaagtgccagccaaagcttccaagcagccagaaagcctgggacctaaagagagcaagaagaacttatatgggggcaccagagatgacacctggtcgcagcagcttcttctcctgctgatcctggtccagggcctgtggcttgggaatatgtgggaagcagtgggtaagagcctgaaccaggcaggggacacttgcaagtcaccagtggtcctattgatgaatccgatgaacacattttcatctttatcttatttgatctatcagggatatctgacaattcttgaggctcttggctctgtgacaactaccccctcctgtagagctttttgctttactacttttttgatcactcctcagtttcctataggttttttcttttttaacatctgcccttcaaaaagtggtattcccaagggttttaatcctcaacattcttctctctctttatatgagtgatttccgccttcagggaaggggcatcacgaccttttccaaatccggtgaaagtaatggaccctctcccgagctggctgcaaacacccagtgccttgcatataatttcaggggtttacagatgctgcgatgcttatccctgctctcccaccaccttcttgacctggcgaagccctactcacccttgagacctagatcagacctcatgccactccctgtgggaccctctttgacccactctctccccagaggagggtaaaagccacggtccactgcgctgggctctatctcagcaccagcccactgggtttaacagccgcttccctgcctgccctcctacaagtctgtaaaatgagcttcctgaggtcagagaacattttatattcttctttgtatattccactccatagcagagtacctagctcataaaaggcactcagtagacatttgattataaataattatgtgaattgaatctattttcaaagcaaccctgtgaaatgcatatcaaaattcttactttgcagctatagaaaccaaggctcaaagtgaattatccttagacccaaagtcaggaaggggcagagctgagccgaaatcctggtctgctggccttcatagctcattctcatctcactatgccaggctgctttgaacccctgtggtccactaacagcatgtcccctgctcttcctggctccctccactggagtcagggttgctactactgagatttacagaagagaactagcccagaaaacaccagatctggccacaccaaggactgggtgcttcctcttcttacacccccgtccccattatcaccatttgggtcttaggtgggatcctcatggatttaagtattggacaaagagaacatcccttatagttcctaatcttcccacaaattaaaacccagaacaaagcgagaggcctggcaaaagcatcaggtgggagttcaactccatgagaccagggtgccaggctgggacgaaatagaactaaggactaaggatcaaagcagaagcctaggcatccatccattcatgcacttactcattcgctgattcactcagcaaatatttatcacactcctgctgaatgtcaggcactggtacatacaccaaggatgcagcaataagcaaaaccaagtccctgacctcaaggagcttgcattcagctgaagggtgataagcaataaacaaatacagaagtgctgtggtgtgttggttgctgacagtgctatggagagaggttgagcagagcaagggacctggcagtactggccatgctggccaactagggactaagggaaggcctcactgacatggttaatttgaggagagacctgagaagaagagggcaggagttaagggatatctgcaggaacaatgtcctaagtagagaaaaaagcaagtgcaaaggccctgaggcaggaacttgctttgtatattcatgaaacctccaagaggccagtgcagccaaatagagtgagctataccactgggagaaagggggaatcagagggatgcagggataagcatggtggcctgcaaataccacatcccttttctcttccctgctcatgtctgaacaaaatagtaaaacagactggtaggtggaggcccaaatattacctcgcttactaataaaggctaagttggaaaatggagcttaatgtgacagtcagatggaggctgctacatgaacccagaatgagatggattcacccacccacagaggcaacactgcagtggggcatgcagccctgcaatgttggggatagcctccctcctcaacagctgagagcagccgagaacattgctccctgcagacaactaggtccctagaaaaagaagggatgctgagccaaacatgccagctcattactcccaagttgcacagatcaaagtgcactaactgaactcccttgccatggaaggaattggaggtagtgggttctctccaaacagcagctctgcttccccagtttacctgggctattgatctagcagagtgactgaactctgcaccagtcttggttagtattcactctggttctacaaggttggctcaggaatgaggatgggcctaaaccagctgacagttggccatcagtatacccagcaattaagaatggatctggggagccgagggcatcagaggcaaggaaagtaagatagcactgaccgctcagaccacagagaaccacagtccagtcctaacaccctatgggaagtcatagaatgattgatctcaagttgtccaagctacagacatatcttcaaggcagacagaatgttcccctgacaatttcagtttataaaggttttacagcaaaagagattgaagttagacttagggctgaacttcactgatggcctaagagatgccaggtgagaggtggataaattctgaggggtgtggaatagtaggagggcttacctatcttctgttttggttacagcaattacctgtggacacccaggcaaccctgtcaacggcctcactcagggtaaccagtttaacctcaacgatgtggtcaagtttgtttgcaaccctgggtatatggctgagggggctgctaggtcccaatgcctggccagcgggcaatggagtgacatgctgcccacctgcagaagtgagtcaccctttctctcccaatccagtccccaccatctctgctatatgtggttctgtagctcagaaaaagaagccagtgaattcattctggcatcattctgatccagatagggaagatggagcagagaagggtcataaatgaggactttctcaacccttagataaagagccacataaaatttcatcatcatgggttatataaggaaagcaaaacttaagttttatctttcaagtcgtcttttttacctttcattgaacaaataatgtatcattatcttataaagccccgttattttttaacagaggtttatttttctcacataaacaagagatctagaagtaatattatttctgcagctgctccacgagatcaggagcaatatcttggtctttccttgtggttgcaaaatggctgctgcagctcctttggaaccactcttaagagatccccattcttgatgaaaaagcagagggttaaaaagcagagagcctaagagttgagataaagggggtgagggctgggggaaaacacacagagaggaagccaaagactcaaaaggcagagagaatacagaatgtcctggctctatttggagtatttaggaaatagcttctaacgcttttagaggcttttgacagcagtgaagcctcagagagcctcatcaaaagtaaaaatccttaaaggcttatcaaagatttttaaaaaataccttcctgcccacttcatatgataagtttgagactcaggtaagataatggatttgaagatgtttggaaagaaaagtatagtcatgggttatgaataatgttgtcattattctaaaatcttatcctgattttgagttaagctgctttggaaacacttttaagattttaaagtcaaatatatcccccaggatattaatatgtccctgaaatactcataaaagtgattaaaaccattttcaaaagagcccaaccctgttcaagtcagttcaaatgcgtcagttttacaattgacaagctttgctgtgggaggcacattgtgctacgatcagatatatggagactagacattcatgccctcaagggactcgtgtgttcaaacaagtcacagcacaggctggtaaagtcagcaatagcgatttgtgcaagggagtaccagaaagagagtaatcaatctgggaagaggtgggaggagttctctaaggaggtgatgtctagctggacatggaaggatgactcttctgaccaggtaaccaaggtgaggggagaagtccagcaaccttgggaccagctcaccctcccgacagggtctgcttcattgcctagttttgctcggaagattttactatactgggaatccatgcctgtttggacttctgttcaattgcagtcatcaactgtacagatcctggacaccaagaaaatagtgttcgtcaggtccacgccagcggcccgcacaggttcagcttcggcaccactgtgtcttaccggtgcaaccacggcttctacctcctgggcaccccagtgctcagctgccagggagatggcacatgggaccgtccccgcccccagtgtctctgtaagtagatgtcacctgctcaaaatgactgatggggtggcccgtgtcaaagaacagtcctcccctctgtgcatgtgtgtgtgtgtgtgtgtgtgtgtgtgtgtgtgtgtgtgtgtctgcacatgtatgagttgccttatggtgacagtcactctggctactcctgggatttcagattccttcttgagcctctgttgggtgacttccataccaatttttgtgttctcactttcctagctagaggcctggtccctttcctctctagttaccaccctcttcagcttacagagttcccttttttcagaactggctgcctcgcgggacatcatctcccaactttaccttttccttgcccttccagaaacacagcacatgaaccccttccctttaaaggactgaagcagagaggtcacagactctggaggcagaccaacttggactggaattctggctttgctactgaacaagtagtgtggtttgggaaaaattcactaacctctcagagcgtcagtttcttcatctataaaaatgatgccagtacctattccatagggttattagaggattaaaggggaaacaaaatctattaaaagtcccagcatagtatctggtacatagtagctactcaataaacaatgaccacattaattattgttaggaaaagaattggggacaactggttttttaaaaggggttggggaggtgctcagaatcctgatgtattagtctgttctcccactgctataaagaactgcccaagactgggtaatttataaaggaaagaggtttaattgactcacagtttcacagggctggggaggcctcaggaaacttacaatcatggtggaaggagaagcaaacatgtccttcttcacatggtggcaggggagagaagaatgagcaaagttggggaaaagccccgtataaaaccatcagatcttatgaaaactcactcactatcatgagaatagcatgaaggtaactgcccccatgattcaattacctcccaccgggtctctcccacaacacgtggagattatgggaactacaattcaagatgtggtttgggtggggacacagccaaaccatatcacctgacatctggtccctggccttacacgtccttaagagaagagcaaccccttggtttcctgctctcccctctgtttcctaaaggtgaatccacatagatttctctctcccccatcttccaagaagcaaaggtgaagatgcactcaagagggagtaatagatatgcagttaaggccatgcagcagtccacctacctttggcagattatatacattttgtaggccctccagtctggacaactgcatttttttacgccctcgtggctgtaggtctaacaggagcctggtatagctgctcactgcttgtattttcctcgcttgagaactctggcctggccatccaatcccatttatgaccagcaaatagtttggggtcagaaatggacaccacctgtgtacagtggtgccagctgagagtcacagcccctagtggactcaaattgttttttcttctagtaaaatgcagcttttatcataataaagtgaccctatccatattaactttttgtcccaatgcttgttttctctaaagttaattcagtcacatattcaggctcctcttctaattctggttctcttgctgctctaattctggttctcttgatgctgcttcagtggaggagtgagatcctccaatgaagtcttgaacccatcaaagtcatgcatgagggttagaatcagcttactccaaactcctgttaatgttgctgttgatattactaataggtatatatattaatatagaggcatacattggagatattgcaagtccagtcccagactactgcaataaagcaaaaatcgcaataaaataagtcacacaaattttttagttttccagtataatctaagtgtgcagtagtatcatgtcaaaaaatatgcacaccttaattaaaaatactttattgctaaaaaatactaacaatcatctgagcccttagcaagtcatactcttcgctggtggagactttgcctcaatgttgatgactgcaaactgatcggggtggtgaaggctggtgtggctgtggcaatttcttgaaataagacaacagtgaagtctgccacatggattgactcttcctttcatgaaaggtttctctgtagcgtatgctgctgtttgatagcattttacctacacagtataatgcctttcaaaattgcagtcagtcttctcaaatcctgctgccactttatcaactaacttcatgtgaagttctaaatcctttattgctgtttcaacaatgttcacagcattttcaccaaaagtagtttcctgattcttctcaggaaaccactttctttgctcatccacaagaagcagcttctcatctgtttgagattggtcatgagatttcagtaattcagtcacatcttcaggctccacttctaattctagttctcttgctacttttaccacatctgcagtgacctcctccactgaagtcttgaacccctccaagtcatgtgtgaggggtgcaatcagctttttccaaactcctgttaatgttgatatttggacctcctcccatgaatcacaaatcttcttaatggcatctagaatgattaatcctttccagaaggttttcaatatactctgcccagatccatcagaggaatacactatctgtggaagctatagccttatgaaatgtatttcttacataataagacttgaaagtcaaaattatttcttgatccatgggctgcagaatggatgttgtgttagcagacatggaaacaacattcaattcctgtacatctccagttctgatgtacaggagctcttcatcatttagcacttggctgaccaggtgcattgtcaatgagcagtattattttgaaaggaatctcttttttctgagcagtaggtctcaacagcgggcttaaaatgttcaataaaccatgctataaacagatgcgctgtcatccaggctttgttgttccatttatagagcacaagcagagcagatttggaataattcttaagggccctaggattttcagaatgggtaaatgagcattggctcccagttaaaatcaccagctgcattcatccctaacaagagagtcattcagtcttttgaaattttgaagccaggcattgacttctctctagctatgaaagtcctggatggcatcttcttcaaatagaaggctgtcggtggctcatgcgtgtaatcccagcactttgggaggccgaggcaggtggatcacaagatcaggagattcagaccatcctggccaacatggtgaaaccccatctctactaaaatacaaaaaaattagccaggcgtggtggtgtgcacctgtagtcccagctactcgggaggctgaggcaggggaattgcttgaacctgggaggtggaggaggttgcagtgagctgagatggtgccactgtactccagcctggtgacagagcaagactctgtctcaaaaaaaaaaaaaaaaaaaaaaaaggctgttttttctacctttaaaatctgttgtttagagtagccaccttcatcaattagcttagctagatcttctggataacttgctatagcttccacatcagcacttgctgcttcaccttgtacttttatgttatagaaatggcctctttccttaaacgtcataagccaacctctgcttgcttgtacttttcttctgcagcttcctcaactctctcagccttcatagaattgaagagggtcagggccttgctctggattaggctttggcttaagggaatattgtggctggtttgatcttctgtccagatctacctaccttccatggtaggtggatgccaaggacgatgctaaacgtcctacaatgcacaggacagccccctacaataaagacttactcaaactttctccatgttggcaataaggctgtttcattttcttattcatgtattcacggaagcagcccttctaatttcctgcaggaacttttcctttgcattcacaatttcactaattgtttgattcaagaggcttagctttagggctgtctcagcttccgacatgccttcctcactaagcttttaatcattcctagcttttgatttaaagtgagagacacaactcttcatttcacttgaacacttagaggacatcatagggctattaactggcctaatttcaatattggtgggtctcagggaataggggcactcaaggagagggagatagacaaggaatggccagttggtgtagcagtcagaacacacacaacatttatcaattaagttctccattttatgtgtgcatggttcatggcgccccaaaacaattacaatagtgacatcaaagatcactgatcacagatcaccataacagatgtaacaataatgaaaacgtttgaaatattgtgagaattaccaaaatgtgatgcagagacatgaagtgagcacgtattattgggaaaatggtgctgttaggcttgctcaacacagggttaccaaaaacctttcatttgtaaaaaaaacaacatctgtaaagcacactaaagcaagacacaataaaactaggtgtacctgtaacttataaccagcttccttcttttagtattggcatgatttttttatcattttatttttaactgctctctatgtaaaaagcatgtaattgtgatttttaaaccctatctgacaatcttttctttcaagtggaggatttaatccatttgcattttttctttctttttcttagtgaaatataattcacacaccataaaatgcattcttttaatgtatacaattcagtgattttagtgtattcgcaaagttgtacaagtatcatcactgtctaattccagaacactttcatcattcccaagcagcccttaaaagtcactccccattgcccaccccaccccagcttctggcaacctctaatgtacttttctgtctctgtggatttacctattctggacatttcatataaatggaattatatgtgtgtcttttgtgtctggctacttccacttaacataaaattttcaaagttcatccacgttttagcatatatcaatactttattccttttggccaaatactatttcatggtatgaatataccacatcttgtttatgcattcgacaattgatagatgaactgggactattatgaacatttccactttgggactattatgtttccattttttagctattatgaattatgctggtttgaacatttgtgtataagtttttgtgtgaacacgttgtcaattctcttgggcatataccttggagagaaattgccaagtcacataggaactctatatttaactttttgaggaactgccaaactgttttccaaagtggttgcaccattttccgtttctaccagcagtgtataaggattacaatttctccatattctttcctatgcttgttattgttcatcatttttattataaccatcctagtggatgcaaagtgctatctcattgtagtttacatttgcatttctctaatgacgaatcgtgttaagcatatttttatgtgtttactgtgtaacaaatcatagtgacttaatgcaacagccattttcttgcttatgattggcaattctggcagggtttagtagagacagctcatctctgccccacatgttattggctgttgtggctcaggtgggcctagaagatccgagatggcctcactcatatcttggcactggctgtcagctggggcattgtgattgtccatggtccctcccctcatatgagttcttgtcattccgtagtctctgccaaacttccttacatggtggcatagtactccaaacagggaaggtagaagctgccaagcctcttaggatgtaacctggctcaacatcacttccaccatgttttgttattcaaagcaagtcacaaggccagcctgattcaaggggaggggaaaggggaaaaagactccactccttgatgggaggaattgttagtagcagcagtctttgcagataatctaccataagcatttagaacaatgtttgacccatattaagaccacattgagaagtgaagatacctaagacccattcttaccatcccagtacctaccaaaattcatcatcagggtcagcactggcccaacccaggttttaccacttggtcacctgttgtggtctgcctgtatgctatgccctgtgggctttctgggtatgatgtctacagggatctcctaccagactccaagacattatcatctctccttgaactactgcaacagctccctctttcttgtaccacctggtcctttctctacacagtagccagtataatcttgttaaaatgtaaatccgatcatataactccagtggcttcccaagatgctcataataaaatccaattttcatgccatgatctggctcatagtgacctctccacccttgtcttcttccattctgtcctggctcattccagtcccagcatccttggcttccttgctgtctctcaaacacagcaaactcactctggcctctggcccgttatacctgatgttccatccccaacaatactcttctccaaaattttgcatggctggcctcttcacatcattcaagtaacttctcaaagtcacttgatcttcccaaacacacggagtgtctagcacatgacagggactcaataaatgtgtgttgagtaaatgagagaatcttaggatcaacctgtgatcctgtgacaagaccaatgggaagaccagccccagtaatgttgaaagcattacccttgcctagacatctcaattctggtgttctatcttctcacttgttttcacagctatacttcagtattttagtaaagggaacttgcatactgagagggacaggttggggacaactgatgaggcaactgtaagatgcagatggaaaagggctataattggctttcattctggaatccttggccaatgaagacaatctgagggtgacagagctcccatttttgtcttgtgtatactctgcgtaccaccttcctgcccagagacatcatgagtatgaggaaatagggagaggtaagcataagaggcaagagagaaaacaatctaatgttattgtatatctgctacatgctgagaaggtattattcctcatttcatagatatggaaaactgtcccctgagtggacattgtctgccaacgccaggtgggcatgccagcaggaagtttgcttcaacagatacccttgggtttctcttcttcccagcctcttgcttaaagaagcctagcatggattgtgtgatggtgagccatccctgtgcagagtcattgagatgtttgcttttcccccacagtggtgtcctgtggccatccgggctccccgcctcactcccagatgtctggagacagttatactgtgggagcagtggtgcggtacagctgcatcggcaagcgtactctggtgggaaacagcacccgcatgtgtgggctggatggacactggactggctccctccctcactgctcaggtatggtgcatggcattgaggaaagagctccagtggaatgcttgactgatgggaggtagacgagcccccaaggtgtgagtgtgattgatggatgggagggaatcagacctcagaacccttatatctaccctaacaggtagaaagcacagcaagacaaggtcccaatggagcttcagcttctggtgggctgagccctgccttatcccctcagtcagccctgaccatgcccagggattgcaaaactaggaggggcacaactttttaggtcaacctatggccagagtcctgtccagacacttgattttatgagttcctggggacagttcaagtcttcctgttgatcagctcaggtccaagcccactcctgtgttcttttcttctctgtttcagactcgtgctcaggtccaagcccactcctgtgttcttttcttctctgtttcagactcgtaggccccagcctccttccctttcttatcactgcccctcaacttgtcctatgtcctggctacctagtggggtacagtcttcttctctactgccttgaaacgccagtccccagacttttcctgttaagttccttttactgctaatgaggacactgacagatgctatcaaaatcgcaaatgtagagaactgccaaaggtcctatgtccacagtatccaaaccagaaatgaatgtgtaatgccatatagcagaacaaaattttgcaagtgaattgtcctgccaatagcagaaaccaccaagctaaaatattagtgccttgcagctttgtcttctttgagggggacctgcctggccctaggaagggattccatgttgcctgcaagagggagctgcttgtgcagcttgatgttcctcggagggcccaccttggcattgaaattaacccgtaacccttcccatgccagatcccttcagaggaaaggatcatgacctcctcctaatacagaagccttctccttgatgtaggaccttacccataagatgtgccactgttcttgcagtttgacattcccagatgagcctgcctcccaaaagttaggtcactgccagaatatttaatgagatattcattagatctctccagaaagaaaagagtcccaaagccactatttcaaagggctgttggttgcccaggaaatcccagacacatcactctatatgaccacccaggactttggcctctcacccctattaatctcattaaacacctaattaaggaaccgggcaggactatataggagccatgatgactcatttagctgggctagaggaaggcctattaactgtgccctggcttctttctgtttggacatctggtagaagtgataggcaatacagcatgagaggacaagggtcatgtacattgcctctccagcctccctggagctctctgaaaacagaattagaaggaattcaatgtacgcaaaggctagacaatgagtgaaccttaaatcccttggatgagaacataagggatgagaagaataggcaattaggaagtaacattaggtatataccacagatatagagatagttcctcccttcctgaaacaatgtcgtcttttgcagtggcatctcctgccagtcctatgaaatacacattcatgaattccaggtcaaagtttttagtctcattgtgtgcaagcagtggacccaactgttgcacaacaaaacctcttaagtccttgagtcatacaccactgggccaccaaggctatggagagatttctggagtttgagacctacttcaagaagttcaccacccacatctccactgtcattctctttgcctcttcggtaaatagttgccatctatctactctgcccccatggtgcaatatcctgtccagactcccttccatcactgaactagaagcctccaatactgtagtgggggccattctttcagaaaaagcccctaggactgaacaccattgtattagtctgttctcatactgccaaaagacatacctgagcctggtaatttataaacaacagaggtttgatcaactcacagttctgcaggctgtacaggcttctgcctctgggaaggtctcaggaaacttacaatcatggcagaaggggaagcaggcacatcttcacacggctgtcaggagagggagagcaaagtgcaacacactttcaaacaaccagatctcatgagaactcactcactatcacgagaacagcaagggggaaatccaccccatgatccaatcacctctcaccaggtctcttccccaacctggggattacaattcaacatgagatttgaatggggacacagagccaaaccacgttaaccatcttgtgcctattttacaatagtgctagctccagctgaggttagctagccagtgtgtgggttagagctgctcaccatcaagattgtttccagggagacccagttctgcctgttgtgtgaattacatcctggcaaccttcaaaagataagaaaacctagccaaatgcgataagctctcttttattaatgtttacattgaaggttgaaaatgaatccctcttccacagtgggaaacagaatggagaacatgtggttaggtagtgtctcacagtctgagtcgagactaggaaagggaataatcccaaggttgagaagtggaaaagacataaatggcaagtggtggggtacacatgacttaaacatttattggctccagccaactagatgtggtcactcagatgttaccatttgatgcccacacatggttacatgaggagatagattccatgatagttgtaactttatcttttcatgcagttgtcatttattcggtaattgttctcctctttcctcatgtttaccatggcctggtctgatctaaggacatctcctacacatttctgtatcatgaaatgtgttggccctgcaggggaccatagatcttgtggctttgtctcctgttctctacccttcttcgctccttgggtccttggaggtctcttgagtgggtttgcacaataccagaagccagagaaatgtaggaatgtagcaagaggaagggggtgaagcaaaaatgaaatgagagggtctgagatgtttattctagagctcacttgtatggcataatttgtgagtagggaatccttaatgaaaggcccagcatcgatcaccttgaatatttatcatttctttgtggtgagaacatttaaaattctctcctacagctacttggaaatatacaatacatgcatcaaaacatcacttcctaccccataaatatgtacaatgattatttgtcaattaaagataaaatgaaactttttaaaaagtaataaataaataaataaatgcccaagatcaagattcaagctaggcggttaagaaatgaagctatgctaagcagtttggactttatcctatggcatcggggagccagtaaagatgtttctgcaggaaaaaattttttgaaaaaaaaaaaggtcagatggttagtgattgttaagattagaggacaaagtagaagatggattagagggagagtttacaaggaggggacattagtcgggaggctcttgcaagagttcaggcaaaagaatgttgaatgtctaagctaagacagtggcacaggagaggagatgggactacagaatcagcaggtgtttgtagagaagaggggaaggggagaaggaggacctgtggccagtttggatcactgaaattccagactggcacgggccacagagcctttcctctgccttcttgcttcccctccctgtgtggttcccagggacttacccatggcctcagatctttgtgttcttccaccattgcatatggaggcaggagcatgtgcaggtaacttgtgctaggcctcattcgtgggacccactgcatccccttagtcccatcccagtatctttctcccctgcttctccactcccttttcttccctgaaaaataatgggatttgtgtggttctggtccataggaaccagcgtgggagtttgcggtgaccctgggatcccggctcatggcatccgtttgggggacagctttgatccaggcactgtgatgcgcttcagctgtgaagctggccacgtgctccggggatcgtcagagcgcacctgtcaagccaatggctcgtggagcggctcgcagcctgagtgtggaggtaatgtatgtgaccattctgcttctcccctttgcccagccccagagctcgcccctgctcctgctcttattcccaggcacctgcgctcacagaaaaaaaccgtggccccatttgaaccctcagcctggctgataggactgcaacagataattcatgtgcattttcattagtaatcaaaagacaaacatattcccactctcacctcaaaagggaagaaatcaaaaaagactgaatttgacccactatttcattcatttcccatatagtttcattcagcatctatgtgccaagtgctgtggaatgtgctggggacacaatggtgaccaagacggacactgccatggtctggatatttgtgacctcccaaaaatcatatgttgaaacctggtcacccagtgatagtattaggaagtggggtcttgggaagttgttaggtcatggaatgggattaatgctcttatagagaaaagaaaataccttagaatgctccctttcccttgtgccatgtgaagacacagcaagaaggcaccatgtccaagcctgaacagacggagacacacatcttgatctcctggggcttacagtctaagggaagagactacgtgaaacaaatattcaatgtgccaaaagatatacaaatccaattttagaaaactctcaaagtaatctaggccctcagtgatgttgcctgaggtagcaccaatgggagaaattatcatttttccatatattcctaagtttctggggaaaatgtatatttttaaatctctctctcctcttgcagttggtccccaaatctctctgtctctctctttctaaaatacagcttgcatagtactctcctaggcaggaagcaggcttaacagatgagagtaagtttgagtgagaagatctggaagaggaaggagataatcatttagcaagatacaagtggaatggaattgggaagtgtgtaatggccaggcagcactgagcgctcacttaaggtggggggatcattaatttaaagtgagagcagtcagcatgggaccatgtttttgttcaagctcattttgctacctagttgtgggcacagagcagacagtgcattgggtacagagctggagatttgacaggcaactaagacattggcagaagtggcaagggaaaagagggtgaatgtgaggcagagattatatgtgtatatatatatatatatatatataaatgcacagtggtcaagtcagggcatttacagtgtccatcactcaagtacaatacatttttgactatagtctccctactctgctatcaagcattgaacttattttttctttctaactgcatgtccatgccctttaacccacttctcttcatcctccccctcccctgactcacccttcccaggctctattatctgtttttccactctctacctccacgtgatccccatgtattttcaatttaagaagttattttcacagctctaactctaaaagtctagaatcaatgaccagatcagtggcaatgagtactcttactgcctggattgtggtccattctccattaaaagaaactagactctctggagaaatggctaattcccgggctggtgcaggaaatatacaagacaaatatggaggccgggcgcggtggctcacgcctgtaatcccagcactttgggaggccgaggcgggtggatcacgaggtcaggaggtcgagaccatcctggctaatacggtgaaaccccgtctctactaaaaatacaaaaaaaaaaaaaaaaattagccggtcgtggtagcaggcgcctgtagtcccaggtactcgggaggttgaggcaggacaatggcatgaacccgggaggcggagcttgcagtgagccaagatagcgccactgcagttcagcctgggcgaaagagcgagactccgtctcaaaaaaaaaaaaaaaaaaaaaagacaaatatggaacatcttgtcactccagcgaggattccaccaaagataactgaggtcatgttaactggactcaggagccaactagaagaggctcctattggctaaagatggagaatctgagcatcaataagaataataatggcaatggatgggaacataaaaaatatctttagatccatgagttcaaaatgattcttaaataaacacattggtcacctttggagtttgctaggaaaccaactcattattctgacatttgatttaaaataaaaaccacacacaaaaaatcaagcattatctggcgttcctatatgaacagtatttcagggtaagcaaatatttgatgatagaaaatgtctttcctaaagaactctagctaatgcagaaagaaggatagaattagaatatcaccactttccaatccctaatgaaataatgaatctggtcaatgactgctaaaactattaaatgaaaaacttcataatggaaacttcataatgccacattaggcaggcatgcccgaaatcactgatgagcctcaacatcatgaacaagaaaacacccagacattctttgcttcttatccaatgcaataggagaggcccaaaaccacctatgaataccattgccaaaaggcggaacttgattacaggaaggaactacaggggatagaggaatatgttaaactatatctcattgatgcagttagcaaaatccagaaagtgtgaagttctataggacagatgttctggtttctgtaacaaataaattatagaagcagaaataatcatctctgggttcaaagtcttagagacgtgtcaaccaaatgtcatgtgtggaccctatttggatcctgattcaaacaaatcaactgttaaaaaaagagaaaaacaactgaggaaaatcaagcactgattggatatttggtgatattaagcaattgtgtttaaaattttaaggacgataatagaatagatcatcttttttctgtaaaaaactggaatttgctcagaaatttcaaaagattcataggggtctctccttcctgtctaggggcaagataattcgatacaaaagcagcatgagaggcatttctatccacgaggtcccgaggtagcatgtggcttccactctgggcagttatcagtcccctaggtgatacccaccattgttctggtgaataatgtgtatttttgtcttcctagtgatctcttgtgggaaccctgggactccaagtaatgcccgagttgtgttcagtgatggcctggttttctccagctctatcgtctatgagtgccgggaaggatactacgccacaggcctgctcagccgtcactgctcggtcaatggtacctggacaggcagtgaccctgagtgcctcggtgagagctcaggccctacgggttccatggccaacagtggcccagatcctgcatgccagaggagaaggctatccatggaagatggtgcagaatggttgggatggtcggacttgaacctgaacgataatcatatgaatagcctctgttgagcatatgctatgtggcagccactgagcgaagtactttatttcatatgcacatttcatttgatcttcaccataactccgtaactccgtgaagtagctactattatccccattttgtatatgagatggctgaggctcagagaggcagagaatatatgttggccatttctcaggctctagccaattccttgggctttcccttttatctcttagaatcaaaccccagagctcaacctgattctcttttcacttcaaagatgcagctatctgccatctttgttgcttcgttctgtccttgtacccgaccccacccagtacgggttcctgagcacggtgtagcctcacagctccaatttcttgcttctctcaagggtagtcccagttcttttctgggaaaagtgagtcactgtgggatccagatggagggaagagataggatgaggaaatgtgacaagattctccctgtcaaagtcctagtctgtgatttcgactccctctgaaatcccgtgtcaagttcactttggttttgagaccagagctcaccaagccccaccctcaatgatatgatgacataggcatgaccctttcatgggccataagaccctgcttccaggctgttgtccctaggagtcctgtgtaggtgctgttgggcctacagaggcctcgtaggtacaacagcaggtgataagatgtacccctcagcagacaaatcaattgtctcatgtggttcattaatataccttaggttcttcaaacagaaaactccctttccctgggtcctagcctcatttaggaactgagccctctggatacttcctcttagagggggcactttgaataaggtgaatcttcatagcccaagttgcagcggtgcataaggacagtgtgggcaaggacaggactgatgccagggatttgacaaaacaaaatttaaaatgggcaagctgggtgtggtggctcatgcctgtagtcccagctactcagaaggctgaggtgggaggattgcatgagcccaggagttcgaggctgcagtgagccatgactgtgcctctgcactccagcctgggtgacagagtaagaccctgacttaaaaaaaaagaaatttagaatgggtaatgtccaactgggatcctgtgaggagacagggcatccctgatctgacagtttcccttcttggatgcatgcagggagtgatagggatggtattggaggagaagtggggtcctggccaggagtgaacaatgctatatctctcttatcctagtcataaactgtggtgaccctgggattccagccaatggccttcggctgggcaatgacttcaggtacaacaaaactgtgacatatcagtgtgtccctggctatatgatggagtcacatagagtatctgtgctgagctgcaccaaggaccggacatggaatggaaccaagcccgtctgcaaaggtgtgtctggggctgcaaatgtggacagagagccaaagaagatacaaaagtgagatgtaggccctgagcatctctctagaagggagaggggtgaaaggccagccctaacatcttatcaggggatgtgcaaggtgagaaaactggcccctgaacatctgccaggagtgaatcagaagtaccaaaataaggcctgggccatgaacattgaggggagggtcccgcaaacagaggactgggttgtcacacttgagagagggcattgtaaggtgcaaaaagatcagaactcccacagtaagagggccccattctggttcttcctgtttagcccaggctctaggtgggtgcagggtagtcggtgatatcaatgatggtgacgggggctggtttcccaggacagcatcagaactcagcctgctttggtctccctccagctctcatgtgcaagccacctccgctcatccccaatgggaaggtggtggggtctgacttcatgtggggctcaagtgtgacttatgcctgcctggaggggtaccagctctccctgcccgcggtgttcacctgtgagggaaatgggtcctggaccggagagctgcctcagtgtttccgtaagttgcttacaagggcctttggtgcatcctcttcaatagctccttccccttgcctcctcggagctttgtggctggaaggcccagaataggtagtcccctccccaaaaccagggaggagcttcatcaaagacactattaaagagggaaggaagtggaaaggaagaaaatgaggatcccttaattgagccctggtgtcagatactgtctatggtaacagaaggaaattaagctagagatattgggggtgtttttttttttacctgaagggttgttaactgtatggaatagtactccaagatctgagggttcccagtgctatatacatgtctgttttcatgaaaaatgacctgcacagaaaagacttctgggaaacctgtgattttctggtgagttgctttattttttatacacctggcccagttgtatcctgaggagccccaaatctattccagggcttactctttactgagatccccagtaagcaggttctgggtcacttattcttgtcacaccctgtgaatgggctctggaaggttttctccatgcccgtgctttgggcaaacagtaggacgtatttttctaattgccatttatctaattctgcagaaaactatccacatactcatgatactgttttgggttcctctgaaaatttgcttccatctggggatttcctcagagattagggccagcagctcaaaactggacacaggtatttggtgcaatgttaccctttccaaccttcacatactaccagggtcaagtctggactcagccaccttgcttttcctctggagaaatagctgaagtgccttttaacaatgaattatggtcatcatgaaaaaaattttacccattagaaaatacaaaaaagaaagtaaaagtcatctgaactcacactttccaatgataaccacagttcagcttttgatggtgtcccgtgtgaatcactgtgcatttttgaatagatagtgatatgtatacattttctagaactggtattggctcatgctgtacatactgtttcataacttgtattcactgataggccaccaaaacctttccatcaatacctttctacctttctttatcaatatttactgatctatgcatcatcatttttaatggctttaaagaatttccttgtagatacaagttatttaatctttttgcactggtgatgaatttagattatctccaacttaatcacgttagaagcagttctgcaatatgtattcctgaaaattgcctttcttggccgggtgaggtgactcatgcccataatctcagcactttgggaggccgaggtgggtggatcacgaggtcaggagattgagaccgtcctggctaacaaggtgaaaccctgtctgtaataaaaatacaaaaattagccgggcgtggtggcgggcgcctgtagtcccacctactcgggaggttggggcaggagaatggcgtgaacccaggaggcggagcttgcagtgagccaagatcgcacccctgcactccagcctgggcgacagagtgagactccatctcaaaaaaaaaaatgcctttctttactcctgcagcaaagccctaggcatgagaatgctgggccgagggcagtcatgcctcccttcttgacatatgttgtcaaactgtcttctagaaactgtcccaatttacattccccacagcagttaatgagaatgtttctggatgcacaccctcatcaataatggattgtgccagtatttttaaatatttaccagcctgaggagctttaaaagatcgctcattactttaattggcatcacattgcttatgagaaaggccacgctggttgctcttcacttgtcagccgtttgtgtttctggttctttcagttgcctccttctggatacagtaacttcccatcaatcgattcttaaactgacttctaattggtcagcatagacaccccaaccttcagggcagaggatgcaggtccagcttcattttattttgcatgtggttatgtatctcatgactccatatacacatacacacagacacacacacacacacgcacacgcacacacatttgcatcatagcataaagcaatgcttgaagtgacatcgtggtgagctttgcctttggtagtcaatttttaatggcactgcctgatgttaacatggcctgaatgaaatgggtacacccatgcactacccaccgcagtgtaaatgtgtaccctttggggaaagacatttgacactacccatcaagagctgtggatgtgttcagccctttaaaaataataagttcactcctagagaattctcctaagaaagtaatacatgtgaaaagaaaaaacaaaaaagaaaacaaaacaggtgaaagaagagttatatataactgtataatagaaaatgcccaatataaggattatgataaaatataattatggtacaaccacctgttgctaattgtgtagccaataagcgatgatgatgtcataaacataggaaatatttacaagataatgctaagtgaatgaaacaagatttacgatcacataggcttgggtttgccgctccgcacaagtttccatacaactgaacaaagattggaaaagaatgtgcgtgaaaatggaaaaaaagttttgaatagtgggattttcgtttatttctctttcatgttctaaacttcctgtaatgttactccattacttggatcattattaataggcactttgaatgtagaagggagaggaagcccccatcagcagcagcaccgcagcaggtggaagcacctacctggggctgccccggttcccagagttcaagctcaaccaggaagggagcagtgcaaagaacaaagatgggggtgtgggactggaagattgggttctggaaagcaacttagacctgcctttctcccttcgtcttcccagctgtgttctgcggggatcctggtgtcccgtcccgtgggaggagagaggaccgaggcttctcctacaggtcatctgtctccttctcctgccatccccctctggtgctggtgggctctccacgcaggttttgccagtcagatgggacatggagtggcacccagcccagctgcataggtgagaggtcatctggagcagggagcgtcttggctggggttgcgggagaccttcttttgggcctgagatgattactttccttccctgtcttcagtggtctcatctgcaaaagggaacatctcatcctctgagcttctgcagcaggatgtaaaatagccagagctagtgtgcttcgaggagtcaaatagacagccagggccaaggctcaggtggggatctcagtgggcagggaagtcaggatgtggccgcattttcttttctacacctatttcccagagtgagatgaggccgtgaaggcttccatgaccatgtgatctgtgtctttgttttggccatccagatccgaccctgaccacgtgtgcggaccctggtgtgccacagtttgggatacagaacaattctcagggctaccaggtaaggaggtcagccaagatagggtcttcctacatcctatcccttcttgtcactgtcaacataagaggacccagagaccttcctcaggacagcactcagggaggacaagagcttggaaagcgcagaaagaaagccctctgcctctttgaacagtgctccatgggagcaccctgcagagacagcaggaccctaacatccgtcagagaaactgatgaggaaggacagatggcgtgcagttccatgaacacttcccggcaaccccaggcagggtggttgtggaaatacggaaatgagtgagacctctgtcctcacggtgcccaccccacccacagacactgggctcatgcacagtggcaacgagcatgtgccacacaggaggcaggcctgttggcatgcctggcccaccaggacacaggccctgcggacacacctcagatgagctttgggaggagagaacctggacagtctgggttgtgacacattgaacagagaaaaggatggccgggtgcggtggctcacgcctgtaatcccagcactttgggaagccaaggcgggtggatcatgaggtcaggagatcgaggccatcctggctaatatggtgaaaccccgtctctactaaaaatacaaaacattagccgggcatggtggcgggcgcctgtagtcccagctactcgggaggctgaggcaggagaatggcgtggacccaggaggcggagcttgcagtgagccaagatcgcaccactgcactccagcctgggcaacagagcgagactcggtctcagaaaaaaaagaagagaaaagaaaaggaagaatgggtgtgttcaaggcaggacaattaggtggagtccaggacttgcccaggaaaatatcggactcacctggacatgacaggctgggatctagtcaagtaatgtgacttattcacttagtctgtactcactcggcacatgcttatggccctgaactgttctaggagctaggaatacagtgggaacaggacagactgggtgcctgtttgaagggagctgcctggctgaagatgataaataaataaacgagctagcttctgagagcagtagacacgacacggtgattgatataaaggggtgtgaacggggtgggttaccattttaggaaaggtggttagggaagggtgacatttgaactacggcctccatgatgagaagggctagccctgtgcagagcagggtgacattcctggctgaacgaagggctggtgcaaaggagtgctgagggaagtgcttagcagcctgggggcctggaaagtaggccagctagcaagtctgcagccccgtgagggaggataaggaaatgtagtcaagagtgaggctaggttggaaaacagcttggtcctggtgtgtaaagttaaacattcacacactctatgacccaaaagttccacctctgcaaacatatcccagaggcactcttgcacatgtcaccaagaaacaggaaatttgtgggtatagtcacgtgatggattattatacagcaaagaaaatgaatgaattacagctctgcatgacatggatgaatcttagaaacatactatcaagtgacaaaggtggcatgacactacttttacaaatattaaaaccagcaaaaacttactaaattgtttagaggtatgtatgcacatatgtgataggattgttttttaacaaggcaaggaaattaacacaaatttcaagacagccattactacggaggggtgttgaggaacacagcagggaaagagcccctagaacattacaaccatgtccatagctcttaagttgcatggtggattcaatctaaaatatccattttattattatactttatatgtgttccatatattattttgtgtatgtcggatatcacataatttttgcaaaggcggcagcatgggacaggtcatgcagggccttgaagccatgataagtattttggattttatctaaaatgccatttgaaggtgacacaatctgattcttcatttgaaatattactcaggctgctgagtagagaatgaatatcagggagttgagaatagatgcacttaggcaaggaggacactgttgtcatgactccagggaaaaagaaggtgagaagtgatcctgaacgcttgttcgggatacattttgtaggcagaaccaagaggactcattgatgggttggattgtggggtcgaagggatcaaagatgacttgaggttttttatttgcacaactgcatggataaaggtgccatttgctaagtcaaatgatgaaatccaagacaaaaaagtgttcagcatggaagaagggagtggaatttaagagttacacattgcatttgcacatgctccagtaggtaatagggacacataagtgtttgaactgggaagtagtataatccgagttgcagtataggaaacagatctagccgcattacaccaagtggattgggtagggagagatggagcccgtggttgcggggtgtcgagttgtacagtgaggggctggtggagggttaaggtagggaacataactgagcagagcagggagggagggtggcagttcgttcaacagattctatgggggccatatctgtaaagacaagtctcccatccttaaagaatttgcaatttcattgaggaaaggaacacacacacaatatttaatttgcactcttcttcacattttgtaaaatgctgtcaaatccgccatcacatttgagtgtcacaacattccagtgtgattgtggcaaggatggtcatccccactgtatccttaggaagactaaggtttacagagttccatgcagcctgccctgagtaaatgcagaagccagaactcggatccagggtcttctgactctgaatcagccaccgtgtccacaacagagtgtaatattacaactttgttcagggtattagatgaggccttgtggaggaggcatcctatcaactgcctcaaaggaagaagaaaatttaaccaggcggagaatcagaaaaagagttttgcaggcaacagtgcgggaggagttgggccatgtgaaagtggtcaagggacagacgtaggaagcaccgctgaaaggaaggggctgatgggactttgtatcttgccgcaggttggaagcacagtcctcttccgttgtcaaaaaggctacctgcttcagggctccaccaccaggacctgcctcccaaacctgacctggagtggaaccccacctgactgtgtccgtgagtgcagacttcacccacatcccaagaaaattcctcttgccccagctgggcatctgggtcatgtttgaatgctctgaatgacagggagttcacaactccccatgcgaaccgacatcggtctctttgtagtccttacactttggggcctcacagaagacttccacacaaaagcctttctgatattggaaggcaatccctatgccttagcaaagaaaaaactatccagtggcagcagcaaaaactaacaactgcaaggccaggcctcaggatggagatatcaagcttttgacccagttactcctttacccctcaggaagtgctgcaggcttaagttcccccaactcagagtcaaccaagccgatatccacatgatctccatcttggccattcctctagacacagagcttgggttagggtggaggattagggagggggatgcttggcatgaaagggactggaagggaaaggaagaggatattctatctaggaacaggggaatggtcgaaagggcccctgaagcccctaatctcctccagtccaacagggtctttcctctcatccagcccaccactgcaggcagccagagacgccaacgcatgccaacgtcggggccctggatttgccctccatgggctacacgctcatctactcctgccaggagggcttctccctcaagggtggctccgagcaccgcacctgcaaggcggatggcagctggacaggcaagccgcccatctgcctgggtgagtgtgcctgctcggggaagctctccagggcgggaggctgaaagtgctggctgaacttgagctgaaagagggcaaaagagaaggaaggaattgcgtttcaaggagctggatcccgcttctgattttctaaggttttgagtctagaagagcaaagcagagcggtctaaaaaggtgcatactcaacccaccccaagggttgccccttttgcctgggctgaaacactcacaggatcacatttcatcatcaggcagaggaaagtgctttcttccaccaaactggagtgacgcattacacatattgcacccttgataaaacagcacccgcctgtaggtcccttggggttaccaggatgtcccagacctcccttcccctcttcttcattcactcgttctctatttattgagagttcatgtggccccatgcttgcgctaggcatgagggattcagaggggaaagacacaaccctgccatgtggaagacagacacgttatcagattttatatttggagtacttggaggaacatggagatgtgccaaatgctgtaggaatgaggaggaagggcactaaagtgggggaaaggagaagtcagggaggacttcctggagaaggtgatgtctgagtccagtcttgagggaaaggattaaggttaaacgattagttcagtgctggaatagcattaaactctctgataggcactcacctcaccagataccaggcattgtgctaaatgctttgtatgtttcaactcatttaatcttcacaagatcctatgaggctatttaatatatgaggaaactagggcatagagaagttaattaatgtgtccaaggtccccagctgagaaaggttaagtgctgaagatctataccctgatggtctaactttaggatctatgactattttgctatcctgccactcagagggaagccttcagggtcagagactatatcagagctagaacttactaacggtgttttattttcatggtatcacttggaaatttcttttgttttccacatacagtagtgatataaagtacatttattaaagtacatttaagtttttattgtgatagaatatacataatatacaattttaagtgtacaattcagtggcattagttatgtttatgatattgcacagccatcaccactatccatttccagaattttttcattatctcgaacagaaactccatacccattaaacaataactgcccatttcccccttctcttagcccatagtaactgctatcatacttcctgcttctgtaaatttgcctattctaagtacctcatgttagtggaatcatacaatatttgttcttttgtgtctggcttatttcccttagcataatgttttcaagatttaaccatgttgtggcatctgtcggaatttctttccttcttatgcgtgaatcatatctcatcatatggacatcactttttgtttatccattcacctgttgatggctgtttaggctgtttccactttttggctattacaaataatacttctgtgaacatacatgtacatgttttgttttaatatgttttcagttctcctggggacatatctaggaaaacagtaactctatgtgtaatattttgaggaattgccaaagttttccaaaactcttgcaccatgttattcccaccagcaatgcatcagggtccaatttctcgacatccttccccacacttgtccatcctgttttagtgtatccatgatcagtgggtataaagtggtatctcattgtggtgttttttattgtttgtttgaattttcatccaattattttttaattgacaaataaaagttgtatatatgtagagtgtacagcatgatgttttgatatatgtatacattgtggagtggcaaagtcatgttaattaacatatccattaacttcatatacttgccattttttgtggtaagaacacaaaatctactctcagtaattttcaagtacacagtgcattgttattaactatggtcaccatgatgtacaagagatcttgaacttattccctgtctaactgaaattctgtgccctttggccaacatctttccaattccaaccccccagtaccaccccaccctagcccctggtatccactattctactctctacttctattaattagttcaattactttagattccacagataagtgagattgtgcagtatttgtcttaccgtacctggcttatttcacttaacataatgtcctccaggttatccctgtggtcacaaatggcagaatttctttcttttttaaggctgcatagtattccattgtgtatatattccatgttttctttatccattcatccactgatggacacttaggttgtttccgtatcttggctattatgaataatgcctcaataaacatgagagtgcagatatctctttgacttactgattttgtttcctttggatatatactccataatggtattgctgtatcatatggtagttctatttttaattttttgaggaaccttcatacgttttccataatggttacattaacttaaattcccactaacaatgtgcaagagtttccttttctccacctccttaccaacacttgttatctttaatcttatttataatagtccttctaacaggtaggaggtgatatctcattgtgggtttcacttgcatttccctgatggttagtgatgctgagcatttttcatatacctgttggccatttgtatgtcttcttttcagaaatgtctattcaggtcctttgcctgtttttaaatcaggttatctattttcttgctatcgagttgttttagttccttctatatgttccttagatgttaatctcttaccagatgtgtggtttgcaaacaatttctcccattccacaggttgcctcttcactctgttgattgtttcctttgctgtgcagaagcttttcagtttgatgtaatctcatttgtctacttttgcttttgttgcctgtatcattgtgcaaaaatgatttatatttccttaatggctaatggtgctcagcacttttttatgtgtatgtcttccttagagaaatgtctattcaaatcctttgtccattttttactgacttatctttttattgttgagttgaaagtgttctttctctatctaaaatacaaggcctttataaggtacatgatttgcaaattttttcccatttcacggggtgtcttttcgctctcttgttggtgttctctgaagcaccagtgtctttaattttgataaaatctaacttttctattttgggggttgcatatgcttttgttgtcatatctaagaaactgtgatacatccaaggtcacaaagatttatgcctatgttttattcttagagttttctagttttacttcttagatttatgtctttgatccattttgaattaattttttatgatattaggttagaatccaaactcattcttttttatgtggctatccagttgttccagcaccatttgttggcaagactattctttccctgttgaattgtcttgacactcccgtcaaaaatcatttgaccataaatgtatgagtttatatctggattctctattctattccattgatctctatgactctctttatgccattaccacccagccctgattactttagctttgtagtaggttttcaaattggcaagtgtcccagtctgggcaccctagggagactacatgtctacaaaaaaataaaagtaaagaaattagccaggagtggtggtgtatgcctgtagtcttagctattcagaaggctgaggtaggaggttcacttgagcccaggatttggaggttacagtgagctatgattacaccactgcactccagcctggataacagagcaagactttgtctctaaataaaaataaattgttttaaatgaaagaaaacaaaaaatattgggacgtatcaattatccaactttgttcttttttaagactgtttgcctattgttttgccttttgtttctatacagattttaagattggcttgtcaatttctgcaaactagagagctggaattttggcagaaattgcattgaacctgtagatcaatttggggagtattgccatctgaacaatattaaggtttccaaaccatgaacatgtgatgtctttccatttatttagataattaatttctttcaatgatgctttatatttttcagtgtacaagtcttgcatttctttggttacatttattcttaaatatttttatctgttattatagctacttttatttaaaaatatataatgttttagaggcagctgaattcaacccattactgtatgatcttgagcaagccctttcatttctctgcctctcaaaaagtttctgtgctataaaatggggaaaataatctctacttcagagtttcaagagcaggaggaaatgaagaagtgcctatcacagcacctcgcacataagatgctttctccttctttgctccattcatcttatgaaacctaagacgataaagcattttgttcagaagtacacttgcattgagtcactgcagaaactttctccacagcattctgtgtactgaggcataggctgacctccagagttgaaggagatttgctaaagctgtgctccccgccaaggcagacagtggggagtctgcccttaatggcgacaaggcagattttctattgtttctctgcaaaagaagaaaagacattaatacttactggtcatgactttcctgttcataacctcatttattcagcatagacctgtgaggtatgtttcagttttttccaggtttcaaatgaggaggcaaagactctgagtggtgaagttactagtcaaggtcacgcagtcattaagtggcactgctgggacctgaaccttggctgtctggcccaggcccaaagcttttgcctttgctttgcctgtgagggcttcttggtcttaatctcatcattccaagggaggaaggtgctcctctgcaacccccaccaggactcacagagttcaccgttgatgggtagaagttcttccttcatgcgaggcatctggaagaaaagcaaagtcgagggcaggactttttttttttttttttttttttgagacagagtctcactccgtcacccaggctggagtgcagtggcatgatcttggctcactgcaagctccgcctcccaggttcacaccattctcctgcctcagcctccgcaaagttttcaatgaggacattcagggagtctgtgcacttggatgggaaaatatacaccttttattcctttacttcttactgaaatgtagcctctcctttaatttggaatgtagacaacaacccttaggagtgttagcacctgtgactttgtcaccagtagaaattgaaaagacttttgtatatattccagttgctaccaatatcatgaatattgttcatgttcctgactacttcaagattatggttatttcttgactcactgctagatcctgttatttaatgcagtaataaagaatcatatataccactatatcctaatgtcttgtctaatattgtaagaactccaactaataaaatggacttcctctgtaattctttgtattttttattctgagagggatccatagcatcattagagcatcaaagcagtctacctcctggtctaaaaaaaataaggggaaagcaagatctcaaagaacccattgacctaaggtcagacaggtggtcattatttttccaacagagtgtgaaccagaagctgaacctgttttcttccactctttttccccagcagaggtccggcccagtgggagacccatcaacactgcccgggagccaccgctcacccaagccttgagtacgtatggtccagatcattggctcaagaaactggtgttacttttttcacacagttagccagaaaactcgtgttgctgagagttgctgagtgcctagaggaagggcatgaaaactatctataaatctggatggctttccctacccacctccccagcccaggcagacttcagaagaaagtgagcctgaaggaagcagaaacttcatctggaagaaagagccagcaacttccaactggaagctctggaactgttgattactacagcccctcctggcataggactggccagtgtgtggtcatacaaacacattgacccaggccatacccagggagcttcctggaaatggttacagtttaagataggtctggggtctttccaagtatcacatccagaactggacacagactgcagatgtggcctgaccaataccaaattcttagagactatcacatcctttcatgaaccttctacttttatttaccacattaacatgtgtattatgcaggaaacgaggctagatttggcatcagaaactcaatttgagtaccattttggtcactgaccagctgtgtccttggacgaatgagcttcgcctcttaagcttcagtaaaatagagatcataataattgccatagagaatgattacaaggataaatgacaattttagtagctatcactgattaggtgcttttacacatgcaacatcatgtaacatacaatttacaacattagtcatttaacccctagaataaccctgataaggtagatgggatggccaccatgtataggaatacaggcatagcctatacagggagaaagtcaaggcttttgcacatgatcagacaactgataagtgacagagctaagattagactctgggtctgtctgacttcatttgcccatgttccaattcaccatgctatactgacatgtcagttttctctctcttctcccctcttccatttctccatcttttaaacacctttccttttctcctcccttcttctgtcactcctttctagttccctctctatatctttttaaatattttaattttaattgacaaataataaacatatttatagagtacaatgtgatgttattctatatgtatacattatggaataaataaatcaagctaattaacatacccatcatctcacctaattatcatttttttgtgatgagaacatttaaaatctactcttttggccgggtgtggtggctcacacctgtaatcccagcgctttgggaggccaaggtgggcggatcacctgaggtcaggagttcgagaccagcctgaccaacatggtgaaacctcatctctactaaaaatacaaaattagccgggcatggtggtgcatgcctgtaatcccagctacttgggaggctaaggcaggagaattgcttgaacctgggaggcagaggttgcagtgagccgagatcacaccattgcactccagcctgggcaacaatagcaaaactccatctcaacgaaaaaactactctttcagcaattttgaaatgtacaatacattcttattaactatagtcactatgccatgcagtagatcaccaaaactcatatctccagtctaatggaaactttgtaccctttgaccatctccccatcaccctccactctgccccagcctctgtaaccatcattctactctctactccaatgagttcaacttttttagattccatatataagtgagatcatatgatatttatctttgtgtgcctggcttattccacttaacataatgtcctccagttcatacatgttgctgcaaatgaaagaatttccttctttttaaaagctgtctagtattccatagtgtatgtatatatacccttttctttatttgttcattcattcacggacacttgggttgtttccctatcttggacattgtgaatgatgctgcgatgaacatgggagtggatatttatcagttccctctatccatccactctgagacacaagacgagaagaggccagagcattctaccaccttcctcacatggtagacattggggaaaggaaacaatcccagtgagtgggctgggatcagtcatcaggctaccccaattctggcagcacacacaaagtccctctcacatctatttctcaattcctctagttcctggggatgtttttgccaagaattccctgtggaaaggggcctatgaataccaggggaagaagcagccagccatgctcagagtgactggcttccaagttgccaacagcaaggtcaatgccaccatgatcgaccacagtggcgtggagctgcacttggctggtaaggagcaggcccctctatgaaagccgggaggatggatgggcacacacccttggcaaggatgagcctaatggcattgcatcatactgtcatgcaaggctcagacttgtctggtggtcagggaagaggaagtgtctattcatctttacatgataaagcactgtggactaaagggaaatgtttaaatggcaaatattaataacctgaatacataaagaactcttatgaacaaagagaaaagactgatatccctaaactgaaccaaaaataggggcagagacttcccaggatcccaagtacaatcagtcaacaaacaaaagaaaaaatatttttcagcaatcatcaaaaaaaaagtaaactcaaaatgtcattttccacttacaccatcaactcagagtgtttttaaacaataacacttagtgcaggtcgggttcagccatgaacgccaaattctaaaatggtaccattctgggaaaacaatttggcgatttgtgtcaagatccttgaaaatgattggacccattaattacatttctaacaatttttatcataagaagatacggagggagtcaaacatttatgaataaaggctgttcccattacaaggccatttgtagtatataaaaactggaactagaaaatttccctaaaatagagaaatggatattttaatgatagtatatctactagatgaaatattatgccagtgttgagggaaatgcattcattataatgtatttaaaatatgactccagtgttttaaaggaaaatattacattcataagaaagaaaacaggaataatttacagtaacgtggttatttcttagtaagatcaggagagatcattttttcttcatgcatctcagcattttctaaaattttcccaattttcaatctttctataatcagaaaaagtaagtaccttagaaaataagtgtttgttgaatagatggatagataagcaaatgtgtgagtgaatgaacatattaatgcacaaccccacataaaatcctatctacgcattcatacgtgcacacacctacgcaactgcaggatgacatttgctcatttcacacatgataatagacatgttcacatgctcccatgcccaggacctcatgaactattgcacccattgaactatctatgcattagtggacagattaaaagacaaaatcatattctcacacatgcctgtgtcaatagcatcacaacctcaacccggtaatccaattattaacatacatatgcatatattaataattcttgcatataaccacgttcagcctacacaaacccacactcaacactacacttacgacttaaagggatgtggagaatgtttatatcaacatctacacatgaaattccatccagaaacttacacccacaaacccacaaatttgagttttgaaattttcccatatctttcatgtgtaacacctgaactttatttcccaggaacttacaagaaagaagattttcatctcctactccaggtgtaccagattacagggcctgtggagatctttatgaataagttcaaagatgatcactgggctttagatggccatgtaagttcagcaaactcacctcctcccctgactcccagatcactggcagggaagaggaggacaaaagggtgtgcaaacccctaggatcaatctggcaacttgggaggaggttttctgtggggccctgcctaggagcagcaagaggatcctcatctgctaatgaaataggcaaaggaaaagattttaaaagacagaagactcagagtccagaggttcaccacattcaagagagttggagtaagttctgttgtttgaacagaaagcaagggatggaggttgggggcagagggaattcaggctagttgaaggtattaatgtggtgggtgggagctggaagaaggcagtgagtctcacatgactacattgaacttctcctcacacttgaggatgcagattgtgagtgattaacacagcttgagagaccaggacatggcagagggataggactttcttgcattcccttgtggaaaagacattctattctagggctttcttgaggtggaagctggatctccagtgacacttctctggccataccttcctatttcacacatagtggagttgagcatagcatcccctaccacgtcctccacttctctgtcttggattgctggagctagaagagaaaggatagaatgaagcgagaggtcatggtagaccagagtagcagagagctagggagtcacagtgcattctcatggacaggaccagctggtggaggactgtggcatagttgactttgctttataaacacatcaggagaaccaagtggcttctccaggggctggcacatacaggtagttccttggtaggcccaagggtatctgtaggtccccttcataatccaagtatgggccagcttcaatcatcgtggcccaaaagctgtgcaggaacaatagactccaccatccaggagggtcaaagttgggacatggagctagcagtgcaggccaggggaagatgaggatggggatccagagggccaggaacagctggagctactgcctaggacgccagacaagcgtcgagccttttgatagccagcaaggtgtgtttgcggggacagctgcggagggcagacagaggctgctcctagccatggagcataggttgggagtacccaggagcacaggcatcctcacagcatgccctcagccgctgcggccccagactgcacatttgggggtctgcatctgtcacatgagcatcagtagcaggagttatgtccccagctacgccccctaaaaaattaatagctcttagaactgtgacgaactctccaatacctttaatctgcaagggacattttcagcatggttctgtgtgttccataatgctccaaaaggcggtttttcatcacagtaataacagctaccatgcatgtaaggcctataaattaagtgttctgaagtatttcatctttattaactcatttaatccttacagccaccctatgacataggtactgttactattctcattttgcacatgacaaactgaggcacagagagattaagtgatttgaccagtagaaaataaaatcttcctcctacctcatacatgtagctggtgcccctgccccaccccgggctccccggtcacacccacccttgcctaggtgtgggcagagaacaaaccctgtgtgtcagagcagcaggtcagtgggtgacctgctgggcagcgtgtatgatgagagaggagttctagatccttccagcagcctcccacctgctctctgtgctccccaccatcacaggtctcgtcagagtcctccggagccaccttcatctaccaaggctctgtcaagggccaaggctttgggcagttcggctttcaaagactgggtaactagtgcttgtcccccggaagtgtgggcccgggtgggtgggagagaaaccgtgtgtgccgtggtcaggtagaggactggggaagttgaacagtctgaggcgggggtgctttggcctctttgggatcagggatgcctcttgagattctgacaaaagccatggaatatctctccaaaagcaaacacatgtgcataacccactcaacctttgacaaagtttcctgttcagacctggagaggagagcccccaactccagggacattggctcttagatacagcccccagccacaccctccagccagccctgggtgtcacccctgcctcaacaaacaacgacactgtggagtgtcttagagctctcagggtgccttgactgtgatgtcgtttctgccctagcccagccctagaagactggttttgtgcccattttacagataagaaaactgagcattaaggccacttccctccctggtccttccctggcctctttacctagcgtgcttcctgtcatccatgtcaaacatccacaccttggagccttgtcctggcccagagcctctgggtgcccagcctcagactctggtggggggaggggtctggtttctcagaagcaggggagggggaaacaggaggcagccgcaggtgcgtgacagcctctctgtaccccaggcactgacacctcccatcgccggggcccttgcctgccaaggcagtccactccatgtcctctggctccaagctcctgaaagcttctctggactgagccacggtctgctcccaccctttcccacccacactgctcctcccccggagttgtcccagctctgccctcatgagctgcatggactgagaccactgtcttccacacagcacccttcacctactgcaagatggccaggcacgctgcaaaggccttagaaaatcacagtttttgttctggctccacagcagacatcctgtcccctctcagagccccagcccctcagttagcagggtgcctactggggccacagtttctacttgtgttcttctgagccttcccagtctgcaggggagggtgaggaaggaggagaggcagcctttcagaaggagatgcttcagcttcaaccagaacagtttcaccttcatctgtcttatattttgttgtgcctgtaaggtttcatctgataaaaggctgctacagccaaaagaactttagagacttctaaagggctgcacccttgtaagagtttctgttgagccatggtttcaggctcctctgcggatggtcctctgggtgccatctgagcagcacaaggtagatgcatgcaggaccctgcccccaaggactgagtgtgcacgtggaggcaggcgggcagccctgggcacacctgcctcccgtgctgagcaggagtgaggagcaccctgagtggcagccctgcttcccaagagtgtatagtcggggagggtagccaacggagcctcagactgtgtctcgtgacttgacttttctgctttgggactttacagacctcaggctgctggagtcagaccccgagtccattggccgccactttgcttccaacagcagctcagtggcagccgcgatcctggtgcctttcatcgccctcattattgcgggcttcgtgctctatctctacaagcacaggtaccgtgcaggaaggaggcagggcgggcatcaggcaggcctccctctctccctccagggccccccgcaccagacccctaagcctctctgtgtcgctcttttcatgccgtgggcacttcctcttttatcgccaggagaagacccaaagttcctttcaatggctatgctggccacgagaacaccaatgttcgggccacatttgagaacccaatgtacgaccgcaacatccagcccacagacatcatggccagcgaggcggagttcacagtcagcacagtgtgcacagcagtatagccacccggcctggccgccaccaccgccaccgagagccccgcctccagcagccggtgagcaggggtgtgggaggaagacaggccatgacaagcacagacagggacctatgcgtgccaggggctccacccaacggagtcgcacacaccacatagacacacccagtaagaggagagctgtgcattgagcatcattgtgtaacaggcactgaaccaggccctttgtggatctaatatattgaatccctgcacgccctgtgaggtagaagcttgtgggagccccattacagatgagaaaactgagctgcatagaaactaacttgagcaaggtcacacagctcagaaggggtggggtcgaaatccaatcccaggctgactggctccagaaactgctcctcacccctgggcttggcagaacatcggcatgtactagtctgtttctctctagagaaacagaaccaactggatatatacatcctctgggtcgaagtcaagccctggagatctgtagagctatacagagatgcacatatatctgtgtatataggtatattgtgtatatatatacattcatacactataaacgcaatacatataccccatatcaagatatatccatacctatccatctatatatagatacgcatctccgtagagctatatgtaaatgttatatagagatagaaatataaataaatatatatttagagagagagattcatctaaggaattggctggcaaggtggaaatctaaagggcaggccagcaggctagaaattccagcaggagttgatgctgtcatcttgagtccaaaagcagtcagagacggaattccttcctctttggagcacctcagtctttttcttaaggccttcagctgattgaacgaggcccacacacattatggagactcaaagtctactgatttcaaagttaattttatctaaaaagataccttcacagcaatatccagattggtgtttgacccatcaactgagcaccatagcctaggcaggtttacttacaaaattccccacattgagcacaacagaggggaggagctcccggaaatatagacagggggcagacacacccacacgtgtacacggtcatgcacacacacacacacacatacgcatacatgcacacaggcatgcatctgacaggcccactgggaaggaactgatgaatctaaaaggcactgcctcttcctcactgtgtcctccttcgatgacaccctcacctctgggacctatgacccttcaggagttgccccaacacgatgtccaagctgcacccctctgagaactgtcttctcccacacatcccgctttctggggataggcaggtgccccctctcaggtcctgtgctgaaggactctggggagaagagtcacagagccagccaggtagggattcccagtgagggcggtggaaaatccgccaagtgggccaccagccaaacccagggctagtgttgcgctccctccccacgctcctgtgcatggccgctcacgtggcagattctcccagccacacacaaatggcagtgcagcgaggaaacaggcttttatgagggtgcctgcaaaggccaccaacagagatggtggggacagttcctgcggagggggttacaagagcagcaaatgtcattatcactgcccagcccctgacgtgctttactccctttctgcctcacaactcctggaggatttcacagtttcagcctgagtcccagatggtgagtgagtcagggactcagcagatgcagctcctgaatacaaacaatttatggaaagagcttttccccatctttttacgtctctccaaaacaaacatttaaataagggttcccccttattccagtgggattgttttagcatgccaaaattactcctcaagtttcatctgtatgcccaatctttattttttccttctcagaactcttatcaatagaaggcaaaagagaaaaagaaaaatcccctctgatgatgtaaatcggggcttggagatgatcagtgatgaatctgattcactgcatgaattattgaacagtgtaagaaagaaacaagaatgccgctgacctccacacagtcactcttgctccacacctgggttctgctgggttccaggtgctggtgtgcgccatgctgtcacctccgggtcggctggggttggtggctccacatctggccagccctcagcattggccccttgccagcaggctctgaacccactgcccagcccacaggtctccagcagggcccctctgaccacttctgcccacagctggagcataaagaaagcaagagccaccctgaacagacacacacacattgcaaatgagtgactagatggtaatttttttttaaataatgccaaggagaaaagctgaaattaaaataaacaccctactaaggaagcaacgaggcctgtgcggtcagtgagtaacagggcgggggaacagggctgtgtgatgatgtttgccaacccttcctccattaaaaaaaagtatcaaaaatgagatttcacaactgtgtcactacaaaaatgaatataatccagcctggattctttattacagagccattattatcctagtcattttttttttttcatctgattttgaaagaaactaaaattagaatgttttcctgggttcctaaaagtatggtggcccccaagcactgggcctccaggtctaatggcgaagttggccctgcaagggaaaaagacagaaaaatacatgttctgctgcacgtattccctacctacccccatccccaacctgggaagattaaaaatcaaagtgaagattgaggtgactcatctctttcccgcttgtgccttcttttctttgccgctttgcttttcctcctctgctcccggcccctcccctcccactgcctcttttttctttgcaaactcaggtgtgatctgtttgttcccagttccccagggggcaggaagtaggctcccctgagcacagtgcccagtgcccatcttcgttcgtctccttgcctgtgtctgctactgctgggactcaggccctcgccctgccgccatctatgccagttaccctggagaggactcctgccgtgtcctgaaaaggcagaaaaggaagaggggctgcagacagaggaagaaagtttatggatttaaaatagcaaagcaacttgtggatctgtgtgtgtgtgtgtgtgtatgggcctgatcacacacaaacacacacacctctccttcattcacgtcctatggaagagaccataaaggcttcaaaactagaagtgcgcatgaaggatgcttcatgccctgttccccacacagagaagagatgaagagggggaggtacggtcagctttcaaaacaatatgccccccgcccatcccatgtgtgaggacatggtgactcggtgactgtaacagtaggacacatcccatcatgcggtcagagtgcagaaacccggtcagcgtgcagaaaccagctgtctgctgatgaacggcccatctgcacagcggcagcaaggattaccccaagggcaggaaaaaagtctttggaaatagattgaaaatcagtttctttatttttttcaaacactgttttattgagttctaaacccagtggattaaaaagtcatttgggtcctgggaagcactgggaaagaagggagagccggggaggatagggcaggagtctggccaggagcccaaggtcaagtctggctgtcaactgacaaagagaagagaagacaagtctgtggcccagacaggatgccaagtctgggggcagcagcagggtccttgagagaacaggggagcaagcctgccccagtacccaaaaaacaatggctatcatgtactggggttattctctgtgcctgacactttacctgtagtatttctagtctgcacaataacaccaaaatgtaggatttgttattcccctttgacagatgagaaaacagaagcctgcaaaggtaaagacagagttaggaagtgtggagtcagaatgcaaacccagatcagtctgccccaaagtccactacaccagctgccagaaaccctgttctagaaggggcagctaagaagggaggagccgatgaatctctacagtagcactgtggccaggtctggaaagccaggcaagacacctgtgtgtcctatctgggttctgctgtctccgcgtaggcagcttcggggcaaggattcaactccccaggcctcccacggttggtgctggctccttggctcccagcagccgctgaccatagccagcaaaagacctggcaggtcctgaatcaaaacaacagagtggctgaaagtcacacctctccagctccttgcgagtgggtttgattgattttgacagctatatcatgcttgggtcgttcatgaattccatgagaattgttgggaagttcatgagtttaggaatcaaagtatagcatttagggccactttctctgtcctcgggaaggcccccacaagcttaagcccctgtatacgtgtgacatgctggcctcagagattcatgtcacatattgaaatagcaaatagaaatgtgcaggagcggagggacagcgacacctggttcttaagcaaattctagattggaacaattagaagatctgactgatgttaagagtggccagaggaaagtgagaggcgtccatttccagcagacacaatggaggctgacagaggcaggagcctacccctggccacaccacctctgggacacggcacccccctgggcctggagggagagggccaatccagacacactcacactctcatctctttccttggctggaaacaagtgcaggaagctcccctcccaatttcttatgctcccttcccccttacactcctctccttcgactgctcccttcccccttcttatgcccctctcagaccacccagcggatgcctattcccgccccccacccctcccctgcgtctccttgtaaagttccatgagatgctcgaggagcacctgctggtggggcacccagcactctgctgggcatcaccctccgcacccctgacatttctctccacctccagaggcttggaagggaacagggcagatgaggcccttcacccaccatctacgccatatacccatcaccatcccatgaggaaaaaaaaaaaagtaaaacaaagacaaaaaaaatcttttgtacagagatatatttttattatacaaagtttgtacagtaccaaaaaagaaaaaaaaaaaggtgtaaatttttttttcattattgtaggtaaacggtagtggaagccttttttgtaaatgtaataaaatgtataaatatggttttcagaaaacatcaagtgctgtaaatatgtaatctacacaccttcttggcttgtctgcagtatatacatttaatttatctgtctctgtatatgaggcttccccctggggtcctgcattatggtactttcctgaatttgaaagcaattttaaattttttgaattcaaataaaatataaatttttgcattggttttcttacatttttatggcctctttcatgactaggggcaagtgtttgttgggaaagggaaagaaggacatattttcgcctaaaatccaagggtagaaatatgggagtccatttcttaactgcattgtgttatcactgctacatgttggaaactctgagcaaaaatgatagtgcataccccacataaaaaaagttaactcaaaatggatcaaagacctaaacataagccctaaaattataaaatgcttacaagaaaacgtacgtggaaaacttcatgacattagatttggcagtgatctcctgcatatgacatcaaacgtataggcaacaaaagaaaaaacagataaactggactacatcaaaattcacaacttctgtatatcaaaagatacaatcaacagagtgaaaaggcaagctatagaatgggagaaaatatttgcacatcatatatctgataaggggttaatattgagactctataaagaactcttatgaaagacttgaacagtcatttctccaaagaaaatatacaaatggccaacaagcacacgaaaaaatgctcaacgttactaatcattagggaaataatcaaagccacaatgagatgccacctcacacccattagaatggctactatcaaaaaacaataagtgttggtgaggatgtggagaaattggaaccctggtgccccattggtgggaatgtaaaaaggtgcagtcactatggaaaacagtatggcgatttctcaaaacatcaaaaatagaattaccatattgtctagcagttctacttctgaatatatacccaaaagagttgaaagcagggtcacaaaaagatatgttaatagcggcatttattaacaaatgccaaaaagtagaaggaacccaaatgtccatcaacagatgaatggataaacaaaatgtggtacatatgtacaatggaatattattcagccttaaaaaagaaggaaactctgacccatactgcaacatggatgaaccttgaggatgttatgctaagtgaaataagccagtcacaaaaaaaaaaaaaaaaaaaaaaaacaaccagatactatgtgattctatttataaaagctaccttgagtcatcaaattcatacagaaagtagaatggtggttgccagggactagggggaggaaaggatggggagttactgtttaattagtataaagtttcagttttataagatgaaaagtttctggaggcctggaagccctacgcgttctactggttttaaaacaaagagctcaattgacaccaggtatgacttgtcagtctctacattctctcctgatggaagagttttttgagttgaatatgctgtgaaggctgtggaaaatagtacagccactggactcagatgtaaagatggtggtggctttggggtagaaaagggagtcttcctaaactttatgaagaaggctccaacaaaagactttttaatattgattggcatgttggaatggtggtagcaggtttgttgacagatgccccttctttggcagatataacaagagaagacgcttccaactttagatctagctttggctataccattccacaaaaacatcttgcagacacagttgccatgcatatacactctgcagtgctgttagaccttttggctgcagttttacagtagggtcttacagcgtgaacaacagggcacaattctgcaagatgtttcgtatggttattggggctgtacccttggcaaagccaggcacgctgcaaagatagaaaatagaaaagcttcaggtgaaagaaatgacctgccatgttattgttaagaagttgcaaaaatatttacatagtatatgatgaagttaagaataaaccttttaaattagaactcagcagggttggtgaattaactaaaggaagaagacatgaaattattccaaaagatataagggaagaagaagagaaacatgccaaggaatctttgaaggaagaagatgaatcagatgatgacaatatataacatttactccagcatctattctattttaaatttctgctacagtcccaggttaacatttagccccctgtggattatacacactcactaaccaattttcattaaatgtttgtattgtgaaaaaggagaaagaaaagttctggagattgcacaattacgtgaatatacttaatgtacttgatgccacttaacaatggttaagatgatcaattttatgttatatatattttaccacaatacaattttttttaatttatagtggaggccacatcagctcagaccaagaacctggggacaaagaagttgctcccctcagggctggagtttggcttggactgaggagctcaggatctgaggaccgcggtctaagggcaggtgggcttaggcagtagaaactccatagcagagaaaagccaaatcaaggagggtcatccaggcaagacagtcatgagaggagtggtgaggaagaagaggaaagaactggcaagagctagtaggagcctatcctttcttaaatgtactatgcatttgttagcagtcatcattttaggtggaaaattcatccagactaccttcagttttctgactcccactacccttcacttttgcactgtacctcggctccagctgccccccttgtcacctcaataacctgatttagaccaacattcccagttttttgtttttgttttttttgagacacagtctcactctgtcgcccaggctagagtgcagtggcacaatctcggcccactgcaacctccacctcccgggttcaagtgattttcctgcctcagccaccggagtaggtgggattacaggcacgcgccaccatgcctggctaatttttgtatttttttttttttgtagaaacggggtttcagcatgttggccaggctggtctcgaactcctaacctcaggtgatccacccgcctcagcctcccaaagtgctgggattacaggcgtgagccaccgcgcctggcccccagttttaataaaggcattccatcttggacacgctgcctggcatttctctcctggacacagggaatcagcagggtgggtgtagtcctcccactggaacctcaggtagcttggcagggattcagggtcaggaattggactgttgtccaacacaagctccggttggattgggaatcaagagagcaagggagcaaatattaagtctaagttcagaagacaagttcataccagcatgcaaatatgcaaacactttataagaaaatagcagatgggctgggcacagtggctcatgcctgtaatcccagcactttgggaggccaaggctggtggatcacttgaggccaggagttcgagaccatcctggccaacatggcaaaactctgtccctactaaaaataaaggagaaaaaagaaaggaagaaaagagcagattgctggacaccacatagagtggggaaagacttccaaacatcaggccaggacaagttttcataagccgtagggcatagatagagggggcaagcccaaactacaatgcctgtgagacaagctgcaccccacaagatctacctataccaagagaacagagtgtccctgaactaagaaatcaaataaacactaacaccactccattccctcactccagcagaagcacctgttattgctggtctaggaaaatcctacacatttcttttctcacggacaaaaagggttcatggacatatcttcaaagcttctataagaataaaacagctctccctctccctctccctctccctctccctctctctctccctctccctctccctctccctctctctctccctctccctctccccacggtctccctctccctctccccacggtctccctctccctctctttccacggtctccctctgatgcccagccgaagctggactgtactgctgccatctcagctcactgcaacctccctgcctgattcccctgcctcagcctgccgagtgcctgcgattgcaggcgcgcaccgccacgcctgactggttttcgtatttttttggtggagacggggtttcgctgtgttggccgggctggtctccagctcctaaccgcgagtgatccgccagcctcggcctcccgaggtgccgggattgcagacagagtctcgttcactcagtgctcaatggtgcccaggctggagtgcagtggcgtgatctcggctcgctacaacctccacctcccagcagcctgtcttggcctcccaaagtgccgagattgcagcctctgcccggctgccaccccgtctgggaagtgaggagcgtctctgcctggccgtccatcgtctgggatgtgaggagcccctctgcctggctgcccagtctgggaagtgaggagcgcctcttcccggcgccatcccatctaggaagtgaggagcgtctctgcctggccgcccatcgtctgagatgtggggagtgcctctgccccgccgccctgtctgggatgtgaggagtgcctctgcccggccgcgaccccgtctaggaggtgaggagcatctccacctggccgccccgtctgagaagtgaggagcccctctgcccagcagctgccccgtctgagaagtgaggagcccctccgcccggcagccaccccatctgggaagtgaggaatgtctccgcccggcagccaccccgtctgggagggaggtgagggtcagcccccgcccagccagccgccccgtcccggagggaggtgggggggggggggtcagcccctgcccggccagccgccccgtccgggaggtggggggcacctctgcccggccgccccttctgggaagtgaggagcccctctgcccggccaccaccccgtctgggaggtgtacccaacagctcattgagaacgggccatgatgacaatggcggttttgtggaatagaaaagggggaaaggtggggaaaagattgagaaatcagatggttgctgtgtctgtgtagaaagaagtagacatgggagacttttcattttgttctgtactaagaaaaattcttctgccttgggatcctgttgatctatgaccttactccaaccctgtgctctctgaaacatgtgctgtgtccactcagggttaaatggattaagggcggtgcaagatgtgctttgttaaacagatgcttgaaggcagcatgctcgttaagagtcatcaccactccctaatctcaagtacccagggacacaaacactgcggaaggccgcagggtcctctgcctaggaaaaccagagacctttgttcacttgtttatctgctgaccttccctccactattgtcctatgaccctgccaaatccacctctgcgagaaacacccaagaatgatcaataaaaaaaaaaaaaaaaaaaaaaaaagaataaaacagaaaatgagtagtaaagacattgtaacttgggtatatatctaagagtggaaaagagaaaaaaagcaaagaaaagaaaacattgtaactaattaaaatactcccctaaaaaataaaggaaaggaaaactttttttaaagcatcccaacattaattaaatataatcaagcaattgtaaatattaacatgtaatacaaaccagaagcttgaaaactcaggatacaaatagacataaaacaggaagaaataaatgacagcttacaataaaagaacaagcatatctcagaaatgaagagcaaagtgcaaagtgttcaatgggtaacatacagaaagaaagtataataaagcacatacaggaagaaaacttaaatatctaagaaaacagaagttatgtaaagagctaaaaaatatgagactgaaagtgataaaagggcactttgggaggccaaggcaggcgggtggatcacttgaggccaggagttcaagaccagcctggccaaaatggcaaaaccccagttctaccaaaaaatacaaaaattagccaagcatggtggcacgtgcctgtagtcccagctactgggagagtgaggcaggagaatcgcttgaactcgagaggtggaggttgcactgagctgagattgtgccactgcactccagcctgggcaaaaaagcgagacccccagctcaaaaaaaaagaaaaagaaaaataaagaaagaaggaaagaaagaaggaaggaaggaaagagaaaaagaggaaagaaagaagagaaagaaaaaaaagaaagaaaaagaaagaaagaaagaaagaaagataaaagacaggcaaagcaagccaatttatgtacaataggagtccctaaagaagaaaacctaaataaattagacagaattaatatttaaaattatactctaggaaaactatttagaactaaaagaaaaacttaacatatatattgaaaggtccaccaggttcctgggaaaattatcctgcaatgctcagctccaagacaaaccccagtcaaactgtaagattttaaagaaaaataaaacattctctgagcctccagattaaattaggttgctatcagatttcttaacagccacacacaaagcaaaactgaaggaaagaaagtacaaaccaagaattttatatgcagtgatttttatgcatcaagacaatgagaacacagtaatgaatattcaagaattcaggaatattttcctcaggagcccttcctgaagaatctactgggaggacaagttttaaccaaccaaatgatagttaaggaatttcaacaacaggactgatgttaagaattgaaaactgcatattgaaatctacaatgaagatgaaaataaagaccgaagaatagtatgtaaatgtcctaggttctgacaaagtggagataacatgattttttaatgggaagagaaagagaaaggggaaagtaaagtgaccccactcgttgccacacagataacaggtgggagtcaaagaccatctaaaggtttcccaaacttggcagtatggacattttgggccagatgatttttttgttgtagggcctggctgtcctgtgtgttataggatgtttagcggcatccctggcctctgcccaatagatgcacacctctcccagttgtgacaaccaaaaatacttccagacattgcctagtgtcttctggggaataaaatggatacactccccccacctctgttgaaagtcattgatcaacagatgcactggttgagaaccagttaataaaacagttagaacctaagtagaaaaaagaggactaaggacatttataaatatattaatataaaagtaattactagaagaaaatataaattttgccaaatactaatacatatatttttaagtactccaaaaaaacacactgtgaaagaaccagtaaatatgacaaatgcaccaagtaaatacaatacaaaataatatgacagacctgaaaacaaacgtagccactatattattaaatataattaggtttaattataaagatgttcagattatctcacaaaataaaacttgactctgtgctatcacaagaggcatacctaaacaaagtgattcaaaatggcttaaataccatgtattgaaatctaaagcaaagcaaagcaaaggaataacaggcatacgcaaacaagaaaacaggaatcaccatcctcacaccagataagttagaattcagggccaaaggcatgaaagaggacaaggaaggacactttacagcactaaaggagattattcacaatgaagatataacagatatcgataactatgcacccaataagaaagcagatgtgtcataaagcagaaaccaggaggtgcaaagacaaattggagcatgccaataacagcagttttaactcaccactctcagttcataacaaatcaaggaaacaaaagtaaggctgtagaagacctaaccaaaataatcataaggaagtttttatgaatatgaatatctgtcaaactctgcaacccaatattagagaatatgctttcttttgaagcatacatggaacattcatgcaaatatcccttatacatagagaactcttaaaaattgagaaaaataagtctaaaagtaccataagcaaacattcaaagactgtgaaagaaaagacatgcaaaaaccttgaaatatatgaaaaggtactcagtttcactccattattccttacctattaaatcagcaaaaatccaaaagctaggcaacacactgttgacaaaactgtgggagaaactggcactgtcactgctggtccaactcacagaggagaatttgacgacatacactatttgaacaatgaatacactaaaagcccagactctatcaccacacactatatccatgtaacatgactgcacttgtacccctaaatctagaaaaataaaataataataataataaggcaatggatgaaaaatagtaactgtgtttgaatctatgagttcgtaataatatttttaaaacaaataatcctatttaaaagtgggcaaagggcatgaatagacatttctcaaaagaaaatatatggatggccagcaaacatatgaaaaaatactcaacatcactattcgtcagggaaatgcaaattaaaaccacaatgaggccgggcacggtggctcacacctgtaatcccagcactttgggaggccgaggcaggtggacacctgaggtcaggagttcgagaccagcctgaccaacatggtgaaaccccgtctctaccaaaatatacaaaaattagccaggcatgatggcaggcacctgtaatcccaaccactcgggaggctgaggcaagagaatcgattgaacccaggaggcagaggttgcagtgagctgagatggtgccactgcactccagtgtaggtgacagagcaagactctgcctcaaaaaagaaaaaaagaaaaaaaaaaaacacaatgaaataccaccttattcctgcgagaatggccattatggataagtgaaaaaacaatagatgttgacatggatgtggggaaacgagaacacttagacactgctggagggaatgtaaattagtacaacctctacggaaagcagtatggagattctttaaagagcttaaagtagatctgccatttgatccagcagtctcactactgggtatctatccaaaggaaaataagtcattaaatgaaaaagacacttgcgcatgtatgtttagagcagcacagttcacaactgcaaagatgtggaaccaccctaactgtccatcagctaatgagtggataaagaaaatgtggtgtacgtacaccatgaaatactattcagccattaaaatcaatgaaataatatcttttgcagcaacttggatggagctggaggccgttattctaagtgaagtaacacaggagtggaaaaaccaaaaactgtatgatctcacttataagcgggagctaagctatgagtatccaaaggcatacagagtgatataatggacttcagagattcagacagcagaggctgggagggggcctagagataaaaactacacactaggtgcaatgtacactaactcacacaggtgcactgaaatctcagaattcgcctctatatagttcatccatgtaacaaaaaccacttgtaccccaaaagctattgaaataatcataaataataaataacatttttttaaaaactcattagtcacttatggaaaacattaagaaaccagctatattttgataaccagtaagtaaaaggagggaagagcaagcattcatcctgctttttgtatgcaatgtatttcagggtaactaaatattaagaagcggagtctctttacaaaagtattgcagccagtaaatgaaggatagaatttatcaccattttgaaacctttattaaaataaattctggcaatgatcatcaatgactgctaatatcacaaaaagcgaggcaaccagacattataggccttctgatggaagtacataacaaccacctatgaagtattcttgccaaaaaaaaaatcaaatttgaatctgtttaaacctttggatctaaataccagttacaggaaatacagatgacagggaaacaagttcaatgataccataaggatgtaattgacaacatacagattctggaaaactcctcagtgaaaatgacctcatcttaaatccagttgcgatgtatgacattaactgaattcaaattcaaacaagctgttcttaaaaattttgagacaatatatgaagtaggaacatcatatattgttggttccattcatatatttgagacaatatatgaagtagcaagttattaacctgagcctctgaggctctgtggtaaaatggggatagcaacaacaatatttcattgagtcgtgctgaggctgaaatgatgtcatccacccaaggtccttaccagcatgcctggcccctaggctctttatagctattggctgtcaattactggtcaaatgaatagggaggaaagaagctatgatctggaggcagcctcaaggagtgaggagaaagaacagcaaccccacctcccaccaggaggaacttgggctgtatgcaaataaacagcctccatttgaaagggctgcagggaggtgggatcctctggatttatttatttatttagtagagacgaggtctcactatgttgcccaggctggtctccaactcctggcttctagtgatccacccacttcaacctcccaaagtgctgggattacaggtgggagtcactgcacccagccccagcagcttcttgacatggggccaacagatggccagccccagccatgaggcatctccctcaggtagggctttttcctagtattacgttctcagttgtactggccttggccagctctctggctacctatgttggaccccttcaggtaacagttcttgttcctgcctgaattggctggccagcctgagtggaccctgacatttataactgacctgtatgccttactggcatttgtggtcaaactacagctaacagcaagagcatggactatgaggagtctgtgatctctgtcctgtcttccaggaaggtaagccctgtgggtctggtcagtattggagtaactgctagaaagaagttacatgaaaacatgtaagcaagacccagagctttctcctcagggagaccatgactcatttcctccagatctcatcttcgtcccaagacatgcagaatattagtacatgccaaccactagtaacacctatacttgagatctgacccctacaagaaaaaacaagttctcagtggattccgagcaaaacgaattcacaatcaaaattcaatgataacagagctgtattagtccgtttctacgctgctataaagaactgcccaagactgggtaatttataaaggaaagaggtttaattgactcacagttccacagggctggggaggcctcaggaaacttataatcatggcggaaggggaagcaaacacgtccttcttcacatagtggcaggagaaagaagtgcagagcaaagtggggaaaaatcacttataaaaccatcagatctcatgagaactcactcactatcacaagatcagcataggggtaactgcccccatgattcaggtacctcccaccaggtcccttccacaacacatggagattatgggaactacaattcaagatgagatttgggtgcagacacagccaaaccatatcaagggcctaaaaggcaaagttgcctatatctcattcaataaggacaaaagagtgagcgtgtattaggaaacttcagccttgagctacagtcttttgaatgtcctcagtaggacaatgggtggaggaaggccagaaaagaatataaagacgctccagctctcccctctttctcaagtacgaagtgcgatcagttctgttcctgaaccaggaagcaaatgagaggaatcaggtaagtttcagccccctgggaactctttcctatgttttcatccataattatccttgtgttatttggatttcagacacctctggtttcctagcacagggatcctgagggacatatcaaagtagatgcatagggaccagcagactgagatgccactcctccctccagggggccccatggaacgcagggccctcactggccctggggactgggtgacgtcaggggtgagcctctcgtgattggctccctcaccctgcgtaagatcaaagggacaaaaggacagccccgacacccggagccactgtggctccggccagttgcaccggccactgaggccatggctcctggggttgtggacatgcctgaagagccacccatgtctgaaggaccacagggaacaatgaaaagaagacacctgcccagcacaaggggcttgagaccttggccccaatctccctgacaacctgtgtctcgatgacttcccttccttttctcccccatgcttttggtgtaaccaggaagaagccagaagaatcgaaaacacattccttttttggcagtttaatataatttattaacttatcaggccattccatcccaaaatatgatttgaccagctttaagagatgtacataacagcacaaaaaaaaaaaaaataacagaaaatggggaagtgaaagcaaagccaaataaaatgaagccagggattggtccacaaattgcaaaacaaaagggcctgttcaggttttagaattggacattaaatccctgaggctcctgatggacaaaatttaatccattttaatttcacagtccctaagagggaattaaaatcaattacaaatgtctcatttccataaattagttggtcgagaaaggtccctggagatgacacctgtgcttctccaggacacaccaaccgggtttagcgtgagctcctgcccctactactgatgctggcgctccagcctagctggccttacctctccatctatttctgggaaacttcaggaacagggttgggttggcgacctcatacgtggtcatgaacaagccctttcctctcaagtgctgtccacagagggattctctcctgccttgccccctgggtgaagtctgcagtggagggtttcaaagtgtctcaccaccacttcctgctggtccccagtgcctataaatatgcggaagcttctctgtggtccacgaatccccccaaagcactgaagccaagtgtgttctatgtggaaggagaagactcctttctcctttgtgccacatttgtcacctgccaccaagttagggctccctgagccccagtgactcgagattctagtagtcacaactctgccagcctgggcctgtggctcctctcctgcttgggctcagatacatctgtcatgctgctccaggaccagcttagagactgattcttgttttcctgatcccccttcccgtggccctcgccctctagggggcacaatttttatgggatatttttctacaatgaaaatgtaaaaaaaaaaaaaaaagtgactttagaaataagtatcatgtaatagcaggcatgatcagaagcatctttacacacaaaaagaatcaccaacagcgccctcattagaaaatcaatgtctatgtgactccctagtcgactatagcatgtttaggtaaaattatctaattgtattcttctttttactcttctaatgctcttgacttaaccaagtggctcttaaaacaaagaagctctcagctttgagaagtgggggaaccaaacacacactgaaaagaactgggacctctcaaactctctgtctcttcctccaagcagcataaaatggggttactggggtgcaggctcctgtagggttcctaacagagactaggtgagagatgcggcacacggaggtgaggagaaaggtcacccactcagctgcagcatggggtgggggaagcaacaataaggtaaggaaggaacctgcctttgccccccgaaaacatgcatttatttggaggtaagtgcaggcttgctgaaagtcagagggagggcaaaatgatgctaaagacatgctagcagtaatagtgatgctgggagtgtgaagaaacagccaggagctgtgggggaaaaggatccagtgtctaccatcccaggcctccaggcccatttcaactccctcctctcctgtaaagccttccctgcactcccactgcatggaacactaaccccttgtagcagattggggcaggggcttgagattggtgtttgctattaacaggtgggggagctgagcaatgcccaaatggaggatgggatcaaaactgaggttaaggggagctttgggaggctgaggtgggaggatcgcttgaggccaggagttcaagaccagcctgggcaacacaagacccccatctcccccccaaaaaaaatggggtaagggaatattttgaatgattaattttgactttagatattgacttcattcagaaagagacctctcaggcagctgggtaactccagcccaactggaaatgctcttagaagggagaaagtattggcagaactgagtccaagatgagtccaatgggcaggtctctccaggcacgtgcaggggaggcttggatgggagtcactgagtgtgtacatcaatgcacgtgctgaatgggcaggccaagagccccatgatgggtgatggtagacaccggggctttgagatgcccaggagtcacccaagcacagctggttggcaggcagctgggatcctaagaggagaggccacagcaggacacagatctggaagtcattagcatctacacagaagaaaagagagaaagaaaggaaaagaaaaaaagaagagaaagggaaacagagtgaatgaagaagcaagcctaggacagaactctggagtacaaagacccagaacagcctgggtgaggcaagttcacctgcaacacccacacccactccagacatcactgccttcattacttcaaaactgcacccctgtccccaaagggtgttactcccctacagaaagtgactcaattcttttctgcagcccgaaagcagagagctatccccactgggggccccagaacaagatgaggcaggacggactacccagagcgcctgactacattatttagcatggagggaccctagctgctttactcggcttctgggaggaggctacagtggacaataaggccaaggcagccatgaccatgagttcagctgctgaggtcaaggccttagaaaaaaccgagtatctgaaaaagtcttggcccctcctttccctgcccctacctttgggtctgctgcctctgggggtctgaggaatgggaggcctaaggtcctttaggtacctttttgtcccttcagaggagccaatgcccttcttgaggtggagggtgaagaaatcaaggggaggcagccatctggggagacgatcctgcctttagcagctcacatgatgtaacaccctcccagggcagcatttgctggtttggttttccataaccagggtctgacctgtggccaggaaggctgagaaactgtccacccattctgcagagtgaatctacttcccaagagcagaatcacgctagcaaagctcagggtgtgtaaaaccagatgtcagtttatctgagcagcacagacctactggagggcgcctgggtgcccagcaagctcttgggtagacagcaagcctggaacactgaagccccctgaaagagtgcttcttccaaaggaagtcaggtagacaaggaggaagggaccacctgggccattttctcacctggcccacactggccttgctttcatgactgaacctctattaagattcatgagacaagaatggcagataataaacatcaaaactgttcactaaagatatgagacactaacacactaccaaacccaggggaaagggtgaccaagtggagagaggactaccacctcacatccacacagagctcagcttgacttccacagtgagggctccagaaaactcagggctacatgaagaattcaggggtcagtaacaaagaagacagggtccagaacatgatggtagtgggtgggagtggggaatggtctagatctcctttgagggccatcttcctctccattcagcactatcaagtagctctgtcctaggcccaatatttgaaactgaaattcttcctttctcattagtttaactacttcgcatacacagatctctagtcctagcctctcccctagctgctagccgacatccaaatgcatagcatcaccatgatttcccttaagcacctcaagttctagacataccaaactaaacttctcatcttctgccctcctgctctatcagcctctcctccttgtgctcccaattctgaatgaggacatgctctacccagtcaccaaaggcattctagctttcctctgatgtcctcccctctgcctctgagacctttcccattcattccctcctcctcagtgtcaccactgctctagttcagaccctagcctttagctgaaataccacaacagtgtcccaaaaggccatcctaattgcagcatgtccaagttccattcagctgtcagatttcaaccatgcacatctgaacattgccccgggcctggtgttgacactccattcacatgtgaggtcctcagtgaccttgctccagcactcctctaatatcagctccctgttcccaacctcccatcatacaaccccaccctgaatccatgctattccacacaacagtgcctttccctggaattccctccctctccctcacctcaggatccttcctctcagctcacattactagacaatatcactgtattactgcagttactgacatctgctgacttctatccagggttcatcccatgacccctgccccgcagagataacgtgggccagaaaaggtaaactgggagggagttgacggtgatcctagtggggctggttcttgggaaaggaggttctgaagcaggggaaggggttaagaagggatatcactctgtgggagtagcaaatctctccactggcttcctcacatgttaataaaagttccattcttcaaggctgcttcacatccactatctgataggtacttccccagcccatgaaccaagcaggttatgaatacatcctagtgtcataagaggatggcaggagggggattttcctttaaagtcctatggaaaccgaagtccttggtcaacagttttaaacccttctaaggagaaactctggaggccaaagtgctgcaaatgttaaaaccatcctatgtgaacctttctaacttagcctgtccatgtgggaggtgagtcttaagggtcaacatacagaaagccctgggcaggcctgggacaggatggctcagggtaaaattgtgccaagaacctggtacacagaacagtggtcaaggccctctcagtagatgaccatatacaccagcacctcccacctcagtcttggcatggggaccaagaacaaagcttctgcttgccaaaaggaaaagccagacagacaaaaatgtagggaccccaggcttctgttagggttaacctatgatcagccaagcatggcaagaagtaggactgtcccctgagaaaaagagaactcttacatcccatttccttagccaaagcagtatcttattggaagaaaaattacttaggccgcatatttttcccaatctcaacccacctatatctctcacccatattattgcgaagatggaaactcacatcaagtattttgataatagctcatccttgctcaaatcacttcaccaattctggatatcccaagtcctttaatccttagggattctcagtttccatatttgtttaaaaaattcaaaatgtggaaatttcataacaggaaatgtggtctacaaagtgcatggagattctggcccctaagttacctaacatgaatgggaattcagtatagcaataagagcacgatagactcaagacagacagatctgttgaatcctgcctctcccacttacagatgtgtgaccagtgcgagttacttaatttcccaagcctctaggaaatggggagaaagttagtacttatctcctggggccgttgtgaagattaaatgagatgatgtatacaaagttcttagcacagagcttgccaaagagcaacagctcaataaacaccagctattgctgctattgatgattttgtaatgatgtcactgttcttcctactctgtgctgagctcacagtggcctgctctaggccaactcctctctcaccagagtcacaacattctcccttgaggatatgcccccactgagaaagtaggagaaccactgctgatggggtggattacacatggatggtgtgaaggcacagtgagagtttggaatcactgctcaggaccactgatttaactctaatctcgtaagttgccagtttggctcaaatactgacacagctcttacatgatagcaaatacaaggacagtcaggattctgtgtgggtctttacagaagaaaaacaaattacacttaaaagtgccttcaaatctggatccttagtatttgtaattcacttccaaattacctggtttataccaagataacttccctgggtacacaccaagcttaaaaattggaaagtttatctctagcatacatcttatgatataagatatatacattgagtcctcctttgttgttgaggaaactgtcccctacgacgccttccctcctgcatgggttctccggtgagcactgaagtgggaactgttgttgaagtctttgccacactctgtgcacttgtagggtttctcccctgtgtggattctctggtgaataataagactggagctctggttaaagcatttcccacactctctgcacttatacggcttctctcccgtatgaatcctctggtgagtaatgaggttagaacggtcacggaagaattttccacactcaaggcatttgtagggcttctctcctgtgtgcactctctggtgtgtgatgagcttggagcgctcactgaagcacttcccacagtccacacatttatacggcttctctccagtgtgggtgcgctggtggttggccagggtggagctcttactgaagcttttcccacattcggcacattcatatggtttctctcccgtatggattctttggtgactaatgagggcagagctcttagagaagcttcttccacattcagaacactcataaagtttctcccctgagtttgtgctgtgtggtccaggagaattcaagtccttactgatactttgaggttgttcaggagctgtctcttctgtagaattcctccagtgagcactaaaagatgggctttgggcaaagtttcccccaggctcactacactggtcaggatttcctcccaagtggattctctgatgtttcagaaggtttgagctctggttgaagcttttccaacattctccacatttatagggcttttcccccgtgtgaattctctggtgagtgatgagattagaatggtcactaaagcttttcccacattcaaggcatttatagggcttctctccagtgtggattctctgatgggtattgaggttagagcggtcactaaagttttttccacattcaaggcatttgtagggcttctcacctgtgtggattcgctgatgggcaatgaagtgggagctccgactgaagctcttcatgcatgtgtcacacttgtagggtttctctgcaaggtacaggccttgatggtcaataagtttttctaagtcctcttcagaagaactttcttgccactgttcctgtgagggatttccccactgcccttcatcttcattttcattttcactgtcttctccccagtcaagaggttggcaaacagcttctgtaggacattttgataaggctccaggcaaaccctcaaaaatgtcctgctctgaaatctggtcttcatcctcatgcctcatttcaaaacctgaaaaaatggacagaaatgcagtttttcttcactcattagcgcgcgtgtgtgtgtgtttgtgtgtgtctgtattgtacatctgtgaatttggctaacatgaatttgattcttatatcttctatcgcacatcttataaatgtgactaacaagaaattgatcaagttttggtacacacaagtgtttgtgacctgcaaagctgaggaatg

SEQ ID NO: 5622 - DNA, 84977 bp, Homo sapiens
  RIMS3 gene - 40755445 - 40800421 of chr1; NCBI Entrez Gene ID: 9783; Build 35; sequence includes 20,000 bases upstream of initiation codon and 20,000 bases downstream of termination codon of the gene
cccatacgctgctcatagccaataactgagcccaacggggattttaggacaggactgttcctgggataagtgatactcttccgatgggtgactttgactcaaggactcctcaatggccttgccaaactttccttagaacttcattgcagtctgagacacttccaccttgaacaccttccctctgtccttcactcagggtcaggcctgcgtcactgtgcgatggctctctcagtcttccccttccatttcctctcataataaatttttttatttattatatattaatatatattatattatataatatatatataatataattatattatatattaataattatatatattaatatatataatatatatattaataaattatgtttttcataataaatttattgcattttattctgtcttggcgtttgatttcctgagactctgaactaacatgaagggaaagaggacaggatgcatcctaccatagcacatcttctgtaccccattagccacaggagtaggaacatgacccagtctgaccaatcagcgatctcccacatcttggcccagtacctcctcatagcctctcagggtaatttggctcccagacaattagccacttggtccacctcaacaacagacatagctgaccaaatctaagcgaggtctcacagttctgttgcttgaggccatcaagttacaaacatggagtctatggcttctcctgcaacttccagaccctgatgaaacaccacctcacagagcgtgggatttggcttcctgagcagctgctgaaggagccagtgaagcaacctactacagaggatttagctacccacagagcaaactgatcaatgggagacaggaaggagctggctataacaatccactcttcccttccttcctctaatgagctgtttcaagataaaatttctccatacaacctgtctagagagacattctccatggccaagtgggtgcgcctgtcaagagactagctacagctcattgtgaagtagccagcaaacatttccttcccttgcttctcatgttttcccactttctcttatccttaattctcactactccatggctgtgcccctcatataaagctttagcacttaatcccttcttccggctttgttttctaggaaaccttgctaaaacagatcacagtttttgaagagatgggcacatcacccaaactaagctaagaaaagcccttctaaagatttgaaatatataagaaagacaggatttttcttctggagatcttgagctatgaggaactgagggcagccattattcttgcttcatggaaagagcctttctaagaatgaagacatcacagaggaaggcagaattcagacagagagggagacagagtcctgacatcctttgaacacctagatccaactttccccaatatgtgtaaccattttgtcattgctttatcattctgaagaccagttttcccaatccatgtcatataaaacatggtaaccaattagtcccaagttgcctccattcaaaaaatcatccaggtgactagattcttaggctcaatttcaaatttctgggaggaagagctcttgttagagctagctttggccaaatgtccaccactgaatcaagtatcattatggaaagggggacagggtcatgcataaacatggttgtatctactgtaactctatgaatgaaggtatgctggagggtagaggatagagtaacacttctcagaaaagtaggagtaaaggattaggcagactaaacaatgtctgtccacttcctgagaataaataaaggaaaagagggtaaagaggtcagaggacagaacctttatctaaccaacactatccaacagagctttctgcagtggtagaaatgctttatatctgtgctgttcaatacagtagccactagccacgtgtagctgttgagcatttgaaagatggttagtgcaaccaagaaattgaatttttcattttgtttacattgaaatagctacaggtagtatcttagttttctgctgctataacaaaataccaaagactgggtaatttataaacaaaggaaatgtatttgggttgtggttctggaggctggaaagcccaagagcatggcaccagcatttgctcgacatctggtgagggccttcttgccacaccataacgtggcagaagatatcacatggtgaggaagtgtgcatgtgagagagggaggggggccaaacgtatccttttatctggagtccactccctccataactaacccattcccatgcattaatccatttatgagggcagagccctcgtgacctcatcacctcttaagtgttccacttctcaacgttgttaaaatagcaattaaatttcaacttgagttttggagggacattcaaaccatagcatgtagcgaatgactgcatattagacagcataggtctagactattggtctactttgggaagcagcatggaatattgtctgcagcatgtgctttgaagttagcctgagttcgagtccccattccatttacttaacctctctgagctagagaggtgaaagatgcaaagaaagttgtatgtaataccacaaagagagaaagagacaaaagatctgcaaaagttcagccaggcacagtgactcatgcctttgggaggccaaggcaggcagatcatgaggtcaggagttcaagaccagcctggccaacatggtgaaaccctatctctactaaaaatacaaaaattagctgggtgtgatggtaggtgcttgtaggcccagctactcgggaggctgaggcaggagaatcgcttgaacccgggaggcagaggttgcagtgagccgagatcacaccactgcactccagcctggttgacagagcaagattccatctcaaaaaaaaaaaaaaaaagatctgcaaagggtcaaagaatcagctggatttggcaattaagggactatgagtgaattaagacagagaagtattaaaagtgtgattgtttaaaatccaaaccagctatccatctaccttttgtacatctgctaaattcctttcctctggagggggactccaggcagggagagaatgggaatgcaaaagttacctcgtctcttaatcctcttggtcacatggggagcgagaactcaaaagtgtgtcctgaagatggggttccaagccaaaaaaaaaatcagaaccatggtcagtcacggggtgtgaagccaaaggtggggttgcctagtccaaggaagccacaaggaaagaacacctcaaatacataccctctttacatagcacttacactgtggctagactgtaagtcctttaaggttcagggctaagtgtatgatggtactatcagcccctggtaagtgcctggtaccataataggtacttaattaacaataggtacctaaacaacaacattgaatgaatgaatgaatgaatgaaagtaagccagtccactctctagtgcatggtagacattccataatataatgttcattaagttattagagggaggccaggcatggtggctcatgcctgtaatcccagtacttcaggaggccaaggcaggcagatcacctgaggtcaggagttcaaggccagcatggccaacatggtgaaactccatctcaactaaaaatacaaaaattagctgggtggggtggtgggcacctgtaattccagctacttgggaggcggaggcaggaaaatcacttgaacctggaaggtggagggtgcagtgagccaagatggcaccactgcactccagtcggagtgacaagagcaaaactcagtctcaaataaataataaaataaaaagttattagagggagaaaaccctgtattgagaagctaccagggaatcttttttgacctggaaactctgtttgtcaggtccttgcctggcacagaggaattcttcaacaagtgatctctatgataattattattaaatagggagtaaggttttgtatatggcctggggaaggccttgataataataagagctaaaatgtgttgatctcatttaatccttaaaccaactcaatgagacaggttttattagattaattttacaggtgataatttttttttcagatgagaaaatttaaagaagacgtgtaatttctccaaagtcgcccagctcagaaatggtaggactggtattgaacctaagcttaacgcaactccagagtccaggctccaacagaggtttgggagccagggagcagaaggaggctcaagagaggggcttaaggaaagcagttctggggtcaaaatccacttctgatttctattcaatcacatcagtttcgatgccttctcttcttccttccacactcactacttgccttcttgccaagcttctcatcccttctactgagctcacctctacacccctgttcagcttcctgtcccattcagccatatctactctggtttgactcaaggaagcaggagttgaaatagggccaaaggaggaagtttttatttgttggtttgtttttggttttaagatacagactctagagcaagtgagtaaatgaaatattccagtagacagaaggaaatagacaatgcaaacaagagagtatctgcagaggttaagttcttgggaccctgagcacaggtcaggggagaggttggcctctgataggagctggcacactgtggctttccctcagagtaaaggaagacagaatatgggtaaagaagcagaaaagttagtaaaggttaggatgcttacaatcaagagttatgttttacagcaattgataatggcatggtataatatggacaatgtgtttcaaatatgattgcaggtcataaataattaatagatcatgaaattatttagaagtttgtaactagcttttatttttaaaatggaatggaattgaaaatttgaattaattgcacatagcaagggtactgtgaaaattactatgaaactttttttgtttcaatcatatacacatagacatgtgtactggctacagtgtaaaatctgtttatctgctgggcatggtggctcatgcctgtaatcccaacactttaggaggccgaggcgggcagatcacttgaggccaggagttcaagaccatcctggccaacatggagaaactccatgtctactcaaaatacaaaaattagccgggtatggtggcagacacctgtaattctagctacttgggaggctgaggtacaagaatcacttgaacccagaaggcggaggttgcagtgagccaagattgcactaccacactccagcctgggcgacagaatgagactctgtcttaaaaaaaaaaaaaaaaaaactatttactcttgagagtacagtaaaaaatatttaaaagccactatctaggatgtgacaatgggaaagaactttctttctcttccagagttttccatgatgcttgtaaattggtctcgcatggttttgctttcttgttgttgttcttgttttttgtttttgttgttggttttttgttttgttttgtttttgtttgttttatgagacagggtctcactatgttgcccaggcgagtctcaaaactcctgggctcaagtgatcctccaccctcagccttccaaagtgcagggattacaggcctgagccactgctcctggctccagttttgctttctgatagataatagatacccagaggagtataagcccaatcaactgtgctggagctctaagcagtggctacagcatgtaagttacatatgtgccaaaaaaaaaaaaaaaattctagtcatccaggctactctttcttcttggttttcattccccttattgtcccaataggattgtcaacagctcccagggcctgcatgttttcttaattgtgattagtaagtaagagggagtccatgtgcccgccttcccagcaaaaatcctgagattcattctgattggactggctgagttcacatgaccactctgacccatcattctggccagtggattgagtcccctgatttggctcagccctgctctacccaaggaagttaccttcctgaaaatacatgaatcctggaaaggaaatcagggcctattgttaaatagaaagggaaaaatggagaaataaagcagatgacgagtgcaaatactattgaatgtttcaactaatgtccaatacatatggcctttaaggtacccacattagctgaaaggttcaatagtatttgcactagtcatttgcctatttgctttgagctccactctatctttcccactctggaccctgaaaactacattccccagacacttcttgccagctggcttcctgtcatatttggtcaatgggaagtacaggtgggaaattgtgtgcctggggaggggatggtgggaggagaggtgaagccattgttctctctgcttctgctggaggctctggcagcagctggtagttatgggcttggagaccttcagcctttccagcagtggtggtagtgggttccttgccaggctccagcagtgttggtggtatggaggggcagcagttgggtagctgcaggccccagtgacctctggcagttctgttagcataattgcaaaagcagtgcttcagtagtgttagcaacaagtgcactttggggtctagcgacactttcccttttgattctccaggtcttggagtgttagaacttcttgcatctattaatctctagtctacccaactttaccagctttgctccttcaggctttctaacagatttctaaccagttctctgacaccaattccctctgtttgaaattccaatcacttgttttcttgtcttcacccagactgacacagcgttcctctggccatcagatgagctaactgcaattactaacttcccagctgtgcatctacagttgttgtgctgggtggtaccataagagctgcccgctaagctttcagctgaggcactgggcaaggggtgagcgccgactctggagcaagcacagggaaagctgctactcccttctgcttcctcacctgtccccagctattagaactgtgttatggagagcttactgcttgcctcccaagataacttgactccatgttgtggctgagagggatgggctctggaatgaccaggtgggaatgcagcaatgagcacagttggcaaggaggcccaaaacagaggggccggggaaggatgtccttgctgcagagtagagtttagggagggaggagagaaagagactattaccttcctttttttgtttgtttgtttgagatggagtctcactctgtcacccaggatggagcacagtggtgcaatctcagctcaccgcaacctccacctaccaggttcaagcgattttcctgcctcagcctcccaggtagctgggattacaggcgtgcgccactacaccaagctaatttttgtatttttagtagagacggggtttcaccatgtgggccaggacagtcttgaactcctgacctcaagtgatccacccgccttggcctcccaaagtgctgggattacaggcataagccaccgcacctggccctgcttccttttttttagagatactgagggagggatagactgatggttctcaaccttttctgtcttctgccaagtgttccataagaaaaacaagaaaacagtgttttccaacagaatttattcttgccattacccaaggaacagtattgaaaacattacatccaacctagcttacttctgtgacctcctggtgcttcgcaagccactgtgggacagctaagtctctgtagagggtacaggttaagattatgaatgatccctgcaggcaccaaaggggcatacatgtcaagaacacgacttttcttcaaggtcccttgccttggctagcagtgtgcaaaatagggttgggcaggtcttgagaaaatgactataaacattaagtgtgatcctttttttttaattaattatttatttatttattattttttgagatgtaatctcgctctgtcacccaggctggagtgcagtggtgtgatctcagctcactgcaagctccgcctcctgggttcacgccattctcctgcctcagcctcccaagtagctgggactacgggcgcccgccaccatgcctggctaattttttgtatttttagtgaagacggggtttcaccgtgttagccaggatggtctcgatctcctgacctcgtgatccgcctgccttggcctcccaaagtgctgggattacaggcatgagccaccgcacccggccaagtgtgatccttgattgtaagccttatagatcctactgagccatcaacctgctttgtgaccttgggcaagtcacttaatcaagttcaatctcaatatttccaccttatattaggccggcacggtggctcacacctgtaatcccagcactctgggaggctgaggcgggcagatcacctgaggtcaggagttcgagaccagcctggccaacatggtgaaaccccatttctactaaaaataatttttaaaaaattagctgggcatggtggtgcacacctgtgatcccagctattcaggttgttgaggcaggaaaatcacttgaacctgggaggcagaggttgcagtgagctgagattgcaccactgcactccagcctgggtgacagagagagactctatctcaaaaaaaaaaaaaaattccacctgtttttaaaaaaggcataggaataatttattttacattatttgaaaataaattgtcctaagggggtagagggaatgggagaagtgatagatattatccaggtattatcctctgcctctccttcttgtccatcctgcctgagtttttttcatcaagtaagatgataagtgttaaaatgctctgaaaagtgcaaaacaccatacaaaagcaagggagtattattatcaacatagttgttagcttaggaggatgaaggcagggcacaggctcagagccaaacagctggaaggcaggaaatcttaataccaaagaaggaaactttttttgttcaaattcttcctggagtggcacttttttttagagcagatttggcactgaaatcctctgaaatgctgaagtgggtccagaaaagtattaagggggtacgtagggcattcaggagccaaaagacactggagaaacaccagccctggttcctcagttcctttgtgatccaacaaaagatacaatcgaaggaggagtcgaattgtatcagcgggtctcaggttcaaagccaggtgggtgttggatcctctaacaggctctttaaccagccaccacgctattttgggagccaggatgtcaggggcactctgtaactaatactgaactcaggtgccaacaacctaaaaaccatcccctctacacagtgttcagaaagaacactgacctggagaggactttagagacaatctagtcagaccgaggctcagagaggggcagggacttgccaagataacacagtagagtcaggctcattgggctgcagaagcccacccaatttagctcaagtacaaaggagtttcttgtaaagactggaactgaaaggcaggatgaaggatagaggtctaggactcactggtctatttattctctatcttctcaccactcctcatcactggataggattgctccttccccctctacctacagtcaggcttctgccttctcttggtctctgatcctacttctctgggcctgcacatggctttcctggccaagacctacttgtctatgactttttttttttgacagggtcttgctctgtcacccaggctggagtacagtgccacgatcatcactcactgcaacctctgcatcctgggctcaaacaatcttcctgcctcagcctcccaagtagctgggactacaggcatgtgtcactatgcctggctaattttttttttttttttttttgagatggagtttcactcttgtttcccaggctggagtgcaatggcacgatctcagctcaccgcaacctccgcctcccaggttcaagtgattctcctgcctcagcctcctgagtagctgagattacaggtgtgtaccaccacgactggctaatttttgtatttttagtagagacagggtttcaccatgtttgccaggctggtctcgaactcctgaccttaggtgatcctcctgtctcaacctcccaaagtgctgggattacaggcatgagccaccgtacccagcctaatttttatattttttgtagagacagggctttgccatgttgcttaggctggtcatgaattcctggactcaagtgatccacttgcctcagcctcccaaccggttggaattacaggcatgagccaccatacctggctgtctctgacttctctacttcaactccttctgccacctgacaatttctttccttttttttttttcctgagacagggtctcactctatcacccaggctgtagtgcagtggcatggcacgatcttggctcactgccacctctgcctcccaggctcaaatgatcctcccacctcagcctccaaagtagctgagaatacaggcatgcaccaccatgcttggctaattaaaaaaaattttttttcctttcgtagagacaaagtctcactgttgtccaggctggtcttgagctcctgggcttaactgatcctcccaccttgacctctcgaagttctggggttttgtgtgtgaggcgccatgcctgggacaacaatgtctttctcttccttggttcaataaagcctcgaatcagcccatcttagattgttgtgctaggttgtcttagttcattttgtgctgctatatcagaatatctgaaactaggtaatttataaggtatagaaatatatttcttacagctctaaagcctggtaagtctaaggtttaggggtgcacacctggcaagggccttcttgctgtgtattccatggcagcaggtgaagggcaagagagcaagacagcatgagagggacagagagaaggggagagagaaagagagagagaagaagaaatggggttgaatgcatccttttatcaggaacccactccctcaatatcgtcattaatttatttatgatggcagagtccccatgacctaatcacctcctgaaggtccctcctctcaacactgttgccttggggattaagtttccagcacatgaaccttggggaacacattcacaccatagtatacaccattggtcagaggacagcagctaatatattaaatggtgacccttgactccggtgctggccctatctgctcaagtctagaggctggaggggccaggtggtttaaagcgtggccccagcagggtttgtggtctgggcagcttttccttaaagtgaatgtgagtgaggcagaaactgtaccatcactaggaccatgtgattggagctcaggattccagatttcctgcccagaacatttcccatgaaattgtcatttctttattcagcagacatgtcgtaatgcttgttaaatgtcaattatgaatatcttcttcctcctcctcttcttccttcttgcccccagaagcttatgatataatgaagataaaggcaggaaaataattagaaaacatgagcactttagaagaagtataaacaataaccacttactgtaagcggtagctactgttattgtttatgcatcttctaaagtgttcatttattctcattattttcttgtctttatctttattatatcatgtatctgactggtacgtataccagtcactgctgatcactttacatatgttttctcatttaatctttacaactcccctgtgatgccagcaccacatttcacacatgtggaaggaaacaggctcagagagtgatccacagataataaacagcacagcagggctctgatgctaaagcctgttctgttaaccactgtgcagtcttcaccatgctgttagagcacaggggaccatcttggcctaggtagaaggacagggacgactggagaaagcagtggacttccaggaggaggtgacatctgagctcatcatgagcaagctttcctcagtcaagtgttggcaaggctcactgtaaacagaggaagccacatgtgggaatagcaagatgccagcagagtacagggaaaagctagagtgggggtgtgagtgggaagagggccaggagcacattgcacgacccatgagtgagcgcctccctacttctgtaccctcggtccctttgccctgaccctattcctagccctggcggagaatgtgaagatgaggccagagggaacattgagaagaaggatctcagagaagaaggaaaattcagcagaacctaggaagtgcaactgctattgcctgggcctttgttcctggaatggactctgagagtgcatggtaaagtctaaagtgaaaaattcaagaggagggagctttcttttacctgacttttgggtcttaatcttagttgttacttcctttaggaaacattccttggtctaacaagcctgagaccctgagatgcttttttttttgagatggagccttgctgtgtctccaggctggagtgcagtggtgcattcttggctcactgcaacctccgcctcccagtttcaagcaattctcttgcttcagcctcccaagtggctgggattacaggcacctgccaccacgctccgctaatttttgtatttttagtagagacaggttttcaccatgttggtcagattggtcttgaactcctgacctcaagcaatccacctgccttggccttccacagtgccaggattacaggcataatcacagcctgtaatccaccatgcccggccttttttttttttttttctccagagatggggtcttaccctgtcacctaggctggagtgcagtgatacaatcagtttactgtagccttgaactcctggactcaagcagtcttctgcctcagcctcctgagtagctgaaattacaaatgtcagccaccacactggtttggcggctaggtcttatttacccttccacccccaatagagcatgtggctcagagtagctgctcagtaaaagactgatgaatgaataacaaatagcctccaaggagcttctgccaagtctttcagaccacatcgattttctctctgtctctggagtcctactgaccttaacacttggaatcctatgcgtgtttgaaccagaagaaaccttaaaaatcatctagcggccaggcacggtggctcacgcctgtaatcccagcactttaggaggccgaggcaggtggatcacgaggtcaggagatcgagaccatcttggctaacacggtgaaaccccgtctctactaaaaatacaaaaaattagctgggcgtggtggcgggcacctgtagtcccagctactcaggaggctgaggcaggagaatggtgtgaacccgggaggcggagcttgcagtgagccgagatagcaccactgcagtccggcctgggtgaaagagcgagactccgtctcaaaaaaaaaaaaaaaaaaaaaatcatctagctatctcctacctctaccatctcaaagatggggtgattgaggtgatcacttatttgccaactgtattagtctgttcttgcattgctataaggaaatacctgagactgggtaatttataaagaaaagggaggctgggcacggtggctcatgcctgtaatctcagcactttgggaggctgaggtgggcagatcacttgagatcaggagttcgagaccagcctgggcaacatggtaaaaccctgtctctaccaaaaataattagctgggcatggtggtacatgcctgtagtcacagctacttgggagactgaggtaggagaatcccttgaacctgggaggtggaggttgcagtgagctgagatcacgccactgcactccagcctaagcctaggtgacagagtgagactccatcaaaaaaaaaaaaaaaaaaagaaaagaaaggaaaggggtttaattggctcagagttccacaggctgtacaggaagcatgatactagcatctgcttgccttctggggaagcctcaggaagcttccaatcatggctgaaggcaaagggggagccagcgcgtcttacatggcaggagcaggagcaagacagagtggtcgggtggtgccacacacttttaaacaactggatctcatgagaactcactcactataatgagaagagcaccaaggggatggtgctaaaccattcatgagaaaccacccctagtataatcatctcccaccaggccccacctccaacactggggattacaaatttgacatgagatttaggtgggaacacagatccaaaccatatcaccaacaatcttagttttgtatctccagccacagtttctcttctgaactccacagtgaatcagctgcctatgcagccctcatctgggatgtcccacagtgtgtgcatctaaacacatccagaatcagcatcccccccaaggcctaggcatcattcaggcttccctgtcttggtgaagaacatcaccacccaaccagttgtagggaccacctacctcctacagcctcccactaccaataaaacagcaagtccagcagtgtctactacctaaaccacaaaatctctccaatttccctctgcctccctagcccaaatccccatagctctcaatggacccctgcaaaagtctcattagtttccccaaatctgctctttctttgtactaatccatgctcctcattgcagctggagtgacatttaaaaaatgctactttctcctttaactcctttgctgaaagatttccaatatctctccacttaaaaaaatatatattattaagttattggccaggcgcagtggctcactcctgtaatcccagcactttgggaggctgaggtgggtggatcaggattcaagactagcctggccaatatggtgaaaccccatctctacaaaaaacacaaaaattagccaggcgtagtggcacatgcctgtaatcccagctacccaggaggctgaggcagaagaattgcttcaacctgggaggcggagattgcagtgagcagagatcacgccactgcctcctgggtaacagagtgagactccatctcaaatatatatatatatatatatatatatatatatataaaattataactaacacttatggaaaatttatatcctaaggtctgttctaagaactttacacatattaactcatttaatcctcataactctaaatattcccattatacagacaaggaaacagaaactcagagaagcaacttcagggcctttgtgtaagctcttacccatccttggcttgttgatctggctgactgctattcaagcttcagatgggatgccttggggagcattcaaagatctccctgtctaggccagtccctcccatagcatctaacccagtttttattatacaattatttagggggtgatttggttcatgtctgtcacccccataggctttaaattccatgttttgctcataattatatcttgaatattcaacatataataaatacttgatatttgttgaatgaatcaatgaaaagcattttcagtaagagaggggatgtggtcagatttgttttagaaggatttctcttgtgtaaaagtttgaaggtggtgagaccaagtcaccaacagcagctgaattcaggagtgacaggaaggcaggctggactagaggagaggcaagagggatggagagaagtgggtgaacctaggaagtatttaggaagcaaactggatggctctgataattaagtggatagaagtgaggaagaggaaggaatcaggagggactcccaagtttctgagagcaccttgaactggggtgagaaagcatctgcaaaggaggcaggttgggttggcagagcaggctgtccctagacccaagcaactgaaacatggaaaagctttcaaaaaaatctttgcacccaaactccttagcttggtcctggtgtactttattcagccccatctgtggtctacccccaaactcagagcatatagatcactgctcctcccccaagccccacttgtcatccagcccaccttagtaagtgccaccccactactctctctccacaagatgcagcttggaggacgtctcctctgggatccctccccactgcccccaccgcttcctggggtgaatgagtcctctgtagccatcaggattcgctgtatcaggagtgttcctctgctgtcacctctgatgactattttcctcaattcagaatccccagcacctgcaaaaggcctggataaaggtaaacctcaaaaaagtttgttttattgaattttcccaaaggtttggctttattacattaagagctgaggccaggaatgtggcagtaaattctggtgccaccacttagaaagacaagtcacttttttcaagcctcagtttccgtccatcaaatggagataagaatacagtgcacctacctcgaagagctgttttgaggggaaaatgaaatatgctaggttaagtgtttaacacaatgcctggaacatggttagttccctcaaaaaattagctgttatttatttatttttaaattctcgccttgatgctcagaaggggctgagcaggaacagaggattgcagttcttaggatggccacgcgagggaagtggtgagcagcctccaggaggacttcggctcggctgtgccaaggcacctgctgaggacccagatggcccgcctggggtttccgggacttcccggcccctaaacatgtgggcgctggccagagcgccgcaggagaagcctctgccaggtgctcggtctcgactctcacagccccagccatccctcctgctcgtccccgtctcggcttggaggggctggcgggcaggaggggacagggtagggggcaaccaggatatatcccctccgttttgtcatttgtctttcaaactgacttatggccatttcttctgtatagaagccttgtagtcaaacatttccatgttttctcttatggcttctaggtttcatcatgcttagaaagtcttttccatctccaagattattaaaatattcactcatgtcttttttctgatacattatggtgttaaatatgtggtccacctggaatttatttcagtgtcgaataagggcacagctttttgtaatttccccaaaagacttgctggttattccacccatttgatctccgccaccaacccccccccccccgcccacaaccccctaccaactccgccccccatttgtctgaagtgctgtcttttattcattcattcatttagagacaaggtcttgctctgttgcccaggctggagtgcagtggcgtgatcacagctcactgcagccttgacctcccaggctcaggtaatcctcccacttcagcctccctggtagctgggactacaggtgtgtgcaatcatgcccagataaattttttttttttttttttttttgagacagagtcttgctctgttaccaggctggagtgcagtggtgcgatctcagttcactgcaacctccgcctcctgggttcaagcgattctcctgcctcagtctcccaagtagttgggactacaggtgcatgccaccacacccagctaatttttgtatttttagttgagacagggtttcaccatgttggctaggatggtctcaatctcttgatcttgtgatccgcctgcctcggcctcccaaagtgctgggattacaggtgtgagccaccgcccccggccacaagttttgtatttttttatagagacaaagttttgccatgttgcccaggctagtctcaagtgatctgcccgcctcaacctcccaaagttttgggattactggcatgagccactgtgccgggcctgaagtgctatctttatcatacattgaattcccttgtggggctggatccatttccatactccattttgttccacagatcggtctagtcctgcttcaataccatactgctttaaatacattgactttatagtatgttttagtatcgggtaagacaaatcccttttcattacttttcttcctggactttttattcctgtatgtttattcttctatatacacttaagaatcaaccccctctccacccacctcccatccagtccttctggtaaccaatatagaactttgaagatactgaaattatatgcaaaatatacattgcacatctccagagagatagtgctaagttttcatcagatgtgcaaagggaacccctggtttacctgtctctgtgaaaggggccagggaggagcacacaggaagcctgattcctctctgtgctcccacccctcacctccaccctcgttccaggtcctgccctggcctccatcccacctcccctaatctagtcccccttgctgctccagagtaacccattctaccacccaggccctagtccaggcctaggcctgaggtagaatagctgataacaaagctttaattaatatgtaaatataatcaggagccccagctccacctctgaccagctatggaacgcactttgaggcttttcacattgtagggcctcagtttatgcttctcacagaccaggtgagaagggaaggcgtaggatgactatgcctcctagcaatccccaggaggatcctttaatcccaataattttcctttttctccccaccttcccactccccatttacttttttttgagacagagttccccctgtcactcaggctggagtgcagtggtgcgacctcggctcactgcaacctccgcctcctgggttcaagtgattctcgtacctcagcctcccgagtagctgggactatagttgtgtgccaccacacctggctaatttttgtatttttagtagagatggggtttcaccatgttggccaggttgatctcgaactcccagcctcaagcaatccacccaccttggcctcccaaaacactggtacaggcatgagccaccgcacccagctcccatttacattttaattcatgccctcagcagggagactactggttttacatgcctccagcaaatattaattattctgtcctctctgtcagtgggtggaattcaaaacactggagcccaagagtggaactgaccagtcctaagcaaggttaaatatacaagttggggcaggcacgaccctaggaaagacttcatacagtatcctcccgggctgcagaagaacccaggactccaggagtctatttggaagtttatataggcagatgccaggccctagaacagagtttctcaacctcagaaacctgctgacatttcgggcctgacaattctctggcgcaggggctgtcctgtgcattgaaggcgtgtagcagcatccctggtctcttctcatgagacgccagtagcaacctcctcgttgggaaaaccaaaaatgtctccagacatggtcgaatgttccctggggggcaaaatcgccccaagtttaaaaccattgctctagaagtagagagcgcaggggaagcaggttaacttgggcttcagggccggccactctacttccttctgtctgaaagggacattataaagtctttctcttcataccaggcacttgggcaagtcttttctcctatctgagcttcagattttccatctgtaaaatggacttgacgtttgtaagtcgtttcttctcttaccatctgacgttcctggaactgcttcagggcagggcagggcagggggcgccgtggtgcctgtgaggtcctgggaggtgccccaaagaaaaggaaggatgagaaagaacagatagggtaggtggtggagaggggaggccgggcaggaggcaagagagtcctagggacacggagaggaatgaggcttccccagaccccgcttcttggaagcctcattaatgtaggtcccccaaccacaacccggcaagccaaactccccggattcccctaggccccgcccaccaccaaggtccggcccactggccccgcccatccacgcggccccgcccccggcaggccccgcctccccttcgcctcccgccggcccaagcttgggctttgcacccggcggcgactgaaaacggtggctgctgcggagccggcagcgcaggcgggcggagcggagctgcccccgtggtggcgggcgatgcccccgtgagcctccctcgccgcccctccccgccccgcgtgcctatccactcggagtccgcgccagcctggggccgggccgcgcctactgccgggttcgcggggcggggtcccggggcagcacctgccccgccttgcggagccgcctcggcctgtggaggccccctccctgtctggaccccggccccacctccgggtaagtcagcaggccttgctcgcctgggagtggacgtggggagggggctgcagaggtctggaggaccacggggggaggggggctctggccatgaagcgcaacgtaggtatgtgagtgtgcaggggcgggggtggggggatgaacacagggtgtgagagggctctggggaggggactaagggatgagagagggacgtggggtgtttggggaagcctggaaaatggggaagggggcccagagtcttgagttctttgctgatgctcagagctcctggggccctggtcttcaacagcattgcctggcatggcatttttggaaagtgcttaaaatccctcctggaaagggagctggaaggcagcctgcttttctcccttctgcctgtgccctggttgagaagcagccactttttcctcaacgtgacaccgttgtggtgtccagaggaccccctccaccccataaaagaaaaggagtgctgcttactccagccctggggtgggaagagggggctttgggaagctgggaatgcagttggtcagcagcatggtgcagagcccagggttcagggaggcttggcaggacccttgatgggcaacttgggcatgctctcattcatagggaggagctcttccctgactggccgcctgggtacctggactccatgtccccatcacctctggacaactcagccctgaggagtgggtttcttcagtgtcctggtcctgaaggctcaggaaggatcctggaatggggtgggcaatggcatatcaaggctggagaacagggggcattggctggcactgccacttggggcctgtttcaatgtggtccttcagggcttggacacctgggtgaatatgtgtccaaccctagccccaggggtgttatcaggatgtagggaagaaggctgctgctcctttggtcctgtcctctatccatgatgacttcttaagtctgggttccttgggtttggggcctgaagtcatgggaggaggattgggcctggtcaacaaggggttaatgagccatctcccccaccccaccatagttgctgccagccaccaattagtctgtaatcaggcagctgccaactgtccctgggggcatgtgggtagcctaatggggcattcttggttgggaggcggggtgggtgggttggcagggatgtgctggggaggtgacccatgtgccctgtgcttaaaccaagcaccatgccctttgttgtttgtttagggcccacagaccccttccctgccttctgttcctgactgccttgcttagggacttccagccctggggttctacacttatccgaccctttgcagggtatgaagcccagagttggttaaacttggcttcaaacccaagctctgccactttctggctgtgtgatattgaggaaatcacttcccctctctgagactctttcagtaaaacaaacccagctgctatgtgggtagcaggaaggagtgagtgaaatggtggatttgagctgcgcagcacagtgcctggcactcaggagggctcagcagctaactgctgaactcatgagcaacccctgtgccaagtacttgctgggcgggcgtgcaggagccaggtgctgaggacccagcagggaccacggtcccttctcccagggcatgtggtctgtgtcactgtcttaactattctctctccctccctccttgctcaacgacgcttctggtctctggactttaattggattttactgcgcagaacccaggcctaaagctgctactctctgggcttcccaacttcctgcccaggtgctgagctctgtggggtctgtcaggggtctgggtgatgtctgcagctgcagtagcagctggccctttaaggagggaagaaaacaattatctggcctgggcattgcatcagctggagcctggagggtccctggggaggggggagcaggctggtggttgatttcattagtgccatgtgagaactctcacctgccccactccccagccacaaccttctcccccaggcaacagctgcctcagtgcctcctcccactccaggggcaccaccttggagaggtctctgtgtgtaccccccagtcaatgtcatgggccccagaagaggagggaagtgtctctcacattggccttttgctgactgtggcactgtctctcctgttagcaatctgctgacttggggtgcagggtgcgtctcctgtactggcattttgctgacgatgggggtgtttctcccacactggcattttgttgacccaggggaggagtgacttctacactgtcctcactgacagtggggctgtctcctacactggtatatcactgacctcacagaagagctttaccagctggggtgtgtgtgaactgaaggcggaggttagaaacaagtgctctctggttggaggtgagcttgctgggaatggtgagtcacaggggttgtgtggtttggggcagagaagagaccaggcacttgggcatcagacagacaggattcaaatctaatgccttccgcttccaacctgttaccacttcaggcaggtggcctcaactaccaagtctcagtctcctctggaaaataggaataatttatacccatacttctccaccccatctggaatgtggttagggaattaactgtagtaaccagatgtatagtacctagtctagagctggcagggggagggtgcatactgtatgatggttctcttccctttgcaagtttgggcttttcatagcttgagctcaagaagcctggacaagaaaaggagggtccgggaggagtgaagaaaaaaggagaaagaatgcctggccctcttgcctctgtggcagaaggatgcattcagtccaccaggtacctctgatgtatcagactctatgagccaggcggcccctgccctcacggaggtgacattctagtggggacatgacccagagcaggtaattacacatggcatgtgtgtagaaaggagggacttgggctctggaacctatcactgaagttgctctcctgcagtctgtaatctgggaaaggttcctggaggtggcgacatcttagctgagtcatgaagggtgccaaggaattgtagaggcgaagaagggatgaggaaggggaactgtgtgtctgaggccctgttgatggtgagaacaggcttggcgtggtagagggagggcagtgtgggcaggcccaggacagcctggcccgatttcctagtctagcaggatactaaagacttgggaatttatcctcaggccaatggcaacccctaaagggttttaagcagaaaaggcaagatcagatttccccagaatgttagggtctatggccctcaggcagagccttcttgggagtgactttttgccctctcctacccttttccctgtgcagcagcctcggtcccagggaaccggttgtttatgtggctggccccaggagggaggacagccagtcccagtccctccagctccttctctctggtctaagctgtatcgtggccttgttgacaaagctcagcccttggggccaggttctcccaacctccctggggagccagagggcaagaggcagggttttgcaccaggctgctctgtgcccacatcccagctctgcagttcctgagctgggtaatctctgggaaggcatacccgtctctgaacttctgtgtcctcaactataaaatggagttgatgatatctctaggaaaacgataaagtgaaattccacatggaaaccataaaccctatctggatgtcagttggcatttttactctgttgtgtgggggctgacatcaactctgggccgggcccagggctggctgggggtgggagcagggctggtttcaagagtcagtggtcacgcagggccctgcgcctagaaggaccccacacttaatgttctgctgacaccgtcttaaaatttttagtaactttgaacaaggggtcctgcattttcatttagcactgggctctgcatattatatagccccacaaatcgggtaggggtaggaagaggcagggagagacatggatctgcaaatggttcccaaggatgaggtggagggcattactaactgtcccaaggtgggtgggatgttaataagaataacacttatttagtgcttactgtgtgctagttctctgcccatcgctttacatgctcatctttaaacagtcctatgaggtaggtactattatcatctctgtggtatagatgaggaaactgaggtgacctagccaaagtcgcacagctatcaagtggcagagctgggattcaaaaccaggttgtccaactgcagagcaatgcttacaccagggaagtctccacctaggaggagcgaccacctgccctgggtttggaggataacttggagtttgcccaagaggaagaagtgcagtggagaagggaggactctctcacctgggaagtgtccaggctaagggcatgatgcttggccaggagatggggagccaaatcctggtgccttctggggttgagagaaggtaacctttgcatttcatggtcctgatttgccaagctcagagccccttgtcactctgcccctaggtcctgctgctaccatggctcctcaagttgccccaacccctcttcccacctttttgccccctccctccctacctcccgggtaatctcgtttacttctcttgattttaatgatctcttctgggttgaagatctgcaggtctggctgggtgcggtggctcacacctcctcaaagtgctggtaatcccagcattttgagaggctggggcaggcggatcacttgagcccaggagttcaagaccagcctgggcaacatggcgaaaccccatctctacaaaaaaaatacaaaaattagctgggcatggtggcgcttgcctgtattcccagctgcttggggggctgaggtgggaggatcgcttgagcctgagaagttgaagctatagtgagccatgttcatgccactgcactccagcttgggtgacaaagcgagaccctgtctcaaaaaaaaaaaaaaaaagaagccccaacaatctgcaggtgtgactgcttcctggcccacacttagatgtctcacaatcagcttcagttcaggtccagacccagctcctgactctcccacctgcacctgctctgcctttaaggtccccggttcatctctggcatcgccgtcctcccacctggtcaagctagaaagctgaaagttctcctggatacgcccctcttcccgtcccacacccctataaccagtcctcagcaagccctgttagtcctcctgaatctctgccttgagtccgtggaccctctcgctgcccaccaccccctccaggccaccattggctctcacctgggccactgtgacagcttcctacctggtctcctgacatttgttcttgccccgctttctttcatggtcttcttaggataaacgttggattgtgtcatttccctgcttaggacccttccaagccttcttggaatgaaagccagatgcactgacgcagtctccgaggccctgtgggatctggtccttgcctacctttttgtgtcttcttctgccactctccctcagctgcaggacttccacacgtgttgtccccaatcctggaatgcacgccccctcttggggccctgctaactcctacttatccttcagatagataccagctcgaacgtcatttccgcagggaagcctaaaaaccagacagtaaacagcaccctgctccagaggaccttgtacttcttcataacattcagcacactcaaatcgcttttccctcatgtctatttcatgctaggctgtgaactctgtgggctcaggaatccgttttgcctcaccccggcacatagtaggtacacagtgagctgttagatgaatgaagggactagatgaggagtgctgcagcctcctaactggtccttgcctccaggcctgccttttccagccctttctccaagcagccccagaacaatctttctaaaacacagaactgaccccgtcaccccctgctacttaaaatacttcaatagctccctgtcactgacaggaaaaggcctcggcttcttatcatggtattcaaagccctttatgatgtgcgcctgactgcctgtcttccctgcttccccgccacactttgaactccagtccctctaagacaccaggctgttttgggtctctgtgcatctgcacttgctgttccctttgcttgtaatgcctccccacccctactttgtctccatggagaatgtccttaattcttcaaaatcggctcagctgctaccttcgctgtgaagcctgtggagcccttccgctcctccccaggcagagttagcccaccctccctctgccacatctgtgcaaagtctacatctcttactcgctgtctcccactgcactgggcttctccgacgtaggcacagtgattattttttcaggattgttcatctgcgtacctccggctcccagcttctctcttgtcttaattaggtctttgcttatatacagaaacccactcaaaccagcttcagtaataaagaagggcttattacaaggacagaagggattccctggaactaaggggaaggaaaaccattagcttcaggaaggcgggacctggagggccaagggaacttgaagcagccattctctgcaccctgcctttctgtatccacagactggatatctctgccttttcaggcaccaagccacctatagttcctgtattgtgtcccttggtttcagccacatggagagagagaacttggggcttggcagatccaatcccaaactcccaggagaggatctgattggctcagagtgaggcaggtgcccaccctggtccagtcatctgtagcctactgggaaggatcaaagagacatgcaaacagggttctcagtgccccgctcagagaagggggatcttcgttagcttccaaacacatctcctggaattcttagagtgccgatgtgggtgcaggcagttgggcctgagccccaaacttccatctggacagcagctggagaaaaaaggcctggaattgtgacttaaaggagagtcttttcctgggcagcagtgctcaggacaggctctgaagaacctgtcaaatgtcattcagaggcctgaggagagagagggagaagaaagcctgaattttctcaccttgctttggagtgaggagagagggaagaggaagccaggaacaggcagaagagtttttccccacgaaaatcttcatcctccaagatgtaactcttttcatcagtgaaaaaccaaaccatgtctacctcaccttccccctgtcactcattcttgacctgtattgattctgttctttgtgcttccctggtaataaacattttttttaagcacttactctgtgccagacattgtgttcacacatttcatttaatcttcacttctataagatgggtactattattattcccattttattttatttttttaaaacatataaattttattttattttagagacaaggtctcactttgttgcccaggctggagtgcagtgacttgaacacagctcactgcagtctcaacttcctaggctcaaatgatcctcccaagaagttgggactacaggtgcacaccaccatgcctggctaattttttttttttttttttttttttgagacattgtcacattctgtcacccaggctggagtgcaatggctgggtcacggctcactgcagctttgaactcctgggctcaggtaatcctcccacctcagcctccctggtagctaggaccacaggctcatgccaccatgcccagctcagttttgtatttttttgtagagacagggtttcaccctgttgcccagattggtctccaactcctgggctcaagcaatcctcccatcttggcctctgaaagtgctgggattacaggtgtgattcacgacacccagtctgtcatctcattttacagacaaggaaactgcagtttaggcatttacaggctagattttaaagctcttcacctctcttaatctcggtgatttgctgatttgtctgcttgctgtttgggattgtgaaggtctcacgggcagatagcaggttaccatcctgcctctttccccactgcccagcaagggctgccaactgtggaacagatggatgcaggtagagtagaaaaggtgtctgggtggacgtcaagtctctgacgtgtggatctcccctgtgtagctagctctgtgactatggacacgtctcatcctttctgagcctcacatttctcattcagaaacggggaagataattcctgctctgaggctcatattagatggtggccgttatgacaatttgtgaataggaaaggaccaaggaatttctaaaagattgttattaccagaataggctgtagcaacagggcactagcggggcactgtgcccgaactcctgcaagaggtggacaagcctagagcttcccaatatgtggagtgggaccagggatgactttcagtgccatttcttaacattagctcacgtagtgagaaagttggttccctctcaacgatatcaagtccaagattgtccaagggagaacatgtcagtgtagtttctagtgtgtctttttttttttttttttttgagacggagtttcgctcttgttgcccaggctggagtgcaatggcgcaatctcagctcaccacaacctctgcctcctgggttcaagagattctcctgccacagcttcccgagtagctgggattacaggcatgcaccaccacgcccggctaattttgtatatttagtggagacggagtttctccatgttggtcaggctgttcatgaactcccgacctcagttgatccacctgccttggcctcccaaagtgctaggattacaggcgtgagccaccgcgcccggcctctaatgtgtctttaacaactttccaacactggttgccctccctttttaacagagagctctcaggctaggctcagaacattgcctggcaactccatatagctaaaacataatatcataactgtttttactgtgtttgttttattgtcattttctatttattaaaagtgatactggctttccatttatagtaataacatggtttctattgaaaatagttgcattaaagttaaaagtgtcaatttatttttatctgtttgtttatttatcgagactagatctcactctgtcgctcaggctggagtgtagaggcctgttcttggctcacctcagccttgacctcctggactcaagtgatcctcccacctcagcctcccaaatagctgggactatgggtgtgagccactgcccctagccagagtgtcaatttaaagaaaataagtaataaacagtacaagagtctgtagatttgttttgtttgtttgtttgttttttgagacggagtctctgtcgcccaggctggagtgcagtggcacgatcttagttcactgcagcttctgcctcctgggttcaagcgattctcctatctcagcctcccaagtagctgggattacaggtgcgtgccaccatgcccggctaatttttgtatttttagtttgaccatccagacggggtttgaccatatcggccaggctggccttgaactcctgacctcaagtgatctgcctgcctgagactcccaaagtattgggattacaggcgtgagccaccgtgcccagcctaggagtctgtagatttggcagaaatcattgaggtgacacacagtgttatgcacttaatgcaaaattgggaagtggtatggggatgtcggaaatgtgcactgttgacctagataattttgaaggtcccttccacctgcccaacaaatctaggggtctccccctgctgcgctggcctgctctcttctgctcaccttgaaccctggcttgggcttcttttggaggatcctgccatgatttccctgcagacaggagaatttgtgccattgttttcacaacctgcttgggaggggggctcatggagataaggtgtctggatgtggtaggatgccccctcatctctgaggccaggacttgagacctcctggggggagtaggggctgcataccctacagttcttctgcttcctatgtataacacaggcctcagggaggcctagggagcagtgaagctttgggagccacaggtaagggcaaggctgcccctggggcttcatgtcccagagcttggggctcagggacagtgaagcagaaggcttcggagtctcataggtccctcttcccctactccccgctttgtccaccgctttgtgctgactgcttgtccctgggacctcgcagcagaccccagggggcctcggaggacacagtggatttatcctcagggcccatgagcagggccaaagtagagaaggcagatggcaaggagggagggaagtcctgtctgccccctccctagtcccatgttcacagtgggaagggtggcctgggcaccaggaggatggagggcctgggtagagtgtggggtgtgtgcttgtgtgtccatggtgaatgtttgaggatctctgtgaaggcataatgtgtgtgtgtatgtatgagagagtttaagtgtgtgtgtatgtccctggcaaatgtagctaggtaactcacagatatgtctgagggtctctgagggcatattgtgtgtgcactgtgtgtgtgtgtgtctgtggtgaatgtatcttcatgcgatatgtctgcagttctctgcgagggagtttttctgcagcgtgcgagtttgtgtgtgtgtggcagggtgtgttgtgggtctgtgtgatgtgtgtgagtctgtggtagctgcatctccatgccatgtgagtctgtggtgcacaaggtgtgtttttgtgtgcatgtgtgtgctctgtgagtgcctgtctaggtggattgcctgctgggtgtggtgtgtgcctgttgttttgtgtacgtcatcttctttgtacagcgtgcatctcgctctgtggcgcgtcggagtggccaaccggaggtgtatggcttgcgtgcgggtctttgtgccctgaaagggtccgggggtggagaggttgcagggaatgcgtgcacctctttgggcggtgtctgtctggcctggggccgagcctgtgctgggtttctgaggagggtccccagggtgggcagcaggcgcgggcggcgccttccggcttggtgcggggctggtaactggagccccttccccccatgaaatattgatccggcctcgtcagcggcgcgggggaggggcggggagggggaggggcgggaaggggaggggaggagatgggagggcaggcgggggagggactgggagcgagtcgccagccgctgtccgtggtactgccgtgtctcccccagcgagggtgtgggagggggagagattgtcccatccaccaacaccctttgttggggcccctgcctctcaggatgagcctgcctttcccttctgctatcccgcatctaggaagggggagcagaggaaccaaatgtgtatcttattgggatccagtatccaccagctagggtgactatacgactgggtttgcctggcacagtcctcattttcatctgcggtccagtgtgattgtgagtattgtccctgctcattctcacaagggtcccaggtggatgataaattatgtgctcaccggtaataaggctttgatccaaagaccttttcccagtcgcctctgctctgccctgggagttccccagccatgtggacatgtaagtgtgtgtgtagttgcatgtgtggaaattgtccttcctgtactaggattgagctggaataagtgcttcagagccccgggctcccgccacagcccaaaccctccccaatgcatccagcccccttttctttcagtccaaattctgctttccattccagctgtgctcctttcaggcctgggcttctcctgtgccttagaaagggagtcagggtgccgccctagcctccctcctgcatcctgagctgggcaggcctcttctcggtctcaatatcagggtgttgtaggccttccagcttggccatctgtatattcatggcatcttctgtgagttcctctcctactcttcaccatggactctccctccttcagttggctccatcttcctcctacctctaactgtgggtactacctctcaatctttcctcactctctgctctcttctgggcattctccttcctttccacaccccattttttctttggagaacacacccaaatcctgcctactcaccttgctctcctgagcgctcgtgaatcagcttacctggccaacacctgaatgtgggagttgcagcattatctcagacccatcgggactaaactgggaattcatcttctccttaagccaggctttttccgctaggacctcaagctctgctgatggcacctctcacccccatccttcctgtaaatcaccttggatttcattttttcccttttccctactttgtcccctcactcactctaggcaatcccctaaccacacccacgactcctggccccgtttcctcttcgcacctcactttctaaagcagtgcagcccttcttcctgcatggatgtagcagcctcctggctgctcttcctgctgtcaggcttctttctgattctgcactcagtctcagattgatctctgtaaagcattacatctaaatcatgtcagatttcactcctacaggatgaaagccaagcttcttagccccacattcagagccctgcactggctgctcccagcctatctttccagccctctgttccgcagttgtacctacctcctctccaactgcgctgctgtgttcgccagcctctgaacacaacgttttctccctgggccttcccagtagttgccgcctccttcctttagagccacctctgcctctcctctccaaaacctcacctatcttttgaggtgcaactactggggtaatgccttttctggtctcccccaccctgaagtgttcactgtttctgcagaacaaccagagcaatgtctcttcacctctcagtgccttgggtggtccatggaccagcatcttgggcatcacttggaagtttcttagaaatgcagagtctcaggctccacctgtgacccatggatcagagcaagctccccaggtgattcacctgcacattgcagtttgataagcactggatggtgtggtcattgaggacggaatcttgcttccgtttggggagtcacctttggccaggagtagtggtattctccagtgccaagtttagcagcccctgtaaggagacaggtgccacatctagccacatcctacaagccaagggagaggcgaatggtggagatggctgagaagaatgtgtaccctggctggccctttcccacccataatctataccctgcaaggccccagagctcaagctctgtaaatctgactccagaaagcactttagtgacacgaggaggaatcaattaatcaataaaaaagcagttatcaagcagatagaagaacttttccctcttcacaaaacacacattggtggaaatgcctgttactttaatgtatgttttgaaaagaaaaatatgtggttttggtttttttctttattataacattaatacagtttcttaagtagtaactttagaaaacacagtatgtcacatggagaaaataaaaatgactcacagtgctataaatactgctaatttaatgttttaagttgccattcattcattctacaaatatttactgagtcctgctatatgccagacctgtgccaggtactaggggttcagggtgaagacgacgacaaggttcctatttttaaccagctcacagccagggggcggggtgtgggagacaagtacggaacaagttaggaacagcagtgtgttcattgcctagggaagctgcaataaagcgccacaaacagggtggcttaaaacaacagaaatgtagactctcacagttctgaaggctacaagtctaaaatcaggtgttggcaggattgcttccttctgtgtgctgtgagggaaaatctgttccgtgcccctcccctggcttctggtgacaggtggcaatccttggcgttccttggcgcattgacgcgtcactcccatttctgcctccgtcggcacatggcgctctccccgtgtctgtcttcacgtggccaccttcctataaggacactggttatattggatgagggacccacccttctccagcatgatctcatcttaacttgtcacatctgcaacgaccgtgtttccaaaccaagtcacattctgagggactggaggttagaacctcaacagtttttggggggacacaactcaacttataacacacagggacagtacaaagggagttatggggattaaccttatctgggaagactgtcctaggaaatgaccttcaaacttggattgagccaagaatagggtttagccaggcaaaggtggcaggacagacaagtttggggccaccagatcatgggggtgggggcagagaaggtatgccaggcagacaggagacaaagtggctaagtggctcttttttttttttttttttttttttttttgacagagtctggctctgtcatccaggctggagtgcagtgttgcaatctcggctcactacaacttctgcctcctaggctcaagccatcctcccacctcagcctcccgagtagctgggactacaggtgtgtgccatcacatcaggctaatttttgtattttttttttttagagatgaggttttaccgtgttgctcaggctggtctcaaaatcctgggctcacgcgattcacctgccttggcctccctaagtgctgggattacaagcatgagccccacgcccggcccaaggtggtacttttgaggactgaaaagaagcaagtgtggctggaatacagagtaggggcaagaggcatgggacgggctgggagataggagaggaagacagtccccagttcacatgggcttgtgggccttggcaagggccttctcctttgtcctgcaggaaatgggaagctaagggaggttgtcaagcaggagagattcattctgctttgtaggctggctcctcccaaaactgactcaggcggtattgttccttcaagtccctgcttctgaggaagaacacacagccctgtcctcaggagcccccagcccagtgaaggcccatggtgaccctgtcctgggaagggggcatggctgctgggtgaccccagcggcccctagtggagccttcaggaaccttgttctgaatgggagacacggctcacccagccctgggtctgccttacccttgtgtgttctgagtccttagagttgtggtttgagtccgaccaccccatcccctgcactgccatgaggactgtgactgagaatgtatctagggcccatgtggtgccctgaggccctgggggaacatcaggggctcagtcttgtaggtcttgcagggaccatgccttcagcaccccactcccctcaaggtatgtctggagtctgtattgccttcctacacagtatccagcctctctggggttctcaacccatcccttaccataccctcagagggctacccgtttcctgtgtctgatgggagagggcccaccctgcccaaagctgcctgtccctgccttgcccaggctgagtgggccaggctgggtggaggagaagtgggtcagcctggtagccatggtgacagcagctgctccctgccagccttctcctctcctcaccacaaacctcaccgatgagctcctttgtccggtctggcgaggatgggggccaggcgagtgagattgggggctgtggtgtgtatgattgtgcatgtgttcaagcttgcacacaccttgtgcacgtgttcaagctcgcacacacctgctcagaggtggggtgtgtgccttagccaagggagcccacggctcagggtaagatgcttcctgcttccctgcccacggagccatggggctcttcctgcctctctggactgggcaggggcccaatggggagggtgtgtgtgggtgtttgcaggtgtgtacacatgtgagtctgtgaacgactatggctgtcgtggctgcttctgtgtgtctctgtgtgtatgagtatcttagtggggggtggtgtgcacatatgattgcgtctttaagtgtgtatcattgacataagtctgtgtgatcacacatttggaattctgtgccccatgtctcttcctgcatgtgtgtgtgcacgtgtgtgtgtgtgtgtgtgtctgtgcatgcacgtgccagcctggcttcggggagacaaaggtctgcacaactaggagaggagccgccgctgtgtgctgcccacgctggctgggtgtgcttccttggcacagactgccttccccaccacaaccacctaccaactcatcacccgcccacctctccctgagtggggacaggagagactagagccgaaggagcccctttcccccttctgtgaatgcaggcactggcctctgacaggggcacagattggcacaggtgatgcgatgggccatcctggtgctggattaggtttgggccaggggtcttagatgccagacccagcatccagcaaggggtcaggagctgagatgctggcacagcttcatgcgccacctctcacctcaactgaaaagtgcagggaccctgatcccagacttctggagcactcagggctgtggtaggaggcgatgctcctagtctctgggccttcccctgcaatggttgcacctggtgtggactccagaccaataagaactaacaactggacaatcctttacgatttataaaggaatcttattagtaataataatgtaattgcccaactgatgatcatttaccacatcccaatccttgttttataatgttttatgtaagaatcctaaagcaggcattatcgtccccactttagagatgaggagcattaggctcaggggatttgttaaggaagccctgtatcatacagcttgtaagtggcagatctaggttttgcacttaagtctgtctgcctgcagagcatgtgtttcattcactctgcctttctgctcctctttgtctcatctgaccccagtccagccgggagagtcagggagggcccaggtggtgattagactcgttttgtagaggagggaatggagggaatggttcagagaagctgaaggacctgctcaggatcacatggctgggggtagagccaggagtgtgtcccccaactgcttggcatgtcacagagtgtctggggagggacacagaccccattaatcagagggaggttggaggaaggaaggatagggtctagagctccttagcagttggtcctggccaagtctctgtacatgtatttaaaaatctcaaagttgtgggtcttcagcagcttgacatccaagtacctaaaggaacattaagggggcccatgagttgtaaaaattttacaagaggaaatggagaattgaagagtttaaatgatttgctcaaggtcacacagcttcttcaaagtctatctttttatgccacaatctactggaagcccttgagggtagatgctttacctagcccttcctctaagctcctctcttcccttccagacccttttatcacatcgcctcctctgggagcctgccctgattgccttcacctcatttcttgaaaattggtgttttggcagaagtcaattgaagccttgtgcaaatgccctaggggtgtgctgttgggaggcagccccctgtgatgcggaacaccaggctcagattcatcagttcggtgagttgggttttcttccaggtgaagggtggggagggagcacccaataggtgatgtgagacctgagagttaggggacttagggttgaagcagtgattttgccaccaattttttatgtcaccctggtgcgtctttcccccattctgggccttgatttcttgttctgcaaaataaaaggctcaggctagaatagagacagcaagtcagttttagctcatgagctgtttctcatcagctggtgctggtgccctgtgttgagagggactctgaggctaagtctgaccttgatgggaaagagagaggttaatgatgtccactgtgagtagaggatggggaggggtggtgggagcctcagttatttgcagtcccttccagcctaacactccatcaccctgtgatgcattccttggtctttactgttggaaaggtgggtggctaggttcatcttgagcttttgtgcggccttgaactaccaaaaattctcatctgggccgggcgcggtagctcacacttgtaatcccagcactttgggaggccgaggtgggcagatcacgaggtcaggagttcgagaccagcctggccaatatggcaaaaccccatctctactaaaaatacaaaaattagctgggcgtggtagtgggcgcctgtagtcccagctacttgggaggctgaggcaggagaattgcttgaacccaggaggcggaggttgcagtgagtcgagatcgcaccactgcactctagcctgggtgacagagcaagactccatctcaaaaaaaaaaaaaaaagttatctggttagacccacggttaaagggactgaggggcccagggtagcctggtagggccctgagacctgctgttgtcaggattcaggagagagtttggagggcccttttagggtactgagaccccagggtagaggccaaacatccaagggctaaaaagaaaacacaaagcttattcctggggagctgggcaggtctcttttggcatggagttttggcaggagtgggggcagtagctgtctccctggaggatagatcaaagtttctgtgctgctgtggcaatagctgggagtcagcaggaagaacttcagagtgaggtctctgtgactcactgggatcataggacggtttccttccctgcggtgccatgacctgggctgagaaagggacagtctgctcagaagcagggaattggtgaagggacttgcgtgggaagggtatagtttatttagcaatcgtttggaatcaccaacatgtgacacggtgtgctctgtgtcctgcctgctcctaaccactctgccacagtctccaccaccttcccttttccatccctgtggtctgatggctcaggggttgctatgcagtggatggccctccttttaggttccctatctgtaactttggcatgtctttcctgagctagacctgctgccggagaagaaactagatctctaattctgagacctctgctacaatgtgcattcagagactcaactctcccagtcaaaaggacttttagagattacttaacctgaccccttcattttacacccagatgagacagccgaggcccagaggagttcacataaggaatctgttcacgttcgaatcccacatcctgattcctaatcctcctaagctgccctacccaggacttctgacccacaaggtcagtcctaggaccttgggtccagtgctttgggtctggctcctcctgccccttggggagtggcctgcaggctgggccctcccaagcatttttcagttctccagcccccctggttgatccctagatggttaaagatgagaaaatagctctggatggtgcagagaccttgatgccaaaccaactgcttgtcaattccatttattattcatgaggaaacatgagcccctgggttggcagggtcaggaattttgtcccttacccccttcccttttcaccccctgggggtggtactctcttgcttcccagaggctgtgctagggaagcactttgcttctccagctatggtccggttgggatttctactgccctaacttagatgctcatgacagctgtgggaacctgggccagaggggcttttctcatatagacactttccttttagttttctcaaagggcccagagacccagggcagagtctgagcttaagggccgggcctccatttttggttgaagggacaggggatgctaagcattctgtctctttgtggaaacaggagacctgggttcaagtccaggccttgcctcttcttagctggctagtatgaacaagtcctttacttctctgagactcagttttcttatctacaatacagagataaccacatgccttccagaaatactgtaaggagtaaattagacctacaccgtggcagagtcacaggatcagataagccttctcccaccttccaccaaaacaccgtgcagatacctcaaaaacacacacactggcactagaattggaaactcgaagagatcatcataggccccagtccagggggactttccattagctgcagggttgatgggggatagagaaatacaatccaggactctgcacacgtcacagggcgaatgagatcggtccaggcagccacagagaaggcaaaatgaggcgttaattcatccactctgtcagctatactttgccaggctggcaggagccatgctgaccaggtgaccattctcagctgtctggggactgtcttcctttatttgccacaatggtgcttttcctctttcacccattctccctcccctttctgtgtccttttgaataggcagactctctcagtgttccaggcccgggggcccagggtcaagtgaagtgccctgaaccctggcatggtcagctgccccaggaaaaccactgtgggctaggacagagccagtagggtgctgggtgcagagcatgctggagaggctggccttgttgggttcttcctgagcagaggatactgacttcagcttgggactttgcagccaaactgtggaggccaacagctggagatcccagctctgttaaaaacagagccatggactcctgcagccccctcccccagagtggttctcagggccctctgtcctcttccctagcacttagtgtaaccatcattaaatctttaactgtagaattagttacttactgtctgtctccgtcttggactggaggctttgggagggcaggaccaagttggcctgactcactgctgtatccttggcattcaacatgggcctgggaattttaggggcttaaatatttgttgaatgcagctaacagggagagtaaatgtctatattttaaaaaggaatttgacaatagattctaagaatccaaaagacatttatgaccctggcatcaggtaggatgcttttggaggtaacagagaactctgattcaaactggcttaagcaatggaaaatgtattgtctcacatcattggaaggccagcgcagggcgggccctaggtatggcctgaggtactttctgtctgagcgctgtctgttcacagtagcactggctttgtcctagggcttagccctctctagggtgtaggaaagagaaggacagagagagaaagagagagagccccccacctttcttgtaagcatgggatccaaatcttcccccccttggacaagtaagagttgctaaggtgaatgccattcacagattgccttaaattaatcaagatctgcctctaaaacaaggggtgggtggtacctggacaaaaccagccctctgtgaggaagcagaaagggggagcggatgctagggaagctcctagcagtatttgtaccccctgatccagtcgttccatttcgaggaatcagtcctaaagaaataagcagacaaaatccatgtagaaagatgcttaggctgggcgtggtggctcacacctgtaatcccagaactttgggaggccgaggtgggtggatcacttgagatcaggagtttgagaccagcctggtcaacagggtgaaaccccgtcactactaaaaatacaaaaaaattagctgagcatggtggcgcacgcctgtaatccaagctgcttgggaggctaaggtaccagattcgcttgaacctgagtggcagaggttccagtgagtcgagatcgtgccactgcactccagcctgagtgacagagcaagactccatctcaaaaaaaaaaaaaaaagagagaaagatgtttattgccatgcttatttaaaagagaggaaagaagccaggcccggtggctcatgtctataatcccagcactttgaaaggctgtggcaggcagattacctggggtcaggagttcgagaccagccttgccaacatggtgaaaccccatctctactaaaaatacaaaacattagccaggcttggtggcgggcgcctgtaatcccagctactcgggaggctgaggcaggagaattgcttggatccgggaggcaaaggttgcagtgagccgagattgtgccactgcctgggtgacagagtgaggctccatctcaaaaaaataaataaataaataaatacaaataaaagagaggaaagagagaaagaggagataaacttgggcctgatctaagcggtaactctactgaaatacttaaatcaattatgctacttctatacaatggaatatcacggtagcatacatagtgttaatgacattgggaaatgcttatgatataatatttttttttttttttgagacagagtctcggtctgtcacccaggctggagtgcaatggtgcgatctcggctcactgctacctccgcctccccagtttaaccgattctcctgcctcagcctcctgagtagttgggattacaggtgcccaccaccacgcccagctaatttttgtatttttagtagagatggggtttcaccatgttggtcaggctggtctcgaactcctgacctcaggtgatccgcccgcctcggcctcccaaagtgctaggattacaggcatgagccactgtgcccgaccatgatataatgttaaatgaaaaaatagtaggatataaaatgatatttgcagtatgagttcagttattttaaaaactgcatggaagggtggctggaagggaataggctaaaatgcctctcaagagtacgataaagggtgattttcttgctgctttggacttttctgcagtatccccttcacatagaaggaccccaccagagtctgcacaggctggagccagttctgttctccctgttattatttgctatgaaaataataaccaccaatacttactgaatatttcccctaagcctgacaggcacttcctgtgcattatttaatgtaatccttagaacaatcctatgagctaagtgcttttatttcacatcttgctgagatgttcactgaaacctcaggatgtttgtttggtcacaagtccacgcagctagtgtgtagaggcctttggaattcaagcccgggccatgtgactccacagcctcggtcctctccatcaaaccggtcacctgcaaggtttttcatagccatgtgctaataggaatagtctcttttattgagccagaacctgtgcatgctcttgacatttgtttgtgcatttaaccttatagcctcagagaggtcaagtgactagcccaaggtcacgcagctaggaagtggtgggactgcagtagattcatccaggtctgatgtgggatccttttgtttcctgcccatcttcagagctgcctgaggccctgccaccccggggaccatgtttaacggggagccaggtcctgcctcatctggggcctccaggaatgtggtgcggagctccagcattagcggtgaaatctgcggatcccagcaagccgggggcggggctgggaccaccaccgccaagaagcggcggagcagcctgggtgccaagatggtggccatcgtgggcctgactcagtggagcaagagcacactccagcttccgcagcctggtgagggggcatgggacatcacggggtagaggtgggggacacttcgcaaagacagactacccagggactgccctgatgggtctgcacttccatgcccacagacacttatactgtggcccttcccatacaccaggtgctgttctaggtccagtaggtgtatggactgattaaatctccatggagctctatgaggcaggtaccaaagaacagaaaagggaggtcagatgcttcaaactgcacaactagtaggtggtggagcctggattcaaactctagcagttgggcttcctagctgatgctcttaacctttacactccactgtctccacacacagacattaaccagtaattacttattaaacagccttatgatcctggcactgtgtaagtgacaccacagttttacagacatacacatccataagatttagtctcaagtgctgggtgcagggttcacacctataatcccagcactttgggagggagaagcgggagggtcacttgagcccaggagtttgagaccagcctaggcaacatagtgagaccccctggtttaaaaaacaaaaaagattcagtctcgcctgtaatctcctagtctcctaaatacaaatagccacacaaatgcagttctgtagtcccatgtatatgttacaaagcacaagggagacacacacaaagatgtgtgacttgtgcagttacataaatagaacgctcagtgtctctggtaagctgcccgtatttccagggaagcataatagagtaattcacactgcgcatggtcacagataaaaccagtcatgcaaaccacacagacacagccctctgattacacatgcacagacccagatcacagaaacatgtcacatgtgtgcaggtgtacatcacaaagccacattcacacacaccttaacagctccatcctcatcaatacagtatcctttttcagacacctagctgcagaatctcagttatgttcagcctggtgggtgaccaccttgtgacatacatagaccccacatcacagaggagccagccctccccaccaagacctcctcactttgtggtatcagcccagacaccagctggttttgttttaaaatctcttccggcttattttgttcagagtaacaacttccccagaaaccttcaaataggcagctggatgggatggtgagggggcgggggctccggaggatccagggagaatgctcatcaaggctcccagttggggctgggggtgggggacttttccaggccttaaaatagatttatacaaagccgtcgacagtagcacgtgggctggtcttttccagcaatcaagctgtgatgtggtttctcgctggggaaagctattataggtggggaaggggcttgaggttatcagagccctagagtgggcatggcctctgtgaatatgcagtttaggcctggtactagagagtcagggagatggggacttagggatctagaaattgggctgggacaaggaaggggctgagataggactaaggagtgagattaagattagaaggtcgtggaggtgttggaccccgggagtctggctccaggggaccaagcccagaaatccagctgattcagcttcagacccaaaggcttcttcatgcccaaagtgatttggggggacagtcttccaaggccaggatggggacctgagtcactgggagaaccttctagtggtctgccttgactttacaggctgcaggcagggattggagcagataccaggaagacctttcatcttgagaagagatgaatgatgatggggcttctgaatcccttgtctccttggtatgcaagggcatggctaaaggactggagctaggggaactgcccagatgcccttctaactgaaggtctctgtgaatcagctaattgctgaatgtgagtgaggagagtcccttgagatcatctagtacgctgtacttattttattgatgaggcatccagagcctggggagaaagcatgttcctggagaacgacctcaagttcagatccatcccctgtcatttactagccgggtgactaaggcaagttacttcacctctctgagcctgctgccttgtttgtagaatgagggcaatgatacatgccttgcagagttatccagggaattaagtgagatagggtatgcaaaggcacccagcttcatgcctggcacatagtataggcactcagtgaagtgttgatgctgttattattacctgccattgtaccataaagccaaaagagaagtgagttctcagcctccacacctctgctccttccctgtagcacgttcctctccatctagaattccttctccattttttgcccccatgccttgaggatgccagtatcccagctcggacccacctcatgggtgggagcatctggtgccagaggaatatatgaggcagactcatgggcattggctctggaaactgttctgggaaagacctagaagggtgcccccactcctgacagatgagatggctccattccctgcagggctgggctgtgtgaagtggggaggaattcctctcctggactctgtcttctgggctcaggtctgcccttcccagggcctccttcctcctggtgtgtccgtactgtgcaatggctagacctctgcccatccttctttgtttcaaagcccctgccctagtacaggacccataatatctagcctggacgattgcaccaccctcctctctagctctcctgcctcctgcctgccttcttccagtttattcctcttgttgccctagagtggacttacaaaaactcactttagagggctagtcctggctctgtaactcaccatgggacctcgggaaatttacttttccgctgggcctcagtttcctcttctgtaaaatggagctaaaatgctctctcccagtttccttctggatctgacattcactaagtcgtgggagcagtgaggagggtggggtcagagctttgggtccaggacacaggtgggttctggtctggcaattggctgggtctacacaggaccatcctgggctgtcccagcccctgcccaaacggagctagtattttcagtaccagggacagtggctttccccttctggactctgggatctgggtcagggtagagagagggctcaggaccattccagaagatgccatagggagtggtggtacaggctgtgagtgcccctcctttgtttgtgatgggacagatgggatggttcctggagtcttttggtctctggagcccatagaattattgcaagcaactgagagagagattatataaagttattccttaaatcagcaggggttgagactattcatgtatgaagccagtggagggatcgtatggacatgtatgaagccagtggagggatcgtctctgagattgcaagagctttctcctccctctgaggtcatggaacttaatctctgctgaatcacctctcagctagatgggggattgggaggggagtgaaaagagcatgacagcagactgggagtctgtgggcctgatctagtcccagctctctcggcacctgaacctcaggcttcccatctgtgaaatttgggggaggggtagccaaagtatctctaagatttcaggattctgtgactccccgactcagggtctcacattgggttggacaagtcttatcaaaaaggcaaatttgctcccaaatgggtcaaagtttccctaaactctgaaagaggagggttggggtcatgaggaggtgaccccaactcaggctgtgtgttgtggggtagagatatgaaggcgagggagcccccacagacccatctgttttctaattgtgttagagaggatgtagagttaggagccacggacagggagaggccccacacaccagcatttttacccaggcctctgtgtgtgaggtgagtcagacaccatttgtgggttttcatcaacatatgtgattgaatgggagggttcaactccaagtgttacatgtgaagatcatgtgtctgtgacttgactgaaggtggcagagtccatcatgtgtacatgtgaccaagacctggtaggaccatttgtgactgtgtgactgtgatataaacctgcatgtagccttgtgtatgagattactgtattcatatatgtgattgctgctgctcgtgcatgtctgcctatgcctctctttgtgaaaaaaatatgtatgagctaatgtgactctgtgtgtgtgtgtatgagagagacagactgacatgttgatggtgtcatggattcctgaatatgctattccagtatcccagaagctgggatgatttcagagaaggcattcctcctcaccctgcaccctgttctcagcctgtcccgccacccacccttccatccactagtgatcctagacctctctgcctgccctcctccagtggggactttctgaaagataagcagacgaagcaggaggaataaagtcttccttttcccaggctggggtcttgaacatcccctccccagcccaccattgggtgtggtgggagagaattgccaaggtaaccagctccctgctccccactgttttcaggggctgtgctgcctgtcctgccctggcctctccccctccctgtaggcaactccactgttaattcgcttggcctctaaccagtgacagcaaatggttcctttggtgcagttcccatctgagggccagttccctccccatcaagttcctccagctgccaagcttcagcgggggaagtccctgcaaaccctcaggccatctcccccatccgccccccgccaggaggagagggtgtctagagggaccacactgcaatgccgaggaggttgccatggaaacccaggcaggatggtgtgctgctgggagagggaaagtgtcccatgttccctgcaaggctgagggggaggccaggatatgggggtcgagggcctctgaacaggaggcacggagacacgggtaagttctcacaggccagcttcggggttcttctgcagaccttttctcaaagccaaagacaatttgggtcaacccagcagtccctctctgtcttgttttcctaatggcctctccagctctccacacacgtcctctccatgttcagccccacctagagaaggtgggtttgtttgagagtggccaggcttcccatgggggctttcctatagagcctccagaggtatcagaggtgagttgtgaggtctgggtgtgatagggtctgagggtgcctgaaagagggaaagtcagtctgagaatcccagagaagatgaactttccagaagagagtgggaagaggcacacttaacctttggggcaagggctgaaatcgagtgggaaggtgggcgtcaggggagcctgatgagggtgaggcgagggccccagctgcggatctgcggctctgcgtggtggcgccatcatgactctgcctgcagccatctttctagtctgctctgtcagtgtcactgcccggagcagggccaggtgtcaggctgcagaccagctctgaggtcagctcagccatgcccctgcctccagtcagagccctgctcatcctccccatcaaccccccatgccaagagagtgactttggcaggactcttagagaagccccattcataatctgaccttgttccctctctgtgcttggggttgggggggtcacagaaggggccaccaagaagctgcgcagcaacatccgccggagcacggagacaggcatcgcggtggagatgcggagccgggtcacacgccagggcagccgggagtccaccgatgggagcaccaacagcaacagctccgacggcacgtgcgtgcagccccgtgctgtggtcccctccctcctcctcggtcctccagtcacagagccactgggcagggtgggaaagcctccctgttttgtttccagctaaaatgtctgggtcctctgtgtctctgccttccttcatacccctcccctcaacactctgtgcctggacctcaggtcttccattgctcccattggaatatccagatacccaggagctatcagttccttctgtatgtttcaggaagggacccttacctcccacctcccacctcccaccacgcacacactgccctgctccagaggaaagggtggaaaggaaaatgtggccctaaaatccttttaaatctaaaaccattgttgtggcccagatgagtggaattttctcaaggaggcttgcttagagctgagggaaggagattggactagatcagtgtttttcaaaccatggatggtgactcatagacaggaaataaaataggtttagtgggtcaaaaccagcattagaaaaagaaatagacatatcttatgaagtaagaataaattgcctcgtgaacttttgtttccattttttatgtatagatgcacacaggtctgtcctgggtcatgatgttaaatctcctttcttacatgtaggttgcattaaaaaatctgaaagtcactggtttagatattcccacagatctcttctaagtctatgaaattatagttgtatgactaagattttctgcttctgcttcaaggcctagtgacttccaggcttaggattctgtggctccctcgtttgagattcagtgattgtgtgtctcactgctgcacctacttccatgaatgcgagtgctctcaagcatttattacatcttcccaggtgcagagcatgcctgggcatctcagataggtgattcttacactggaatctgctggctgtgatcagaccaggaacagtgatcgttgttttttttgttttttttttttttgtgatggagttttgctcttgttgcccacgctggagtgcagtggtgcaatctcagctcaccacaacctccacctcccaggttcaagcgattctcctgcctcagcctcctgactagttgtgattacaggcgtgcaccaccacgcctggctaattttggatttttagtagagatggggtttctccatgttggtcaggctggtctcgaactcccaacctcaggtgattcgcccacctcagcttcccaaagtgctgggattacagccactgcacccggcctaacagggatcatttaacacttacagcaaccctgagggttgtgggtattaccattatctccattttacaagtggagaaacagggagaggaagagggtgggccaccttacccaaggtcacagctattaagtggtgatggagtcagaattggaattaaggccatttgattccatgacctttgttcacaatctccacactatatccagctcctaaaattctgtgaccttgagagtctaagtttctttatttaaccttctcagatatcattgtcctaagaatgtgatattaggctgttgttgaccatggccaataaaagtggggccttgaagcccctccctgtggggtggaggctgggcctagtcagggagagacacaggctctctctgacaagcatacacagcctactttttcctccctgctggccgctagccaagggggactcaaggccaaactatctagtaggagattcttccttggacagccttttatctctgcagccaggagcctgggcctttctaggagatcttagaactttattctatcatagcccctgagggttggcagggccaaccctccctcatctgtcctttctcagctggccacacccagaatatctagactggagcacaaaagagaagtagcacttttcccttgatgataacaacagcagcaaccggaactatcatttagtgctttctgtttgtctggaacttttcatttgccctaatcctcaacatataaaaccctatgaattttgttttgcaggcaaggcaattttaccttttggagcctctgttttctcatctgtaagactggataatagctcctaccacacagagtggttgtaaggattaaaagatataacccatgtggaatttttaatgtaccattggcacctggccagttgtcaatcactgtcagcttttcttgttactgtttctagacccccacacagtcatggaacaaccaccaaccaccatcacttgccattcacctcaaccctgtaattgtgttattttggtcttagctgctgttctgggcaccacctcatgtttgacttggatttcaaacttgcagtcaactcaaacctcagttcttgtaacttgttccaggcattgaaatttctgacctatgtctctggttcttagcactgatatgccctggtgaggacacaggtgtccagcaagccctgccttgtaagggtcacttcagaagtccctggacattaaggattaaatagcatcattatgtattgttattagtttattttctcaagtgacatcaaagtatttttcttcagtatgcagaaataaacagttctgtttgtcctttcccagagtagtgcaatcatactgtttagaggagaaactgaggcacagagggacgtgcccagggccccagggccagagcatggcagcctgccagctatactttcatcctcaggttgccctgaccccctcacgcgtccctctgcctcctcctgcaggttcatcttccccactacccggctaggggctgaaagccagttcagcgatttcctggatgggctgggaccagctcagattgtggggcgacagacactggcaacaccacccatgggtgagtcttattaagggcaggttgagtggggtaatggtgaccatgcgacaggaagggtgagctcagtgggggccctgcattggccatcgtagagtttattctatcaccaattctgtgatcttaagcaagtcacttcccttctttgaacctcagtctcctcatatttaaaatgggaataataatacccacttgagttctatgctctaacaatactttactgagctcctattagatgctttgcatgaggtatttcaatttaatgtgtaggaactgtggcttatttgacttgttacacccaacagcgcctggcacctagaggccctttagtaattttcttatcgcttttccttgcagctaggaagtatagttggccctctgtatccatgggttctgtgtttgtggattcaaccaaccttggatagaaaatattcagggaaaaaaaattccacagagttgcaaaaagcaaaatttgatttgctgtgtgccgagtactaccctgaatccatgcaaaggaagtgatatgtaggcattgtgttaggtattataagtacagtcattttcagtgtgtgaacatcatagagtgtacttacacaaacctagatggcatatatatatatatatatatatatatatatatatatatatatataaatttatatgtattttttcatatggaaaaccgtatatcctagcaccattactgaatatcaatcatgtcccctatttgatctgcaatgccaatatcaagtaccatatatcaggtttctatatattctccattataatcttacgggcccactgtcatgtatatgatgcattgttgactgaaatgtcattatgcggcacaccagtataatctagagatgattgaaagtatatggaagaagctggttgcagtggcctgtgcctgtagtcccagctgctcaggaggctgaggctggaggattgcttgagcccaggagtttgaggccagcctaggcaatatagtgagaccctgtctcaaaaactgaataaaataaagcatatgggaggatgtgcatagattatatgcaaacactatgctatttttattattttattttattttatcttcgagatggagtctcactctgttgcccaggctggagtgcactggcgcaatcttggctcaccataacctacctttacctcccaggttcaagtgattctcctgcctcagcctcctgagtagctgagattacaggcatgtgccaccatgtctggctaattttttgtatttgtagtagagacggggtttcactgtattggccaggctagtctggaactcctgacctcatccacctcagcctcccaaagtaccgggattacaggcataagccactgtacctggctgccatttatttatttatttagagacagagcctcgctctgtcaccaggctggagtgcaatggcacaatctcagctcactgcaacctccacctcccaggtccaagcaattctcatgcctcagcctcccgagtagctgggactacaggcgcacaccgccacacatggctaattttttttctttgtattttagtagagacggggtttcaccatgttgcccaggctggtcttgaactcctgaactcaggcaatccgcctgccttggcctcctggctgccattttatattagagactggagcatccaaggattttggtatccctgggtgggggcgaggtagggttctggaaccaatcccccatggatactgagggatgacggtactacctgaagcctacgcttggtcctgttagcttcagtctggcccatttcatgagctctcagacagaacctccctgccccctccctctcttaggtgttggctgtgttggcttccagcagctcctccccaggatagctcctccagaggtgcctcctcgcctccactcctttcccatcagtctgacctgagcagcacctgacccacacgtccccactcagcccccatcaggacagtgctcaacctttgaccctcccagcaaatgaggaagccaagtgcagtgtcctgctgtgagtcatgcagtggagctggggttccactccaggccaggactccttccactgcaatgccctcaaaagctcctgcccaggagctcctgcctgctggaacaggagatgatggggaccctcagagggcaaggatcagctgaaagcaaaggctgggaattagccaaatccaattctagggctggacccttgttttcagtctcttaagggtctggggagcctgcttttcccagccctagacccagccacaggctgggcagcagtgagaggagccagccacttccacaaggctaatgcgccatggcagccgggaccattcgtgtgtggtaccccctggtgtcagaccagggaaggacaggtttgccttgctcacctcggtagtgatgttactggagattaattcctaagaccttcccttctcccttccccacaaggaggtcaggaatagctggatggaggtggatgaattccaggaggtctcttgaaattagcaaatccccatcttccgtagtacacaaatacaaacaatttcatgatggctcagataatctaaaaatgggtgactgaattcaaagtctggcccatttgattcttgtggaccaggcttatgattctgcacccctgtaaaagacttcactttgttctgagtgactgactactacataattccaaattctgccaaccaatgttgaacaaaactaagagttcctagaaatcaggtaactgacataactccacacacagaccttgccccggctggataatccattctgtgggagtacagtgaagatttctcagccgtccacacccagaaagtctgctggccttccctccctccactggtaatgcagtagtaggcccttgttgtctggtagtgcctcgtgtcctgggcaggtttttagctcagagccttttcaaacagatgttctttcttttcttctttctttcttttttttttttttttttgagacggagtcttcctcgtcacccaggccggagtgctgtggtgcaatcttggcccactacaacctccacttcctgggttcaagtgattctcctcagcctcccaagtagctgggactacaggtgcacaccaccatgcctggctaattttttgtatttttagtagagatggggtttcaccatgttagccagaatggtcttgatctcctgacctcatgatctgcccgcctctgcctcccaaagtgttgggattacaggtgtgagccactgcgcccggcctcaaacggatgttcttttgacacagatgtatggggaggtgaagaacagccactgagcccacagcctcccctgtcttcctgacacaggaagctctgtcctcaagtttgctattctgctcagtaaaacagaagcctctcagttagccagacacaaatgggggtttggcagccatctgttgttacccagtcatgcccctgaagatcatgcccctaccccaacccaccccaagggacctatcaaagggtccctcagctgctttaaagtggtcttccgagagcagttttggcccatgtggttggtgccatcttgttccctttctagtgatgatgtagcctcctccacaggctggcattcagtacagcagctggctggcctgccccttggtctggccctgcctggactcaccctcttcttcctttcaggagatgtgcacattgccatcatggaccggagtggccagctggaggtggaagtgattgaagctcggggcctgacccccaaaccaggctccaaatccctcccaggtgagggattttggaaatggggtcctgacagggaggggcatagagccgagctctgggtctagcaggtcctcagctcccactggcctaaatcgggattctttacagtggagtcacagcttgcctggaaggccagtgactaggtgggggagtaagggaggatggaggaatcagtacttgagtcacctcttctgcctgctgtccactggctggctcattccacacatcctgctcacctccaagatcacctggcagttaggggatgggcaggccaaagctgtctgtcctggacccctccctgtcatacattctctcctcccttagccacctatatcaaggtttacctgctggagaatggggcctgcttggccaagaagaagacaaagatgaccaagaagacctgtgatcccctgtaccagcaggctctgctctttgacgagggaccccagggcaaggtgctgcaggtgggtgtcacagggcaagtagggcagggtggactcacagactggaagttgtaatttaaagtttttcatttatgattcatcctgtgccaggtgctgtggtaggtgcattaatttgcgttactcatttactttcacaaccctgtgaggtattactgtccccagttgattcataaggaaaccaaggttttgggggtaatcaaattgctccccaggttgcacagctggtaggtagaaccaggacacatgtgaccactgcctcctccttcccctagtgctaatgttcattgcacatcagttcagtgccaagccttgtgttaggtgctttccaaacacgacctcatttcatcctgcagatgatcctgtggagtaggtgtgattctcttcactttacggaaaccgagtctcttacagatgaagtcacttgcttggggtgagcccaggccaggtgactgtcatcccaattacttgagagcaacaaaggccttctgcacacttggtattgttagcccttctcaacagtcctgggagggagggatcttcatgctcgtttcatagatgaagaacctgaggtcacgtggggataaagcacagtggtggatcagtctctgggctcagtcctaggttcagattccagctcagcactcattagccgcgggtagatgtgactattaaacagaggattgcatgtagggagccttacatagggcctgccacataaacagctactcactaagtattaacaatcatggtggtggctgctgatcttgcctgaggccatggaggtgagagagaagaggctagagccaggggctgtctgggccatccaacttctcatctagggctgctcctctgggctgagatggttctgtggcaaggggccttggagttgcaaatttaaactgcagagccagacatggtggctcacaaccataatcccagagactcgggagactgaggcaggaggatcacttgagtccaagagtttgagaccagcctggcaacatagcaagatcccatctctaaaacatgaaaaaaaaaaaattatctggtcatggtggcacgtgccagtaatcccagctactcgaggtgctgaggcaggaggattgtttgagcccaggaggtcaaggctgcagtgagctatgattatgccactgcactccagcctgggtgacagaataagatcctgtctcttaaaaattaaaaataaaaaaagaactgcggaaccctaggctttggggagtgggaagaataatctttggtgtttgcttagaaaaggaataacggccgggcacagtggcttacgcctgtaatcccagcactttgggaggccgaggcgggtagatcacgaggtcaggagatcaagaccatcctggctaacatggtgaaaccccgtctctactaaaaatacaaaaaattagccgggtgtggtggcgggcacctgtagtcccagctactcgggaggctgaggcaggagaatggcatgaacccaggaggtagagcttgcagtgagctgagattgcgccactgcactccagcctgggcaacagagtgagactccatctcaaaaaatctcccagtggtgtggctggaaacactgaggtccagtgagggcatggagcttacacaagtcccacggcaagccagcagcacagctagagctatggccaagtcctgaactctcagtttgccccttcctggggaaggctgttatctgaaatgctgggaggctctggagtcacacacccaggtcctaatccaagctctgccacaagttactgtgcaactttaggttagctaattaacctttctgagctacagtttccttcatggaaataatgatacagagcacccctacctacatggcttgttataacaattgaaagaaagaatctaggtaaaatccataggatcgtatctaacacacctcaagtgctcagtaaattattgtgtgaaatcagtcttgagttctggctccctctgctccatctgtgccctgctgaaacgtgtaggttcctaggcctgctgcacagtcctggagtcagggaggtggctcactccctccctctcttcctcctggcaggtgatcgtctggggagactatggccgcatggaccacaagtgcttcatgggcatggcccagatcatgctggacgagctggacctcagcgccgcggtcaccggctggtacaaactcttccccacctcctcagtggcagactccacactcggatccctcaccaggcgcctgtcccagtcttccctggagagtgccaccagcccctcatgctcttaaggatgtcaggaagaggccaggatggtggtgtggggaggggtgcctgctggccccatgtcctcccctgtacatagtcttcgtgtctttctggaccccttgtcctgctgcatgcctgttggctactgggctcatcccagctggcagtggagactgtagtgtgtgcgtgtgtgcgtgcgtgtgtgtgtgtgtgtacgtgaccacgttctatctgttcatttgtctgggtatagtcactcctggtgatgatatgggctgaaatgtctccacgtctctttgtgtcttgttgaaaagaaacccaaaggagtgttgtgtggacatgactcaccctgaggagtctccagggatggaggtggggcatgcggccactggtcggtgctgcctggtcctggcctggggcagagcctgtgtgttcttcacctgtgcctgctcctggtggtctctgctttgttttctgtcttgtcttttgttccactcttgactctcccggctctgccactgttttctgagaaatgtagcatccgctgcagctggccacactgagggccctctgggaaccccaccccactggagccgctccggcagctcttcctgccactgaatgcgttctgcagcatgtagcatgcccacctagctccctggccagggccctggggaggcagagggtacccaggggactgagggcttagaaatgactttctctatgaggctggaacctcctccttcttccagtgaagcacgaggtcttggttccagggttcctggccaggtgcccccttagcatttgttcttcatctcctgtctcttcaagcctccccactccaccgtgccgaaggagctctgccagtgggcctgggcaggcagccacagagggcatgttatctgctaaagcaaacagtcctcctgaggccctgagggtggccctgaccccctcagggctcattcctggtgggcatgactcggtaaggaggttctgtgggtagggctgtttgctggaataaggagggctgaggctgagttgttccccgccactgttgaggatcccatctgacatttggggattcactgcatgaagttgttcatttggggctccagtttttgtgcatttccagaccagggtccctgtctgggagctcagacttagctgggctccagcagcctggctccggactctcgtctgccaccatcaccagctctgtctaagcaatacttacccctccgggcttccctgctttcctgtgccccactgctgccctctgcagagccatctgctccaggcacccacctgcctctgcttgctttctcacccatgtctggttggagcttctcacagccactcaaaccctgacttgatttgacaactgggccctgttggtggagaccagtgcctgaactggaccctgtgaaatctgtcccgtgggaatcctgaagtctgactcaggaatgcccagacctgtccctgtccctcctcagctctagggtgaaaggcgagaggttgcacaggacatggacagagcagcccttgggtttgtatctggtaggggagaaagcagcaggacagtggaggtgtgtggaaggcactctttccacctctctccaggcattatccccaggtgctgaaatggctgtggccccagcacctgaggcaggggtacgctacctggggtagcagtagaaaggtcttggggtctgaatgacttggggcctccattcataaccaaagttgtaggggcatggaggcagtggcgccttatggataggtcatctcagcccaaagggcctccttggctggcatggttctgtgttacgttgaagccagagtcttataacacctcccaagaaagataggggaagaagccagaaccccacctggcctgcccacaggacaagaagtgggtaagggcaggaaggaaatgaacggagttagctcccaggctcctatctctgcctgagcctctattcttatattatcagagaaagggaccattgggtgcatagagatggggaggaggccactgggctgaattttctctttaggcggaaatgctctccccaggcccattgcgttcgtcaagttcttggaaatggacaaagggctctgtcctcctcgaccctagtgggggatcaagaaggaaactccgttgcaaaagggtattttaatctcctgtttatgatatattcacctctagagcagtcactgtcagggtgttgcgaaaatactctacacctttgggatgatagggttgttagtgacccacaggacagtatagatgtttgtggatgtagcactgagtggtgatacccagaccagcagtcaccccaggaagtgggggctacccataccctcattcctctggtggggagctgcctgcagagaggcctgccactgggggttccaggccgtggtgacccttgcctctggggaagggttagcacaggggaggttctagctggaggaggggtctgatgtgctggtaacttgggctgacctacctacagtccctggctgccaaaactgctcagcagttgggccactccactattccacctctctaaaagaaggtaatttcctccccaaattgaccttggggaattattcttttaaccctttgcaccaaataagttactcatccccacctggattttaccccatgagggtaaagttgtgtgaggctgacacgtctgtgtgatgcagtgtggctgcacttaagggtctgtttctcagcatcatggatgcaggggcttgtctgaaaagccactctggacctagcctgtcccagaagaggagaatgcacaagtgtaactcctggttgtttgctggggtgggggagcatctgctgtttgaggacggggggtggggaaggaaggaacatgatccctccagaagtctcccaccctggggccaactcactgccatgttcagtgtcccggctccaaatgcccccttgcccagatgaaaccctgcagtggttacaggaatggagctctttgtcattccacctcctctggtcaggcgaggttcactgtgcatatggcagagacaggagtggccctgcagtgatgttgggttgtgggcagggacagtgatggatgactcagagcgtctgtctttgtatttctgctctgttcattctgtcccactttcttcatagactccttttccctgcaatgggtttttggtatgaaaaaggctccagtaaatggagccaagtcttggtttgacaaggggaacttgatccttcagggaagaatcatctccaaaatgactccccatctggtttcttctaccacccaattctactaggaaaggagcacttaggaggctcttgggatgcagcaagtcccaggcaatgccagcatttcatgggggctgaggcagaacccaggagctccaagaaaggccacccatagagctcatcctctgtggaatcactgccggttagaacactgaggtcaagccagtcctcccatggtcatgccacccaccagggaagcatgcctgatctcttctttactgccagccttgaggagagcagaagcctccatttttaaagacaataaagacctccaagggtacttctttggaaatgaaatgtagcacaatcttagcctacgttaccaggagccctgacatgcaaccagggtccctcttccatgccctgctgcccaggagttgctgagctcctcttcccctggggttccagccctcctaatacctcatattccccatcttcctcagcccagaaagcaatggggctttagtgatgctcctcttttgtgtctctctggttgcctctagcactgtgcaaactctgcaagaaattgctgcctttgcttgatgttgtagatgagttgccctccacctggctggagagatggcacatcattcagggccagaaggttgtccagcagtgtttctgcagtggctgcagggagatggaaaagaagagccctgcttccctgcctcctcctacctttctcttccactcctcagagttttcttctccagtatcctgacatgtaaagagattctttaaaatgctgcttcttctactggactgtctttcactgagtagtcagggaggagatgaaaatgtggacacatccccccgccttctccctcaaccttttcactcacgtcagaagaggttggggcaaaacaaaacaagcatgattgaagagcaggggaagcccacacaatcaggtgagccctgatgggggctggactggcctggtctggctgggaaaggattcttttaaaagcgtgcctgagcatctcagagcaatgtcagtgatgccaaagagagcaacttggcctccttgggcaccaactctgatggctgagttgcacaaacgtggctcagatgttggcatgcccgatggtgggaccttgttctctgataaagggcttaatctttccatgtagcaaagcaactttccctccctcccctccccccgaaccctgagcttgggcttgtgtgggcccagcatggctgtgcctgtgagggaagccacatcagtgagagaaagttgcattctctcaggggcctagattggcttggggcaggtgcttgttgaaaagcatgagtgtttctgctttgggaaacccttccagggctctggttggaaacttggccagtaaggacagggccttgggcctcccaaggagttcacaatgatgccaggaagggtccctgagcctgggttccagtcagcttggctaacagaatggggcttgggaattccaggggcaactgagcatccaccccattagccagtgatctggacagggacagctggctacagggaatcaaaggctgttctgtacagttttaccagaaactgtgaccttgggtaaggctcctcacttttctgggcctcaacttcctcatctgcaaaatcagagcattagctgctctccccatgattccctcccagttttaattaaaagtctctgatctggagcacatgagggttgcgagcctggtgcacctggttcctgtctccgtgggctggtttccttcagcccctgatgcccaggctgggtgcaggctctcatctggtccatgcccagatgctgcctcagacaagaactctgggaatcctaacagactctgctttcctctcttcgtggtttgtcctccctcttttattcttgtgtaatgatgagacataattaagggtcatctacaatggacaattttcaaggtgctgatgtgatgtcacaacctccgctacatcctgagtaagtcagtgtccccaacagcagatgaggctgggtctttcctcatttctgcttctgggatgacatcagtgggagagttgaagatctgagaattctaaaggaaatgttctctgatgggaggagagagggaacttatttcccttcaaagtagtttgcttcttaagaccactcctccctccagaatgtctttaaccagacatcatttcagaaggtggggcagctgcttccttaggaagagtgggcctgatagctcaaccaactcctttagcatgtaaactcacagaaggcaagaacccctttttttagactttccaaatgcatcctgcaaagagagagatagctgatagggactgacaagcacactgtttagataagaagcaattagccttttatatctgtgctctatacattttctatgtgcagcatctttcctaacttgttgtggttcccgggtggcaggtgcacagctgggagggactgccggctgtttcgtacaacattcttgccaattcccttgaggagaaaattcttcacatggcttctgcatgtacagtatttgggcagcaaaacatgattaaagtcagtttgaaaatggtttcatgtgttgctttctgtagatggttcttcattctagaaggaagaaaacagggttccaggtggctacaaagaggaggaggatgccttggttgagaggcaggggagagcagtacatttcagaaaaagagcatgaaagatatggcctgggcctctgactcctgtttgagaactctatggtcacagcagtgttcttgagccatgaaatctgactggtccaggcagcttcctggctctgtctccccggtcctctgcttccaggccctcaaagccttctacttccatagactccacaagggatatccaacgacagaggaaggtaagatggagctaaggccgcagctgtcgacccactgttcctttctttctgagcttttgggtccagcagctctgctcaggcatttggctttgcttattgcagccacacctgataccagcagtaaacatagcggttgacttctatgtgctgcaccctccatcagtcactgatgcctggagcacccattcctttccctgtctcctggtggagcagaacagtttgttaatatttagtcatttctgggcagatccattgtcctcctagggttgggtttggggggtacagaagatggataaaagaagtgtggcatcatcatggcatgtgcttgctggcacaaggctggcaccctcctcccaagagccctccaggttacctccactgcattgtctctggcccttggccttgcagttcccatgagcaccatctcttgaaggaaggatcataagatcaatatgtgagctctgggcccccccaggattctgtcttttccctctttcccactgctgctctctccctgagacatggcttatactctcatgagtttaagaacttctatgcttctatccagcaattccttccaataacaactgcaccctcccccacccaccccctaaaaaacaaaaagcagacaacaaaaactgagatccaaagaaattctaaaggatgttcttcagatagaacaaacatatctaagaacaatgcctggaacacaatcaatcctacatgtttgttattaagggaaatgatcctggatggagaggctgaaatacaagaaggaaaactgagcaaagtaataggttttaaaatattagtaaaatataggccaggtactgtggcttacgtatgtaatcccagcactttgggaggctgaggcaagaagatcacttgaggccagtagttcaaaactggcaagggcaacatagtgagaactcatctctaccaaaaatttaaaaattggccagacatggtggcacatgccagtagtcttagctacttgggaggctgaggcaggaggattgcttgagcccaggagttcaagggttcagtgagctatgattgtgccagtgcactccagcctgagtgacagagcaagtcgtttattgtctctttaaaaaatttagtaaagcatcctgcctcacaatgactttcctattgtctttcatgtgtcattccaacttttctagtccataccacggtgccttgcaaaaacacatgaataaagcaataacatctgattgattgttaagctatcaaaaaaccccagtatcaattattaggactaataagagcattcagcaaggttgctggctatgagataaccctacaaaaatcaattgcatttttctataacagccaaaaccaatgaaaaataagtatgagttattatccacaataacaataaaagtcattaaacatctagggactatttaagaatatgtgatgcctctatggagataactttcaaattctaataaaagagttagataatctcggccaggcatggtggctcacgcctgtaatcccggcactttgggaggctgaggcgggcggatcacgaggtcaagagatcaagaccatcctggctaacatggtgaaaccccatctctactaaaaaaacaaaaaattagctgggtgtggtagcgggcgcctgtagccccagctactcgggagcctgaggcaggagaatggcataaaaccaggaggcggagtttgcagtgagctgagatcatgccactgcactccatcctgggtgacagtgtgagactccgtctaaaaaaataaaaataaaaagacaataacaggtggtggtgagaatatggagaaattggaaacttttggaaatgtagaatgatgtagccactatggaaaccagtttgacagtcctcaaaaggttaaacgtacagttgccataagacctagcaattcttctcctaagtatatacagaagataattgaaaacatatgtccacacaaaagcttgtacatgaatgttcctagcagtattattcattatacccaaaaagtggaaatatcccaaatgtgtatcacctgttgaatggctaaacacatggtatgtccatacaatgtaatattatttagcaataaaaaggaaagaagtactgatacatgctacaacatggatggccttgaaaacattttgctaagcaaaaaaagccagtcacaaaaaaatcatatattgtatgattccatttataggaaatgtccataaaaggcaaatctatagagacaaaaagtagattagtgattgcttggggctggggatgagttgagagaatttgttgccataatttttcactttaaaacatattaaagcaaattattcaggctgaaggaaaatgataccaaatggaattcagacctatacaaaagaatgaagagcaccagaaatacatgtgtaaatataaaatactttttattttcttagaagataattgctttgagcaaaaacaaacaaataaaaaacaacaaccatttattttggggtgaataacttatgtagaagaaaactgtatggtaacaataacataaggaatgggacaggaaaaacagaagtatactatgtttttacattgtatttgaagttacatataatattgaaaggtagactgtggttaaaatgcacaaacactagaaataaaaagaaaaaaataaacaattagtcaaacaatggagataagttgcaatactaaaaatatacaatctaagagtaggtaggaaaagcagaaaaaaggaacaaagaatgataacacaaatggaaaacaaggagaaaagcatgtgatcatctcgatagatgcataaaaagaatttgaccaggccaggtgcgggcctcccagcactttgggaggctgaggcgggcggatcacaaggtcaggagatcgagaccatcctggctagcacagtgaaaccctgtctctactaaaaatacaaaaaattagccaggcatggtggcaggagcctgtagtcccagctactcggcaggctgagacaggagaattgcttgaacctgggaggcggaggttgcagtaagctggccactgcactccagcctgggcgaaactccatctcaaaaaaaaaaaaaaaaaaaaaaaaaaaaaaaagaatttgaccaaattcaatactcatttataatgaaaaaaaaaaaaaaaaactcttgacaaatagaaatagaaaaaacttccttaacccccaaaagggcatttatgaaaaacttagagctaacgtgatacataatgatgaaaactggacactttccccctaagatcaggaataagaaaagaatgtctgcttttactatttctattcaacattgtactggcagtcttagtcaatatggtaatggggtataagagataaataaaaggtatatagattcacacagaagtaaagttgcctttattaacagatggcttgattgtgtacacagaaacgtctaagggaaagaaactaaaataaatttgtcaaagactcaggaaatgaagccaataagcaaatatcaatgttatttctatatactattaaaaataactttagaaaataacatttaaaagcaataatttttacactagcatgtaaaaacatgaataacttaggggtaaatttaacaaaatctaagacctatacactggaaaatagtaagcactgctgagagaaattaaagatctaaagagttaactttatggagagttataccatgttcatggacttaaaaaaacaatattgttaagctgtcagttctacccaaattgatccctagatacaatgcactttccataaaaatctcagcaggctttttgtagaaattgacatgctgatactaaaatatatttggaatacaaaagaccttcaatagtaaaaacaattttgaaaaaggagaaccaagttgaaagacttatgctacctgatggcaagacttattataaagtaacaatggtattggcctaagaatagacattatatcaatagaacagaacagagattgctgaaatcgattaatagatcaattgatttccaacaaagatgccaaagtaattttttcttttcttttcttttttcttttttgagacagagtcttgctctgtcacccaggctggagtgcagtggcatgatctcagctcactgcaacctccgcctctcaggttcaagcgattctcctgcctcagcctcctgagtagctgggattacagacatgtgccaccacgcccggctaatttttgtatttttagtagagacggggtttcaccatgttggccaggctggtctcgaactcctgacctcaggtgatccacccgcctccacctcccaatgtgctgagattacacgtgtgagccactgcactcggcccaataatcttttcatcaaatggtgcagcaacaggatatttagatggaaaaatacagaccttgatcctactttacactatgtacaaaaacgaaccccatagacctaaacataaaagctaaaattagaaaactcctagaataaaatataggaaaacattttcacaactttatgacagacaataatttctgagaatataaaaagcactgaccctaaaataaaattaaaaagatatattggatatcataaatattaattttattccctttttgaaatataccatttaagactcataacaagatgacaataacaagacaactgaagtaaaaagatttgaacagacaatcacaagaggagatatacataagcacatgaaaggatactcatcatcattagccatcaggaaactgcatatccacagaatgcctaaaattaatgactggcaatattaagtgttggcaagtatatggagcagcatttttgatggaaatataaaattgtgcaacaattttgggaaaggattgacaatttcttataatggtaaacatgtacttgtcacatgacccagaagttccactcctaggtgtttattagaaaaatgaaaacatatttctgcacaaagacaagaatgtttatggcagcttctttataaatcatatagtcaagatttataaagaactcatacaactcaatagcaagaaaacatataacccttcattcacaatagccccaaattggaaacaatacaaatgtctaatacatctgttagggttcaatcagaatatagaaaccacacagtaatttgaagaaaattttaatataaaaattattaacaggattttcacaagcaatagaatgaaactggacctttatcttacaccaggcaaaaaattcaactcaaaatgagtaaaagccctaaatgtaagatctgaaaccgtaaaactcctagaagaaaacataagagaaagtctccttgacattagtcttggcagtgatttcttggatgtcacaccaaaagctcaggctacaaaagcaaaaacaaataaatgggactatttaaaactgaaagccttctgcacagcaaagtaaacaatcaacaaaaggaaatgacaacctacagattgagaaaaatatttggaaaccacatatcatataaagggttaatatccaagctttataaataactcatacaaccaggccgggcgaggtggctcacacctgtaatctcagcattttgggaggccaagacgggtggatcacctgaggtcaggagttcaataccagcctggccaacatggtgaaaccccgtctctactaaaaatacaaaaattagccaggcatggtgatgcgttcctgtaatcccagctacttgggaggctgaggcagaaggatcacttgaacctgggaggtggaggctgcagtgagccaagattgcgccactgcactccagcctgggtgacagcaagactccatctcaaaaaaaaaaaaggggggggggcaaaaaatctgaatagccatttctccaaagatgacataataatggctaccaagtgcatgaacaggtgctcaacatcactaatcatcaaggaaatacaaatcagaaacattatgagatagcacctcacatgtgttaggatagctgttatcagaaacataagagataacaagcgttggcaagggtgtggagaaaagggaacggttatacacggttgaatgtaaattggtacagccattatggaaaacagtaaggaagttcctaaagaagttaaaatataaccatatgatcccaattaaaatataccatatgggccgggtgcggtggctcacgcctgtaatcccagcactttgggaggccaaggcaggcggatcacgaggtcaggagatcgagaccatcctggctaatacggtgaaaccccgtctctattaaaaacacaaaaaattagccaggcgtggtggcgggcgcctgtagtcccagctactcgggaggctgaggcaggacaatggcgtgaacccaggaggtagagcttgcagtgagctgagattgcgccactgcactccagcctgggcgacagagcgagactccatctcaaaaacaaaacaaaacaaaacaaaacaaacaaacaaacaaaaaaccatatgacccagcaatccctcttctgcatataaacccaaaggaaataaaatcaccacctcataaaggtatctgaactcccatgtttatttcagcattattcacattattttacctataagataatgttctatatcttacaggtaagatatagaaacaatgatgaatggataaacatatatatatatataactgatatatataaaccagttatatatatatataacagttatatatatgttatatataatggaataatggaatattattcgcctttaaaaaggaggagatcctgctatttgccacaacgtgaaagaagttgaaggacattatgctaaataagccagacacggaaagaaaaatatatgatcttacttatatgtgggatctaaaaaaaagtcaaatatacagagatagagaataaaacggtggttaccagggtcggtgtggtggggaaggaaatggggaatgtaggtcgaaggatacaaagcagcagatatgtaggatgaacaaatggaaagacctaaggtacaacataaggactctagttaataatagtgtattttattcaggatttttgctaaatgagtagattatagctgttcttgccacaggggagaaaatgagtaactatgtgagatgatggatatgttaatttgttccactatagtaaccatgttactatatatatgcatcttatataacatcatgttgtgtaccttacatatatattaaaatttatttttttaaaaaaagattaattctagcagaggagtaattctgaaggtgtaaacggaactctaaagactatcctaaggctgaaggagagtgcccaagaaaggaacacattggaagaaggccctctccttaaagctgggattcgaaccttgttggaaaacgtgtaatgaatgtgatgtgaagaagtgtgctgggtttcccagcccaaacctggtctagagtctcaggtaagcaaggcaacacccccaggtacaggcaggcaaggctggcaggcgtatgcacagggagagtcagaatcaggaacctactcgcaggcagagtcatcgaaggcctgggaggcatggaaaccctgcagggagctggcgggccatgctggcagctggcacacagggagtcagagggccagggccgctcacctccgtacaaagcctgagatgggtagagtccatgtggggagggctgtgggaggtgggcacagggctacggctggggctgtgagctcagaggcatgaacgtgctggggacgcacagccagggcagaaccctaatggatgtccccatgcatttgcccctcgcagcagcgcactagtggagaaagagaagcaaaacttctctttctcagtgaagcacactggctccagaagtttctccctccagcagtgtcctaccagcgccatctactgacaaaacccaacactgttctcactgcaaaggagacatggttaatggggctatgccactatgcagaacaggcaatgaagggtagatttggagttgaaaggccacacattgaaactgtcacatctagcaataggtgcagtgaaaaaacaatctgtggtgtattacaataatgcgataatactcagcactaaggggaacgaattctgataatacagttagtcctccatacccacaggttctgcatccgcagattcaatcaaccacagataaaaaatgttttaaaaaataaacatacaataaatataatacaaataagtctaggtgggttggctcatgcctgtaatcccagcactttgggaggccgaggtgggcagatcacttgaggtcaggagttcgagaccagcctggccaatatggcaaaaccctgtctctactaaaaatacaaaaattagctgggcatggtggtccaccctggaatcgggagactgaggcaggagaatctcttgaacctgggaggcaaaggttgcagtgagccgagattgcaccactgcactccagcctgggtgacagaggagactcagtctcaaaaacaaaacaaaacaaaacaagacaaaaataatacaaataaaaacaatacagtataacaactatttacatagaatttacattatattaggtattataaataatcaagtgatgatttaaagtatacaggaggatgtgtgtaggttacatgtaatactatgacattttacttaaaggacttgagcatccaagcattttgttatctgtggcttccgagaaccaatcctctgcactgcaggcaacaaaataaatgtattgcaaaaacaatactgaatgaaagatatcaagcacaaaaggtaaatactgttaaatgacattctagaacacacaagactaacctatagggacaaaatgtcagttagtgttgcctgaggatttggggtgggtggagatattgactacaaaggatcacaaaggagtttggggggatgatgaaaatgttctgtatctgaatggtggctccataggtgtatacatttatcagaatacatcaaactgtaccctttaaatgggtgcattctatttcatgtaaattatacctcagttatgtctgtttttaaaatatcatctgagactgggcatggtggctcacatctgtaatcccagcaatttgggaggctgaggcaggaggattgcttgaggataggagttcaagatgaacctgggtgacacagtgagatcctatctctacaaaaaaatttaaaaatatattgtggattcctaattagggaaaatgaatcaggctggcaggacagagggaaggttaaaagaaaaagcagataagctatacatctgcctttcttcatggcccagcgcaaataactcacaatcttcctgcgcccaacttatcaccagacacctgcacgtgagctctctgtaaccagggcattatcaatactgtacaaagccctcttcagcacacagcaccatcctataaaatccccagtaagcctttgtctctttgcagtcagctcctttctggctggcctgcccattgtacccttgcaacatattttcatactttctctaataaatctgccttttttacctacaactatcttggtaaattcttcttacgatccgtgccaccagcccagtcactaatcacctacaacatatatcatctgaaaatcagatgtctacagttgtgtaggatctagaccaccatcacctcccaaaccccattaccttataaattccagggcaggggtcttttgatcatagcttggatggaaacactggaaaccttccctcttcctgcgggaggtggattctcaaagtgggaaagccttggtggtcagaatagattttcgtggattattcctgggatatgaatgagatggtacagaagcaggatatttccctgaccccttcatgggactcgtgacagggatgccttgtttactcagcctgccactctcaactcctcacaggagggagcgtgcaagtgaaccaggtggaactggagtgcatgagtggactagagtggctgaaactggccggccactctggcaccggcaggagcaaattccatgcaggccccatggcagcttccaggtggggctgcctgtgacccctgaagccccagggtgcgtgttgtagtgctcttttagctctgctgtctgtggatggcttaagtgttaacagctcagtgggccctttgccttgtcacatggggcggctgccctccgccagggagagcaaagggccagtgtggcagccttttgtatctgcattcgtggctcccaagctcttgtccagtatccaggaaaaatgaggtctcacgaaggaattgaaggacggtaaatgtgggggattttattgccaatgaaagtggctctcagtgggaagggaagctgaaaaggggatggaggattggtaatcttcccctggagtccagctgtctccagccagattcttctctgaaattataccatcaagctgtctctctgaagtcaagctgcttctctccaacatccagccatagtcccatatactggctgagtctggggtttttatatgcacaggatggagcagggcagggccatggtggtttaggaaaaggcaacatttgagcaggaaaactgggatataagttctcacttttggctgtggtttaggcttttcagtttgagggtagggtttctctggggacccttttctgcctagaatttctctgcttcctgtccctgtcagtacctggatattactcaagaaagtcaagtgatggtctttctaagggtaggcccctgccttcttctctaactcagccctccaatccagtgctcccagtggtgggtacctaccccagagaactctcacatgtatcagaagtgggcatgtatacagttcagaactgtccatcatggtcagagttgaaggcaacctaggttgtgtccaccactggggaaatgaatgaggacaatgtggaggagacaccctaaggatgcagtgcagaagttagaagcacagatgacatatgcacacatcgacagatcttaaaaatagagtgctgggtgacaagatagaaaaaatgaaatctagagcataatatgtgcaaaaactaaagatatggccacaaaatgacaccacatattttacaagaatagatacaaattcatatcaaaatattttgagagtttttttaaaagaaggtggtagaagtgagaaatgggtatgaaagtgagtaaataaataaaacaaaacagaggccttgcccaggccaatgataaaagtaggttgtgaactgggggaaatgataagctcagtcctctgctcctaaggggttaaaataagaatgtttcctcatcccaagattaaatgtgttctatggccaaatggactttattggataaatatgacatagaagtaaatcaagcgatccaaatcgagttgtctggattatataaaaggacagggaaaacacaacttcttaggagtattccattcacaccaccatcaggctacagctgcctgacatttccaggctggtccctctgtattgggtaatggtaatgaaaccgatcccacagtcctatagacaattctttgagataaacatagaaattgggccaggcgcagtggctcatgcttgtaatcccagcacttcgggaggccaaggtgggcggatcacgaggttaggagatcgaggccatcctggctaacaaggtgaaaccccacctctaccaaaaatacaaaaaattagctgggcgtggtggtgtgcacctgtagtcccagctacttgggatgccaaggcaggagaatcgcttgaacccaggaggcggaggttgcagtgagccaagatcgtgccactgcactccagcctgggcaacacagcaagactctgcctcaaaaaaaaaaaaaattgaaatcgaccttggataaacatagaaattgacccttctggtctgaaagcttgaaacttatattccttttatctgagttccttcctccagaaaggaccctgaggcctcttggaaagtatcaaagaactgaaactcaccagattgcctcatccaaataatgagatgccagacccctggttttgtttccttacccctccctagttcctgttttccaacaaattgttgtatttcttccctgctatataaacccctaattttaaccagttaaggagatagattggagattgagctcccatcttcttggctgcagcacccagttaaagcctaaaagccttcttccctgtcagtacttgttgtcttagtcattggctttctgtgaagcaagccccaggacttggatggaaacctggttgtttcactgacagcaacagtgaaccatttgtgcaagatggtctgtgtctgtgtgtgttatcagagtgcccatgacctaactgttgaaacgaataggaataatcagaattcagagtctacttgcaatttttcctgcactttaatccctatagtatctgtcatgtacaaataataagatctccacttaaatttgatgtaaggaatgggaatggaggcacacgctaacctcaggcagcaagataaccaagacatggtggtggctgagaacccagtcttggaaaagaggcctttatctgaggaagatgcccctccacgctgtatgtctgctggtcatcatccagtgtcttccatgttcactgggtcaccaggatgctgggtatcacattcccaggagctctgggacaagccaggttctcactggtagggacagagggcatgcccagtggagtgtgggaatcaccaggcctggtgagggcttgttggggcagatgtcctagcaggagcagaagaggcctatctgggcccaaggctcatgcagcaggtggaagaagtagggtgaggaagtggggcaggggtaaagggaggggtgtgggagaagaggggagcaagttggaagaggcagcaaatggaagagagagggagtggaggaaggcaggtggtgggaggagcaggggtataagccggggtggaggtggtccaggcagggagttgggaagaagagaaactggccagaggaacaagatggtctggacatgaagtaggaagagggtttgagtgactggtgactgaggcaggcacagggggaagagacagagaagtcatagggacaagagacagggcagagggaagggagggagctgaaggccaagccacggaaggggaagaagtgggatgaagtagaacttgggcaggaatgaggcagggcaatttcctttgcgtagctctccattgagaagtgagggttgtttgatgggttcagtgttctgctttctttctttgcttgattgccttatgactcagagtccactaaaagagagtctaagattctaggacatttttagttggaagagacctttgatatccttgagtacaactttctccatcttataaattcagaaacaaaggccaggcactgtggcacatgcctgtggttccagctactcaggaggctgaggtgggagggttgcttgagcccaggagttctaggctgtagtgcactgtgctaactgggtgtccacactaagttcagcatctacctggtgacctcctagaaggggaggaccaccaagttgtacacttaacctgcctctctgctgctatgtggttcttgaagattttatttcagactaagtttgtgtgtgtgtgtgtgtgtgtgtgtgtgtgtgtgtgtttgtttttgagatggagtctcactctgtcacccatgctggagtgcagtggcgcgatctcgactcactgaaacttctgcctcccaggttcaagtgattctcctgcctcagcctctcaagtagctgggattacaggtgcctgctaccatgcccagctaattttttgtatttttagtagagatgaggtttcaccattgtaactggtctcaaactcctgatctcaagtgattcatccgccctggcctcccaaaatgctgggattacaggcttaagccacggtgcctggcctatttcagactgtttttaacttccaagctctttagctaactattgtctatgatgcaatatcgtctttcatctctggggatgctaatgtttctaaagtcttcttctttttaaattttattttattttattttatagagatagggcctcactgtgttgcccaggctggtctcaaactcctgggctcaagtgatcctcctgcctcatgctgagatgacaggtgtgagccaccataccatcctatagtcctattctgattgctctatttactctgttttgttggggcttcttctgtctccattgtgcctctctttttcatgattttagaactcctcaaatgtttgggattcttgtatactcatctttggactgacatatcctgttagccaatctagttctggctttcagggtgtcctactagtttctggcctgaggaaagccattctttgttcccaccaaaataaagggtttataaacatattttttctttcatttgtatgatttagggcagaagagaaaggctatagcattactaagcctctcaccttggaccacagcctctactttatcagtgtatcctatactgagtattactatgctttttagtgtttgtttttgagacaagtctggctctgttgcccaggctggagtctagtggtatgatgatggctcactgcagccttgacctcccatgctcaagtcatcctccaacctcagcctcctgagtagctgggattacaggtgtgcaccaccacacccagctaatttttgtattttttgtaaagacagggtttcaccatattgcccaagctggtcttgaactcctgggctcaagccatccgtccgccttggcctcccaaagtgctgggattagaggcatgagtcaccgtgcccagccaagtattattctgctgtatatatgtgtggctgtgcccgctttcctgaattatttttatttttaacatttggcacttcttccaggactgattttttttttttttttttttttttttttttgagatggagtcttgctctgtctcctaggctggaatgcagtggtgtgttctcggctcactgcagcctctgcctcctgggttccagcgattctcctgcctcaccatcctgggtagctaagattacaggcacatgccaccacgcccagctaattgttgtagttttagtagagatggggtttcaccatgtaggccaggctggtctcgaactcctgacctcaggtgatctgcctgcctcggcctcccaaagtgctgggattacaggcgtgagccaccatgcccagccaggactgaattattaatagactatattattcagggttctgcagagaaacataaccaataggagattgtatctatgtatcttgatataactctgttgataaataagaaattactatcaggaacttattatacatatataattgcttggctcatgtgattatggaggctggcaagtcccagatctgcagggtgagccaccagtctggagaaacagaagagccgatattccagttcaagttcatggtcactcatcactctgctggagaattctcttctgctccatggggatagggtgcagttggcatcttttgttctgttcaggccttcaactaattgaatgaggcccacccacattatgaaaggcaatctgctttattccaagtgtaccaacttaaatgttaatctcatcgaaaaataccctcacagaaacactatgaataatgttggaccaactatctgggcaccccttgacccagtcaagttgacacataaaactaaccatcatggccgggcacgatggctcacgcctgtaatcccaggtcaaggcaggcagatcacaaggtcagaagatcgagaccatcctggctaacacggtgaaaccctgtctctactaaaaatacaaaaaattagccgggtgtaggggcaggcacctgtagtcccagctactcaggaggctgaggcaggagaatggcgtgaacccaggaggcagagcttgcagtgagctgagttcgcaccactgcactccagcctgggcaacagagtaagactctatctcaaaaaaaaaaaaaaaaaaaaaaaaaaaagaacaaacaacaaaaaaaactaaccatcacatagacattgaatagtaacaaactttgtcaatttcactaatttgatgggttaaaaaaatttcattttaatttgcttttcttgttttgatttaatttccctagacaccttttcatgcttattgatcaagtagtctctgaatttcctattcgttatctttgctcatttaaaatgtaattttcttcttttgttactgtcacaatctttatatatcatctagatattgattccttctctgttttagatgttgcaattgaaaataattgcaggctgtcatttgtcttttagcttggtttacagagtattcagtaatgcagacattttcattttttatgtaattaagtttgcccaagttttgcttcatgacttttgtgctttcctttggaaaactttccaagtactagattaaaaaaaagttgtctcctagttccccgaatatttttgcccttagctcattaaggctatacagatagaggtcaagaaccagcatgctgaaacagactatttgggtttgaatcccggctcctttattcactaggtaagtgactttgagtaaatgcaaactcttgtgtctcagttagctcatccaaaaatgggaacagtacttatctaattgcattattataaaaattataggagttaatttatgtaaagcacttagcgcagtacttagcatactataagccctatgtaaatattattttaaaaaattaaccatgtatataatgaaatagtgtgacaatatgtaatgtcatactatttcaatagtcttaaagagcaaaattacaagcacagagtggtgcatgcctataatcccagtactttgggaggccaagacaaggatctgggagtttgagacgagcctgggcaccatagcaagaccctgtctctacagaaaaattgaaaactttgccaggcatggtggtgcacacctgtaatcccagctatttgggaggctgaggtgggaggatcacttgagccccggagtttgaggctgcaatgagctgtgattagaccactgcactccaacctgggcaacagagagaccccatctaaaaaaatgattttatatgaattttgcctatttactcgtttatttaagtttttcttttttgagacatagtcttgctttgttgcccaggctggagtgcagtggtgtgatctcagttcactgcaacctccacctcccgagtccaagtgattctcctgcctcagcctcccgagtagctgggattacaggcgcccgccaccacgcccagctaatttttgtgttagtagtagagacgggatttcatcgtgttatccaggatggtctcaatctcctgaccttgtgatctgcccgcctcagcctcccaaagtgctaggattacaggtgtgagccaccgcgcctggccctatttaataaatattgtttaagcacctatttggttctatgccctgtttttatacagcagcaaacgaaacaagacacaaaccctggttaccattatggaacttacattctagtggataagaatggattacatttactgagcccacactacatgtcagccactttactaactcacttaatcctcataacaacttaaaagtaggtactattattatcccccatttcactgaggaggaagaggaggcatagagaagtaaagtgacccactaaggccacacaaccagtaagtggcagagccagggtttgagctcaggcagtctaactccacagcgtgaacttcaagtcctctctgtttcttctgactgtccagagatgacatctataaaggacaggctctcatttcatatagccaaatagtatcccaaaaaggcgatgccagcttaagattttgtcaatccttcactcatgctacacatttttattgtacccctcctatgtgctggagcttcagtggggagcaagacggacacggtccattgtcacaaggtccttagaaacactgtgagtggggaagcacacggtgccatggaggaacacaggagggtggccatgccagagtcggtggttcaggggagagaaagagacttctcaggtgacacctagaagaagaatgggagttagctaagctaaaggggtggggtggttgtggtggcaatgtccagggaaaagaaataacactgaaggagacctggtggcagcagagagcaatggaggctgagttcaaagttcaggccaggtgtggtggctcgtgcctgtaatcccagcactttgggaggccgaggcgggcagatcacctgagggtaggagtttgagaccagcctgaccaacatggtgaaaacgcatctctactaaaaatacaaaaattagctgggtgtgttggtgcacgcttgtaaactgaggcaggagaatcacttgaacccgggaggcaaaggttgcaatcagccgagatcgcaccgctgcacttcagcctgggcaatagagcgagactccatctcggaaaaaaaaaaaacaaaaacacaaagtttattccagtggagcgttagggaatttctgacaagagatgaacagcagtttcttttggaagggttttgtaaactaacattgagagaatggactttattttatgaaagcttttgagaaggagaaagacatgcttagaagcatcttttagaaatatcactataactccagcgcgtggaatataatgaaggaggaagcaagaagttccgctgtattagtctgttctcacattgccataaagaaacacctgaggctgggcacggtggctcacacctgtaatcccagcactttgtgaggccgaagcgggaggatcatgaggtcaagagattgagaccatcctggccaacatggtgaaaccctgtctctactaaaaaaatacaaacattagctgggtgtggtcgtgcgtgcctgtagtcccagctactcgggaggctgaggcaggagaattgcttgaaccaggaaggcggaggttgcagtgagcggaggtcgcaccattgcactccagcctggcgacagagcaagactctgactcaaaaaaccaaacaaaacaaaaccaaaccaaacaaaacaaaaattagctgggtgtggtggcacacacctataatcccaactactggggaggtgggggcaggagaattgcttcaacccaggaggcagaggttgcagtgagctgagatcacaccactgcactccagcctgggcaacagagtgagactcggtctcaaaaaaaaaaaaaaaaagaagggatggcacctaaaaccaagaaacagggtgcatggcccaagacagattaagaggagcccacaaagaagactggaaatgagcagcccagaaaggaggaggaaatccaggagcatgtaatgtcatggaacccaaggaaagagagtgttttcagctgaaatgaaatagctcagaaacaagctctcatatatacagtaaaataattctgataagggtgacaagagtattcaatggtgaaaggacagtcttttaaatataataagtggtgttggggaaactggatatccaaatgcaaaaaaaaatgaagtaaaacccatatctaaaactatacataaaaagtaactcaaaatggatcaaagacctaaatataagacctaaaaactgtaaaactcttag

SEQ ID NO: 5623 - DNA, 59278 bp, Homo sapiens
  FLJ25124 gene - 143038288 - 143057565 of chr1; NCBI Entrez Gene ID: 148741; Build 35; sequence includes 20,000 bases upstream of initiation codon and 20,000 bases downstream of termination codon of the gene
acgcaggaggattgcttgaggtctggaggtttgagaccagcctgggcaacatagagagaccccatctctacaaaaataaaaaataaaaaaattagctgggtatggtggtgcatgcctgtggtcccagctactcaggaggccaaggtgggaggatcacttgagcccaggtggtccaggctgcagtgagccatgattatgccactacactccagcctgggcgacagagtgagactctgtctcaaaaacaaacaaaatgggccaggcgtggtggctcacgcctgtaatcccagcactttgggaggccgaggccagtggatcacgaggtcaggagatcgagaccatcctggctaacagagtaaaaccctgtctctgctaaaaacacaaaaaattagccgggtgtcgtggcgggcgcctgtagtcccagctactcgggaggctgaggcaggagaatggcgtgaacccaggaggcagagcttgcagtgagccgagattgcgccactgcactccagcctgggcaatagagcgagactctgtctcaaaaaaaaaaaaatgttctctacccacatgcctttcctaatattctcttctccttaaacattttcagtcttcatagttgctaccatgtttcattcctcaccatcagaaccactctgcttttgttcccccaccatacagtcattgctatgttcctacatagcatttaattccttcttgttttttagaacattgtatatataaattatatctatgtatataaatgtgtaggtgtgtgtgtttatatacctatatatacatatatacatatatatacatttatatgtatacttacatacacacaattactaaagattactaaaggaatattttattaatttctacacttacacagagcctggcacagtaccttctttgcatgtaagaagtgccttataaatgtctaaattgaatgtgtcctcctgtgacctctttcccttgttgcccccagctcagtgtcctctacctcagtgttccccttccttctaggctgcccaacatacatggatgttgtcattgtcttggatggctccaacagcatctacccctggtctgaagttcagaccttcctacgaagactggtagggaaactgtttattgacccagaacagatacaggtaagagaaggcaatatgagctgggcacagttgcttgtggcacctacttaagaggtggaggtgggaggatcccctgaggccaggagttcaagactagcctgggcaatacagtgagacctcatctctaaaaatatgaaagaaaaaaaaaatagccaggcatggtggcatgcgcctacagtcccagctactcaggaggctgaggcaagagatcagttgagcccaggagtttgaggctgtagtgagctttgatcacacaactgcactccagcctgggtgaaagagtgagacctcatttcttagagagagagagaaaggcaatatggatgggcttggaaggggagagacagagagagaggggataaatgtaggtgttgtcttcagtagtatccaggtgttcatctctcctctcttatatactttcttcttcctcctctccccccatctcacatacatacatttcatttgaatgcgctttattcccaggtgggactggtacagtatggggagagccctgtacatgagtggtccctgggagatttccgaacgaaggaagaagtggtgagagcagcaaagaacctcagtcggcgggagggacgagaaacaaagactgcccaagcaataatggtggcctggtgaggcattgggaagacaggtgtgggaggctagagcaatgaaggcttagaagagttagggcggggccaggcatggtggctcacgcctgtaatcccagcactttgggaggcaaggcaggcggatcacctgaggtcaggagttcgagaccagcctgaccaacatggagaaaccccatctctactaaaaatacaaaattagccaggcatggtggcgcatgcctgttcagaggcatgctacttcggaggctgaggcaggagaatcacttaatcccgggaggtggaggttgcagtgagtcgagatcacaacattgcactccagcctgggcaacgagagcaaaactccatctaaaataaaataaaataaaatgaaatgaaaatctttcccttaaaaaaaaaaaaagaagaagaagaagagttagggcaggtttggagtgcagtgtgtatatcccaagatgtcttgcatactttctttgtatgtacactaatggtacaaagaggaaggctaagtgggctgtcattgtactccctctcactgcatttctacaaagtatctatgtctgtgtctctccatatttcacagacagaagtctctttctatccctccactccaacaatgatcctggcccacaggttctccactactgatgtcctagcccacgttccaaacatgatccaaaactcatctctaggggcacggtggtaaaattgaaacaaaacaaaacaactcatctctgggaggagtccctgcccagatcattcttttccgttctatatttcatcgatatttcccctcccaagtgcaatatttgttgaatgaatctgagtgtatgaacgttgtacttatttggactgataagctactctgtatgttctatgaccttcaaacatttgagctctcactccatgccatctccatgttaaatactcaggaaatggcctaaaaggcaagatgcttgacctcagggaagtgctgatgttaaatcctgtgtgtgtgtgtgtgtgtgtgtgtgtgtgtgtgtgtgtgtatgtgtgtgtgtgtgtgtgtgtctgcatacatctgatctcacctcactcctttctcttctcagcacagaagggttcagtcagtcccatgggggccgacccgaggctgccaggctactggtggttgtcactgatggagagtcccatgatggagaggagcttcctgcagcactaaaggcctgtgaggctggaagagtgacacgctatgggattgcagtgagaattcaccctggatctggaagagttggggagtggcaggggggcagtgtcttgtgaactgtccaaggactgggaacttgaggaaaacaagggcattaactacttcccagacttcagccacagcatgttagttggctgtgttctgtaccaactctaatgcctcattccttgatcttatgacctcttaggtccttggtcactacctccggcggcagcgagatcccagctctttcctgagagaaattagaactattgccagtgatccagatgagcgattctttttcaatgtcacagatgaggctgctctgactgacattgtggatgcactaggagatcggatttttggccttgaaggtgaggattactctggagaaatggacagggcgggagaagttctggagtgtaggtggggctctggagtgagttcagtaggtcaaaggggaaactgtcttcccctgatattgtctcaatgttttctcatgaccaagggtcccatgcagaaaacgaaagctcctttgggctggaaatgtctcagattggtttctccactcatcggctaaaggttggacagattgaccccttcattacttctcccattctctgactcagataacttcaaccacagggccctccagattcctcctttaaccagcctccatgctcaccttcccatgcctttccaactgagcccagcagaccctcagtgatcttttcactcctggaacgttttttttctctttattccccactgtcttctcagtgaccccatctgcttctgtcccacaggatgggattctttttgggatggtgggggcctatgactggggaggctctgtgctatggcttgaaggaggccaccgccttttccccccacgaatggcactggaagacgagttcccccctgcattgcagaaccatgcagcctacctgggtgagcagcagagagttgcagaggacttacagggtaggggaggaaatacatccctagtgggggcgggtatgaaatactccctcttaactcatgcggtttctcactgacctctggttacttcccttgggacctcctgctatgcctttagggaacccccctactctggaccccatcttcttttcctttacctctgttactttgcccacttctaggttactctgtttcttccatgcttttgcggggtggacgccgcctgtttctctctggggctcctcgatttagacatcgaggaaaagtcatcgccttccagcttaagaaagatggggctgtgagggttgcccagagcctccagggggagcaggtagggcatccaaggaagggtgggacctttggattcccagggacctctgggctgttggggaggagtgtgaagtgggtaagagagaggcctccaaagtctgtgcggaattctggttggcagagtctgtcagggatgtaaggagcagactagcaggctggtgagtgcttcccactgagtccacttgtctacagttaccttcccttttctctggggtcatcatcacccaccattccccagattggttcatactttggcagtgagctctgcccattggatacagatagggatggaacaactgatgtcttacttgtggctgcccccatgttcctgggaccccagaacaaggaaacaggacgtgtttatgtgtatctggtaggccaggtgagacttgctgggaccccctgccctggacttgcattgtgggggtggagggaggaaaggagggaaggtgcacatatttgagggtttgctgagaggttgggtctgccagattagcatcttctatcttctctcctccaccagcagtccttgctgaccctccaaggaacacttcagccagaacccccccaggatgctcggtttggctttgccatgggagctcttcctgatctgaaccaagatggttttgctgatgtggctgtgggggcgcctctggaagatgggcaccagggagcactgtacctgtaccatggaacccagagtggagtcaggccccatcctgcccaggtcaggagtacccaaataaagcaggggcacggttgtaggaagaggaatagggggatgctctttgcttgtcaatagtctccttggcttgagacccaaactgaacaagtgcttttattagtaggcaaaaacataaggcagtggacaggttgctgaactaagaactcctgaacacaggcaagtttctcttattcccaggactgacgggagcattataaagagcaaggcatggccgggtgtggtggttcacgcctgtaatcccagcactttggaaggctgaggcaggcagatcacctgaggtcaggagttcgagaccagcctggccaacatgatgaaactctactaaaaatacaaaaaattagccgggcctggtggcgcacacctataatcccagttactcaggaggctagggcaggagaatcgcttgaacctgggaggcggaggttgcagtgagccaagatcacaccattgcactccagcctgggcaacaagagtgaaactccatctcaaaaataaataaataaataaaaagaaagagcaaggcaggaggcctgagaaactaggtgtatgggtccctgcctcagtattctctctcttcctctcagaggattgctgctgcctccatgccacatgccctcagctactttggccgaagtgtggatggtcggctagatctggatggagatgatctggtcgatgtggctgtgggtgcccagggggcagccatcctgctcaggtgaggggtcccagctcaggtggtggtggacagcatagcatagctgttaaaggcaagggccttaaagtcacagatggagatttggttttcttggtcaacttactctgtgcctccattcttagtttataaaatgacagtagtaatagtacctaccttataggtttattgtgaagattaaatgagataatccatataatgatttgaacacagtgcctagcatgtaagtgcgtattgaagtgaatctagggctgggtacagtggctcacacctgtaatcccagcactttgggaggcgaaggtaggaggatcatttgaggccaggagttcaagaacagcctgaccaacatggtgaaaccccgtctctactaaaaatacaaaaaaattagctgagcatggttgtgggcaccagtaatcccagctactcgggaggctgaggcaggagaatcacttgaacccaggaggcagaggttgcagtgagctgagatcgccccactgcactccagcgtgggccacagagtgaaactccatctcaaaaaaaaaaaaagatcaatgacatgaatctattatcttacttctgtcagagggttcggggtagggtgacatgtgcattcagcccctccttctttgttttgaccatggggaagcaaacactgggcttgcacttctcagagggcttacctcctactgctagaatttcttttccacactgttcccagctcccggcccattgtccatctgaccccatcactggaggtgaccccacaggccatcagtgtggttcagagggactgtaggcggcgaggccaagaggcagtctgtctgactgcagccctttgcttccaagtgacctcccgtactcctggtcgctgggatcaccaattctgtgagtgactaaaatgcattacaggcaactctcaattccttgcatgccttcctcactagacccctttccaccctcactcttgcctccttcattcagacatgaggttcaccgcatcactggatgaatggactgctggggcacgtgcagcatttgatggctctggccagaggttgtcccctcggaggctccggctcagtgtggggaatgtcacttgtgagcagctacacttccatgtgctggtaaggagagggcagtaactgcttagcatcagggcctgagaatgaggagaaagctgggtcagaggaggaattttagctgaatcagcaagaaagccaaagccgggaaaatgagatgattcagactttggagtcagggctgatctgggtttgaatcctagctctgccatttaccacctatgaattctggcaagtccaaccctcagttttcttgtctgcaaaggggtgataataataactgtatcataggagttgtattaaaattaaatttagccgggcgcagtggctcacgcttgtaatcccagcactttgggaggccgaggcaggtggatcacaaggtcaggagatcgagaccatcctggctaacatggtgaaaccccatctgtactaaaaatacaaaaaattagccgggcgtggtggcaggtgcctgtagtcccagctactcgggaggctgaggcaggagaatggcctgaacccaggaggcagagcttgcagtgagccgagatcatgccactgcactccagcctgggcgacagagcgagactctgtctcaaaaataaataaataaataaataaattaactaattaattaaatttagtaatacagttaagatcttaggacagtgcccagcacacagaaaatgcttcataaatgatcactacaattatcacaagatccttgactctgtgactctgtgactctgttttccttcaggatacatcagattacctccggccagtggccttgactgtgacctttgccttggacaatactacaaagccagggcctgtgctgaatgagggctcacccacctctatacaaaagctggtcagcagtgccatgccctgccccttgctcccaacactgccctccttcaagagaaaagggagggagggagaagacatgagatcatggtgaaatctgacctgggctcctctaatcaaaatatacccacttttgtcttttcactttccccctattctattcctttcctccttgctttcctctcaacccttagccccttccctttcttccaggtccccttctcaaaggattgtggccctgacaatgaatgtgtcacagacctggtgcttcaagtgaatatggacatcagaggctccaggttggatggacatgtactaggcaaaccagggtgacctgagacagactggaagggactcgaagggcgggtagggggttgtttcttacccatgataacaaaagtgagacttttggcactcccctccttcaactcctggtctctccctcattcatcattcccaggaaggccccatttgtggttcgaggtggccggcggaaagtgctggtatctacaactctggagaacagaaaggaaaatgcttacaatacgagcctgagtctcatcttctctagaaacctccacctggccagtctcactcctcaggtgcctttggaggagggggtgtgggagaaggaaagaaaggaggaggaagaagattggggtattggcctcagctgtgaggtcctctagagaaaggctcagtgtttagaggctgtgggtaggacagcagttgcagccccagctccagcttctatctccattcccctgccctcagagagagagcccaataaaggtggaatgtgccgccccttctgctcatgcccggctctgcagtgtggggcatcctgtcttccagactggagccaaggtgggttggggtctaggatgaaaagagggctctaggagggcagaggctgggatctgagggtcctgggacttcagggaagggggcgcacaagggctcctgttcctctgtagttgttccatgaggaagactctaccattaccctgtgtcccctgcccctaggtgacctttctgctagagtttgagtttagctgctcctctctcctgagccaggtcttcgtgaagctgactgccagcaggtgagaatgaagggaactttcttccagacctctcctcctactgagtcttgactggaggggtggggaggaacaacattgattcctctattaacagagaagggtgtcttctgaggaggggttgagatgtgagcctctcccctctgaccctacagtgacagcctggagagaaatgggacccttcaagataacacagcccagacctcagcctacatccaatatgagccccacctcctgttctctaggtatgcccagcttctagggtgggacccagttctgacctcagactcatacccttatgctgcttccctccccttccatgtgcctcagtttttccaaaaacccaagcccttgcggctgctcagtctttttgccctcaatcctattcatgctgaatcttcccttttaagcatcttactttcctaggtatagtgttttgccaggccttgggcactggagctgggatgaggggatatgggatgtagccataaagcttgcattgtctgtgtcatgttctacttctgtcttctccatgtacccccacctctttatccatgtgctggccctgcctcctctgaatccacgtctgtgtgctgatcatatgcccctgtgtctgtgttatggctgtgaccatgtacttcctgacttggtgttcacacagtgagtctaccctgcaccgctatgaggttcacccatatgggaccctcccagtgggtcctggcccagaattcaaaaccactctcagggtgagaagctggaggggtcttggcatgaggagaatgtgggggaacaacagctttgtgggaaaaggatgggaagggtctctcttggattttaatggtatctagggtgaaggggaacaaatgaggaagggtcttctgtctcccacttcttcctattcccaaccttcctcttaggttcagaacctaggctgctatgtggtcagtggcctcatcatctcagccctccttccagctgtggcccatgggggcaattacttcctatcactgtctcaagtcatcactaacaatgtgagtctggtctaggagggcatggaatcctgccaccttgagctggtggactcactgaagctggacaccacaccagctccctatctgttgggcctctgctcttggggctcttctctctggggggctttctttttacacatgtggcttattagagagaagaaaaaggtattataaggggaagaactacaagggtgtaggtatgttccaactcagccttgagtggctagcgccaccccatcaggagggtctttcaagttggatcttcctctaggcaagctgcatagtgcagaacctgactgaacccccaggcccacctgtgcatccagaggagcttcaacacacaaacagactggtatgagtcacaaaggggtgtccagagtgggaatgcaagtggagttgggtgacttgggacaagagggtaggaactggagtggggaagaagggatctttccaccccagggtcctgatctggagtgggaatgaaaatggagtcaggtgccttgggacaagactgtgtgaactagaggtggggaaagaggatgtttctaccccagagtcctgatctgtctctctctgtctcttctgttagaatgggagcaatactcagtgtcaggtggtgaggtgccaccttgggcagctggcaaaggggactgaggtctctgttggactattgaggctggttcacaatgaatttttccgaagagtaagcctttccttttctagtactccccacttctgctcctttctggaactttagcataggttttggaggtagacagacccacgttcaagtttcacttttgcctcttactagctatttgaccatgagcaagttatttcatctctctaagcctctttttcctaatctctaaaatgggaagataataccaatttcatggggttgttataaagaataaatgaataatgagctggacatatggtgaacactcagtggaagctagttattatccttgtattttcctccactgaccattacttttttttttcctgaccattccttagtgctgtatcaatcaacatttgcaggatacctaaatttaatcagttaagaatccatcacgttcctattacgtaaaaggccctgtattaggttgacactgagaatatctccaacatttagcctcatgcctaactcattgtaggcgcttaacatatttttgctaaatgaatgaattattgatattacatgcaggatttgtactggggagtggtgggaagtaagattgtataggtgagagggatctagattacgaaaggcctctgaagccagggagaaactgaacttaatatgacaggtagtgaggagtcagtgtgagttcctcctgggcagggaaatggcatcttaattgtaatggctgtttggcactaaggtcaatgttgtgctttcccatatctacctggaataacacaagatccctgggatgtcatcatatgttttagggaagttaagtccaataaaccacccttctccaagtctctgtccttctttggtatctttttttcactagtctattcatgctttcaacaaagatttattaagaaaccactacatggccgggcgcggtggctcacgcctgtaatccctgcactttgggaggccaaggtgggcagatcatgagatcaggagatcgagaccatcctggctaacacggtgaaaccctgtctctattaaaaataaaaaaattagccaggtgtggtggcaggcgcctatagtcccagctacttgggaggttgaggcaggagaatggcattaacccgagagatggagtttgcagtgagccgagatcacgccactgcactccagcctgggtgacagagcgagactccatctcaaaaaaaaaaaaaagaaaccactacatacttggtactctgctatctagtaggcactaaggacacaaaggttagtaaggcacagcctttaacctagaggatcttatagttcaggagtgaaaaacagaagtaaacaccagtgttggtgggggttaggaggaatgatttccctaaatcccagaggggatgacatctaaacttcaatctaaaggaggggtagaggtcagccaaaggaaagaggagtagaatgcatttcaggtaaagcaccagatgtattgattgtccttggaaaacaaacagcagcagcagatgtgaccaggggttttccatctattacccttcctctcttttcccattggtcttcagccttttcttctggtcttgagagccctcaacattatgcctctcagcctcaactttgctgttgggattccaaagaactatatcacctgataatggctcattttaaatgtcttcctatccacttgttccataggccaagttcaagtccctgacggtggtcagcacctttgagctgggaaccgaagagggcagtgtcctacagctgactgaagcctcccgttggagtgaggtagggctggagaccgagtctgagagctgtgaaaataatgatgatgggtatgtggtagggccacccgtgggctttttcagaacgaaggcatctccatcaggcagcaggatcctagtgttccactgccgccattcctgcctcagtttctttcctttaagtagcaggaggttatttattctatttgggggctggctttgatataatgtggggtgaggctagctgggttataggatgcatgtagaaaactactcttctgtccacgcagagcctcttggaggtggttcagacccggcctatcctcatctccctgtggatcctcataggcagtgtcctgggagggttgctcctgcttgctctccttgtcttctgcctgtggaaggtaagcactgctttagtggggagtgtggagcatgatgcccatgagttgagggatccttgattatagcagagagaacaggatttgtgctgggcagctaaccaggctgtggatgtcatgcccagatctccttcactgtaccccacaaatgttggttaaattattctaagccaaataaaataaatttgaattccatttttggaaacagaacaaaagtgaagacctcagataagtctgagagctactggcaaggttcccagtctaggcatttggcagtgacgcttatcttttcttctacagcttggcttctttgcccataagaaaatccctgaggaagaaaaaagagaagagaagttggagcaatgaatgtagaataagggtctagaaagtcctccctggcagcttcttcaagagacttgcataaaagcagaggtttgggggctcagatgggacaagaagccgcctctggactatctccccagaccagcagcctgacttgacttttgagtcctagggatgctgctggctagagatgaggctttacctcagacaagaagagctggcaccaaaactagccatgctcccaccctctgcttccctcctcctcgtgatcctggttccatagccaacactggggcttttgtttggggtccttttatccccaggaatcaataatttttttgcctaggtgcctgactcctttcagattccctctttatcttccctcacagtttggaaaggatgagggttatcttcctcgattcttccaccctctcactttcctgcctgttccccactccacaggagggagctgacgttggcttgaaaggagtaaagtcaacatctgctgctttcctgtggactctggtgattcatagagccggatggggagagtcaacaggaaaaaaggagggaggaggaaaagccacaagagacattctgtacaattccaaggaacagagaagcctttagacaggcaactgccatcccccctgaaacctgagacctgtagtgcactcgaccgccctcaggtgttggtgaaacagagctgcccccaggctcgctgggcataggcttcctgattccaagccttttctgggagcaaagccagggcctggtgcctgattttctgaagccaggagccctcaggtggctggagctggaatagcagggaggactgggtgtacctaggcagtattttctctacttctctcaagtcttatactcactcttgagccctccttggggcctgcttagaaagcagacaggagagagagtactgctacttgatgatgggaaatgctttcactttaccagctttgggaagcagcagccccatgggatctaaaagtgtggagtctgcattaagaaacctacatgggtggcatggggctctggggagcaagcccttacttgctcagcactggttatgtagcacaaatagctcctaggaaaatgtttctggggcaaccctagaaccctggtcatattttgcagggtttctctggtggaatcagtttgccagcccttgcttgatgcttactggaaatctccaggttaatttctatctctgatccctccccaacccactccatatttgggtcatggacagtaaaggcagttggattctcatagacaactgggtaacttatatttctttgtaatcaagacttgagatatcgaagtcagttattggtctccagagtgcagctctgggagccttttgaagaatcagcactcattaagagctgagaagagagaagacctgattgggtggttgactagcagtcacagaacctgtcctcccaggctgttcctgaggcctgaccacagtatttattttggcatgtctctggccttctgcagaggcccaccctcatgggcattgtctctgtttcccagtggggtggacagtatatcagatggtcagaacaaataaagttcagtgtcaaatgacttttggctctatatgtattccctaggatatagactgctcagtaatagtgagaggtagatacttgttttgcctgggattttacagagtggagtccctggaaggcaaagttaagaagtattttaaatgttttctgtggctttcccacaggagatgtattctagcctcctgtaattctcacctgcttaagtgaccagaaagtataaaggtctgggaagcacagaggtttagattgaaatcctatctgccatttattagctgtatggccttcagcaaatcataacttccttgaggctcagataataaaaggctgtgtattacagtggttaacaatgaaggcagatttgggtttaaatctaggctacacaacttaaaaagtctgtttgacctaggacagacttaacttctctaagtcttggctttctcatctttaaacctattagggtcatgaagacaaaatgaaataatccaagaaaagtgagcatttagtaaatgctcagtaaatggtaactattattataaaactattttgtcataaaataatctaccatatcatgccttgtgaggattaagggagaaagtatactggagcaccaggtggtggtgttcctgctctctgacccatctcccagattgtgaagatgtgtttctacgtgctgttgtctcatccactaaatcttgtcctatgcctcatcttttttttttttttttttttttttttgagacagagtctcgccctgtcgcccaggctggagtgcagtggcacgatctcagctcactgcaacctctgcctcctgggtccaagcaattctcctgcctcagcctcctgagtagttgggactacaggtgtgcaccaccatgcccagctaatttttggatatttagtagagacagggtttcaccatgttgaccaggctgatcttgaactcctgattcacgtgatctgcctgcctcagcctcccaaagtgctgggattacaggtatgagccactgtgcctggcctgcctcatcccttttgaaataagctctttgagccctctaaggtgataattagctgaagaatttaaggttctaatggtagagatcaaatctatttgattccattaagcaggtatcttctaggctcctcttgagacacccagagtttttccattatcctgagagaacacgtgcacttaagcaatggccttctagagaccgagtctctgcctctattgcctaaccctgagaattgtggcctgtctggcctatttggcatgaacaccattctgtgtcaacctgctgagttgttttgtgacaggaaagggtttccattgtgaccctcagtgcacttcatacaggctgtaacttgatcagcctttatggagcacacagtttctagggctgagaccgcaaccagattatgttgacagactctcctctcctctttaccctcagtcagcccccaaatggaggtaggtttccttgagtactggttcatctaatgctcacacatatatacatatacacacatatatatgtgtgtgtgtttgtgtgtgtatacatatatatatatttaaattttttttagagagggggtctcactatgttgcctaggctggtctccaactcctggcctcaagcaatcctcccgtcttggcctttccacatgctgggattataggtgtgagccactgtgactgacctcatgtaattcttttttttttttttttaggattaatttcttttatttatttatttattttattttacttcaagttctagggtatgtgtgcacaacatgcaggtttgttacatatgtatacatgtgccgtgttggtgtgctgcacccattaactcatcatttacattaggtatatctcctaatgctatccctccctgctccctgacctcatgtaattctttatccatatgattaagagagcacttttaatatatttttccaactagagattcccctcctatccatcgtcagctccagactggggctttctctaaacccaatcttgttacccctttctttgcaatagtattagtttaagaagcaactgtgtattgttccttcctttccttgttgttgctcctttgcttcttcattaatttttttcattcatttattcatcagatatcaagcacgtaatatgtgcttgacaatggcaataatataaaacacaactaccatcaaagagtccagtccagtagcagaaacaaacatgtaaacaaatagtggcaaatacagcctggacgcagtggctcacacctgtgatcccaggactttgggaggtcgtggcaggtggatcacttgagttcaggagttcgagaccatcttggacaacatgtgaaaccctgtctttaccaaaaatacagaaacaattagctgggcatggtggtacgcacctgtagtcccatctacttgggaggctgaggtgggaggatggcacgagcccaggaagtggaggttacagtgagccgacatcacgccattgcgctgcagcctgggtgacagagtgagacactatctcaaaaacaaaaaaaaatggcaaatgcaaagaggtggttgctatatatcaacaagcactaggagtatgtcatacaagaggcatactttgttgggcggtgggggtggcggggttgtaagggaaaactttatagaaaaaagaaatttggctgcggggttgttctgtgcaggaaacgcacaaggggagaagaagagacacacacaatacctttaagggtaaacaagctttatcccatgtaaatggcaatggagatataataagcaaatggtacaagcaaattaatataataagcaaattatataataagtaagcaaatgatataataaacagattgatataataagcaaattgcaatgggaaggggagaagggaaaagatgtttacattcaccagactatggaggatttaccaccagactggaaagcaacagcctgggttccagagttgaacaccgcactcataagactatagaggattcaccaccagactgagaagcaacagcctgggctccagagttggccactcatccatgcacagacgaggagaggtctcatgaagttttggcgcagtctgggaccctagctctttttgtaacgagttgtttggcatgaggcccagtcacggggcccttggcgactgggctcaaggaacacaaaacattcaacttatttttgcaattgtctattgtttttcaataactaacgtgtaggaatagattgaaatagagatttctccaaaacagtgctggacgaacacctcaaggggctcacacaacctgttctgggacttggtgaccattgtttctgtccacgttcaattgagttcaaatttaatatttaacttttccaccgcagggatcaaatgtgacaggaggcattcttgggaggattaatcaccagctgcaaagggaattgtaaattagaacagtttgaggcctggtgctctgggagttgaggtgaggagaatcgcttgagcccaggagttcaaaaccagtctgggcaacatggtgaaaccccatctctaccaaatatatgaaaattagctgggcatggtgatgtgcacctatagtcccagctactcaggaggctgaagtgggaggatcccttgagcttaagaagtcaaggctgctgcagtgagccccgatcatgctatcacactccagcctgggtgacagcgagaccctgtctcaaaacaaaaaaaacaaggccaggcatagtggctcacgcctgtaatcccagcactttgggaggccaaggcaggtggatcacttgaggtcaggaatttgagaccagtccggccaacatggcaaaaccctgtctctactaaaaatacaaaacttagcgggcgtgatggcacatacctgtaatcccagccacttgggaggctgaggcaggagaattgcttggaccgggaaggcagaggctgcggtgagtgagccgagattgtgccactgcacttcagtctgggtgagactctgtctcaaaaaataaaaataataataataaaaaaagaaacagtttgagtggctcttttgtgtgaaagtaatgagagatgggactgggaaagagggcggcagcgtatgactcctgaagagccttgtaaaccacttaagaactttgggctttaccctgtaggttttcatatgcattttagtgagctctctccggcggggagaggagaaaagaaagacaggaagaccagttggctgcgactgactgttcaagaattaccaagagcctgaacttcaagggcagtggaaataatgaagacagttttttgtttggttattttttgtttctatgcgggggcgggggcggggggggcagcttaaaataaaattgctctcctcgctctctgctgttttctaattcagatgtgcgtttaaaaattgagcctgggccaggaatagtggtggctcatgcctataatcccagcgctttgggaggctacggtgaggagaatcgcttgaggcctggagttgaagaccagactgggtaacatagagacactccatctcttaaaaaaaaaaaaaaaaaattagccaggcgtggtggtgcatgcctgtagtctcagctactcgggaggctggagtgagagaatcccttaagcccacaagttggaggttacggtgagctatgatagcgccatgcactccagcctggccgacagagggacagattagagacactgtctcagaaaacagaaagaaaaaataaaattgaacctgatcacctttccttaggttttgtcccccaggttaccgtgggccgcgcattatctctgctctgcttaacactacaatctcctatttccgaactgctctcttcaaatgctcttttttgcttgggtttttggccggggaatagtggcgggggagaggcggggggagttggcgggggcagaggtaactttaccagtgattaaatgcaaatgcgacagtccgtgagaccgaagcccctggtagaagccgggaccctcctgcctctggctgccgctctccgaggggcggggctgaggcggggcttggggcggaggccccgcctggaactgagggtggggcgggtccgggtccgggaggagtctcagctggagcccacccggttcctttcctgattgagcaggtcggatcccagggtgggttcagatttgaagggcgaggttcgaggccaagcccccgtcgcagcctaagactgcgggcttttctcctctgcagggatggggtagggcagggccaggggcggagttttgagcccagcccttgggttcttgcctctgattgagcagggcgggttctgaggcggatcgtggggcggggcccgctctgctttttgacagctgtctcttgcacagccgcagccaagtccggtgggttcgggaacctgtggcccggctctctgcgcgtccccatcccccgtggccccgaccccggccatgaagcgtatcttctcctgctccagcacacaggtggcggtaggtgccaaaatgtgtgggaggatggggttgggatcccagctctgtggtgacagaagtctttagtcccgtctcaatgcatcatcgccttttctttttatcagtctttctagctcttctagtcttgcaaggaagcccgccagctttgccttcctcaagaccctgccctgcagcttctgacttgccctgctcacctctgccatccccaaggccctttccccggcccctttcttgtcctcctagcatctacacccccgatttctggttcgttttctgcaactctgtccccttcccatggccctgaccctacttctgctccgtctcccagtaccaaacctcccccaagcatcttcctcagcccctgcctggcctcaagctccattctacaccaccaagtcatgccccagagccccatatttcatccctgccctgtccccgcaatcttgccttccacgtagctctatccttgctgtttcctgttagttcaacaagcactcccagccctgtgccttctgctaaccctttttcacaatctcctctgtcattgcttccctcctgccccatgccactttcactcccatctctcaccagcactgctgttcctcaaacatcactccaaacctttttccaattgatgctcccacaacagcaaccttctgttctcccctccaacctctgccctactctgcccagtggtcgccagtcccacttttcctcctgcctgcttgctgtgagttaatattgcagtctggtcagcctcacaggcactgccagaggatgcacagttgcctgactgctccccagaggactgggtgagttgcctgcagagtccaccccagccagttcactgcagtgtctgatcatcagactggttcttgggccagtcaaggctcaaggcctttctgcctgcttttccccagattattcatttcctgaacccttgcccagttgcttaggaatgatactctctgtttcctttggttgaggtgggggaaagtgatgatgagagaagaggatagagcagactcagagttcccagcagaagtcactctattccccatgttctcccagaaaaaaaaaaacataagattatagaaggtggtggcttagggagggtattgcttcttcttctctagagatctcttacagagagcccccttatttggaaatggaattttctgtagaggttggggttacggctaatttagaagcaaattagccagctacttgtagcaatattgctttgctaacttgacttagtagtatcgttcataagaaaatatcagaaatgttcaattagctcattctgcatgggcaggttacagaatcctggaagcaagctatgaggcaagagtatgaactctgttgaggcctgtccttgtcccacttacatttgcatctctacttagtttccacacattgatcaaccaatcaaaaggtatttactattatatgcaccagaaactgaggctgcccagactcagtcttaactcataatgactttttagaaattcatatggactcttccttagttactgaaagtattcaatgttgcctttcccttacaggtttgtggagtctgcctgcttcttaggaatggggaaactatttcattctttctgatcccccaatccttgggcagtacctcctttccaaggtgctggaatgagtgggctggcttttggaatttggaaccatccctctgtcctccttgattctagctgtacagaggtttgaccataaagaatgaccacccattctaaacttttagtataacaagatcttactataatgagattatgggaagtaagttggatgggtttagaattatctagctggaaagaaaactgtttcttcagacagattggagtcatagaaagcttgcaaatagggcagtttcagctgcagattggttcctcatgaaatttccccacacttctcatgataaattcctccactgttttgggtggcaaactactctggaaccatttgtcagagaagtagtgtggcagtctttatggccactccaaaagcctggcttcccagtcacactggaagactgcctctacccatctccactcacacatttgggtccagggccagagccctgcactgtcagtctgagtaaggactgaaaaagcagtgatcattttaaagctaatctaagttaccagtatataggaaaatccacacacaaaaaaaccccaactcctataatcccattttattttagtcaagtagaggatatccttgagggtatcttacctatgagcttactctgcctaggtagaccagaagtagaccagaagagagctttaaataattggcactggatcatctgggcgcagtggctcacgcctgtaatcccagcactttgggaggctgaagcgggtggatcacctgaggtcaggagtttgggaccagcctggccaacatggcgataccctatctctactaaaaatacaaaaattagccgggtgtggtggcaggcacctgtaatcccagctacttgggaggctgaggcaggagaatcgcttgaacccgggaggcggaggttgcagtgagccgagatggtgccatcgcactccagcctgggcaacaagagcaagactccgtctcaaaaaaaaaaaaaaaaaaaaaaaaattggtactgtctactgcaattacaacgttgagaattaggtcctggttcccctttctgtttccactcacctgacctacagcagaagtcattccttctctctctacttgctggtgtgcttccatgttataggatgcttataggtacacagccagagatataaggagaaggtacaattacttctacaaaagtcctctaatctcagctatggaaatacaaagcttatacttattgagtctgctgattaatttggtgattgctcccttgaggctgtgatggtaatctagtgcctcctttccaaggtgctggggtaagctacagactggatcttgacatttgaaagcatctctctgtcctttacttcagctctgcagaggcttggccatgaaaagtttctacccattctaaactctacttagtataatgagattataggaagtaaattgggtggatttagaactatctagctggaaagaaaagtacccaggccaggcgtggtggctcacacctataatcccagcactttgggaggctgaggtgcggaggatcacttgagcccaggagtttttgagaccagcctgggcaatgcagtgatacctcatctctaaaaaaaaaaattacctgggtgtggtagagcatgcctgtagtcccagctactcagaagactgaggtgggaggatcacctgagcccagaggtcaaggctgcagtgagccatgatcatgccactgcacttcagcctgggcaacaaagcaagactctgtctcaaaaaaaaaaaaaaaaaaggaaagaaagaaaaagaaaaaagaaataaaaagaagtggaaagggccaggcgcggtggctcacgcttgtaatcccagcactttgggaggccgaggagggcagatcacgaggtcaggagattgagaccatcctggctaacatggtgaaaccctgtctctactaaaaatacaaaaaattatccgggtgtggtggcgggcgcctgtagtcccagctactcgggaggctgaggcaggagaatggcgtgaacctgggaggtggaggttgcagtgagccgagaccacgccactgcactccagcctgggcgacagagcaagactctgtctcaaaaaaaaaaaaaaaaaaaaaaagaaggggaaagaaaagtatctatattgctaagaagcatctttaccatctgtacagcttggctgttattcgctggctagtatcagcaagatcccttccactctcctggctggagaattctgagcccaggaacatctaaaatgtgctcaggaaggatggattgtgcatctactatgtggcagacaccgagctagatgccttataggttgttatagtattaggaaactgaggttcagagatgttgttacatgcctaaattcacagaggcagacagtgttagagtcaagacttgaaacatttcgagaactgcaggttgacgtcagctgatggcagcaccctgtcgtggggcatagttctagctctctgctttcctgggggtgacctggtctccaaaggccattagaaaatgcgttcttacatgtcagagtctgttagtatgtgaaggagtcattttgcttattttgtcctttgagagttaacctgtttggagactccatgagacagtagagtctgagggtgggtggctttgccctggaggcaacttgagactgtttatctggaaataagtaaacctgtttctatagcttgtagtagtgtggtctggtggggagagctaggatttggcatcaggtggactgggttctttttttgtttgtttgtttgtttgagatggagtcttgctcttgtcacccagactggagtgcaatggtgcaatctcagctcactgcaacctccacttcccaggttcaagcaattctcctgcctcagtctcctgtagctgggattacaggcaccggccaccacccccagctaattttttgtatttttagtagagacggggtttcaccatgttggccaagctggtcttgaactcctgacctcaggtgatccacccgtcttggcctcccaaagtgctgggattgcaggcgtgaaccaccgcacccagccatggcctggattctaattccaattttgccactctttttcgtgatcttgaatggttatctaatcttggtatacttctgtttcttctgtcaaagagatggaataatagccctagctactttccagggatgttgagagactaattgaaatagcatgtgaaaggactgtgagaagttacaacttctgtacaggagtattacctcagaatccatctaccttagataattttatggtttggatatttagagctttcctgtggttgattaataatttgccctggctacgtaaacagtgtttgaaaatgagttactgggcttccacagaccctatttttcttcacccctttctatagcctcttgttgagattataccttataaaatgctatgtgccaccaccaacaccccactacttcctgttttgttacaaggatgccatatatttgtatggctctttacagtttataaagagattttgtatatattagcttgtttaatagtcacagcatgatgaggtagttgttattagccgtattttatagaagaggaaacaggttaaaggtgtttaatggcttactttaggtcacatagccgagaatgtagctgaactaggtcccaaactcaggccagccagcgaaatatttgtctggcagcctttacatcagaccacagatctttgcatctgtctcttccttttcattcccttctctggacaaaaccaggcttttctgtactttcagccctgggtgtttttacatagctgtctcttttatgccctataacacttcaattattataattaccctaccacccacaaaacccaagctggaatgatagaacaatgcatgcccaggtgtggctgttgtctagacagctgctccctgccagggaaactgggagggaggagaaggggagctacctcttgctgcttcctcaaacataactagaaacctctttgccttttggttgttgttgccatggaaaggagagagacggtcgccaaagggcctagatatgatatgggaaaacagaaactctagtttcctcttttaactgtggggcccaaagccaatgaaaagaggtggaatggttaggtattggaactcctagctgtaacctgaagctcggtcggtgccttaatgtacttctcaaacaactgacaacaaaaagcagagcagcagggtttcaggggtggaggcggtggtgagaggcaacatgagtcctcaaaagtggtcacgttggttccatttgctccagcaagacctagagagcaaaagggaaaggattgctctgaggttgggcactgaacaacaactctaatcatgatgacaaaaggacatttgaaatactgtgcattcagcactcaaatgatttttaattcagtggtccagggtccttctggctcagggctggaaataaccagcaatagttcttggtggcatattagctggttaagatttagctaggcccacctaagaaggactaaatgatctaggatgtgtgacttgtggaagagaaaaagggatgttccttttctctcatttggcatcctaaccatttgcctcttttctttctccacactacccccatgccctatattcacacaacctgtggctctggaccaggtggagagatggaaccgccatgatcagaagctgctggaggcagtgcacaggggggatgtgggacgcgtggctgccctggcctccaggaaatctgcccgacccaccaagcttgactcgaatggccagtccccgtaagtcagtcctcctgcccctgccccttacatgtggctcccttttgaagcccccaaatccaatataacataggaccagggaatgcctacaacttcagagctcttttcattgtcttaattagcaagtatatcaatagttttttgctacatataagttctacacaaagtgaggaaagaaaatattgttcctgagctccatccattgcacaacccagattgacaccactgacttgtaaagtacataaagcccattaaacaaacagaaaatgaatatatacactaagtagagtgtttcttcattgcacaagtaggagggtgtgtatgcatgggaaatttgaaatgaagtggtagcatgggagtcacatggctagagggagtagtgattaagtcaaaggaaatgttatcccttgtctctacccaaagccttcgaatgtccagccttcactctgctctggctgactctttctgtgacacttccacttccgctaaggttctgtgctcagagaggcaggtaattatgtgttccctagacacccctgcaatagtctgagattccttgagacctgtagctcttatttcttccttgcttttagcatcctttgtgattggaggccatatagacttctctttctcagaaattcaagctaggggagcttcttttcctgcttttaggattggctttggggtagggagcatagcaagaagggcttatcaagattctcccattcctcatccctggtccctttatcctttggcctctcggccttgattctggcaggtttcatctggcagcctccaaaggcctgacagaatgtctgactatcctgcttgcaaatggggctgacatcaacagcaagaatgaggatggtgagtgagccggagcactgggccacgctgcttgcttgcccctggtacagcagcagtcgggggcggtgctgggccctgctggacattcctactgtggccccttgcttctctccttagtaagttctggccagcatccttccaggagttcccctccccgtaagctgggcacacctcacccccactcccaccttcatcacaggtaccaggcacttggggaacaggaatttctggccccgtgtggctgaaagcttctctccctaatctcctgattatctgtgcgtctcttgccttccctccctgtgagtcatcagcatgcatggggccacctaccctccttctccccttctttctgttccaggaagcactgccctacacttggccaccatctcctgccagccacagtgtgttaaggttctgcttcaggtaagagcagtcccttgataccactcttatgaagggaagaagtggtcccagagttttctaacttcatttcatacttaaaaggaatagttggccaaatgtactcgcctcatccccaataggagggctgataatcatttgtttgccaacatttatttaactactatgtgcaggcaccatgtttgatagtgcctttgagggcaggttataaagcagagttgccaggcactatcgattttgtcattagcagagccactgcagagacttcctgctatgatgaggggcaagaggaaggaggacagagatgttcaaattaaaccaaagccctactgtctgtttctgaagagtttatagtctagtagtataaagagaaatatacatgtaaaatgacatgtggatcatttataaatgagtctccaaaagcacaaaaggcagttactggccgggtgcggtggctcatgcctgtaatcccagactttgggagatggaggtgggcagatcacaagatcaggagatcgagaccatcctggctaacacagtgaaaccccatctctaataaaaatacaaaagattagctgggtgtggtggcacgtgcctgtagtcccagttactcgggaggctgaggcaggagaatcgcttcaacccaggaggcggaggttgcagtgatccaagatcgcaccactgcactccagtctgggaaacagagagagactctgtctcaaaaaaaaaaaaaaaaaatcagttatcttaaccggccatcaggcaaatggatgttctactttcgttcttcctaatcctttccaaatttcacaattatgtttctaaagtaccagccacggggacattgggtgtcattttccctaacacgtttattaccatctgatttttcttagccccttggtttagaaaccagggctgatattcaaggctgcctatcatcagcaatggatgaactgggcttgcctagtagatagccttctccaaagtggacctcctgcccctcctcatattaccatggaaattggtgacccaatgggggtatgggatgaggatgttaacaccaagctccatgctgcttccctttgtggccatttgcagcatggtgctaatgaagatgctgtggatgcagaaaaccgtagtccattgcactgggcaggtgtgtgcaggggactcatgggaacagggctgcagagactacagggtgggaaaggggaggcgtgaggagggaagggcagccagggccaaccaatgaaatggtcggaggggatgttgggtcatagtctgagtaggctttcttcatgcttccccttaacccaaacatcttctccccagcctcctctggctgtgcctcaagtgtgctcctgctgtgtgaccacgaagccttcctggacgtgttggataatgtgagtgtcagatgggcaagtgggcagtgtcctacacagaagggctgctgctctctctcagcttgactggccaacttccatgacctagggctgtgttagcaccacccttctcttccttctcctcctgcttctcctcttcttcctcacagagaggttaagccttatcttctggagagcttctaaccctccaaaagggagtgttcagacccaagatctgggcttttattttttttggacaggtgtgaggggaggggagccggtaggattgtcaagcctctgcagtccctggctgctcatgaacctcttcctacaatctgtgcaggatggacgtacacccctgatgatcgcatcgctgggtgggcacgcagctatctgctcacagctgctgcagcgaggcgcccgagttaatgttacagacaagaatgacaagtgagcccccctcgtctatgcaccccaattcccatgcctgaccaatttagaaagaagccagtgggcaacgtgtgtgtgtgtgtgtttgtgtgtgttggggaagaagtcaggttggtctttgtgttcttgggaacctcattccttcccagtggaggttctgaagagctctgcctgctgccaccaccatcttcatagatagatgaccccagaagtagaatcgacacttctggacccgttggctgaatttactggttgtcaaattatcttttatgcaagaggatccttttttccaataaaaaatgtatgtagaatccctgtgatcccagcactttgggaggccaaggcgggtggatcacgaggtcaagagattgagaccatcctagctaaaatggtgaaaccccatctctactaaaaatacaaaaaattggtcgggcatggtggtgggtgcctgtagtcccagctactcgggaggctgaggcaggagaatggcatgaatccgggaggtggaggttgcagtgagccgagattgcaccactgcactccagcctgggcgagagaggagcgagactccgtctcaaaaaaaaaagtatgtagaaccttgatatacagagcagataaaaatggagctcatccagttggccccctaatttctgttcctgcagctctaaggaatggcatttgaaaagcctagtcctggcctggtgcagtggctcacacctgtaatcccagcactttgggaggctgtggagggtggatcacctgaggtcaggagttcaagaccagcctgaccaacatggagaaaccctgtctctactaaaaatacaaaattagccgggtgtggtggtgcatgcctgtaatcccagctactcgggaggttgaggcaggagaatcgcatgaacctgggaggcagaggttgcagtgagccgagatcatgccattgcactccagcctgggcaacaagagtgaaactccgtctcaaaaaaaaaaaaagagaagtctagtctggtctaatgttggtctgttgttctcctgaccccactgaatgagagcttaccctgtgagtggaatgtctggaaccaggacttctgggttccatgtggaaagtctgtgctcagatttgtctcaacccacagatcggctttgatcctggcctgtgagaaaggcagtgccgaggtggctgaactgctcctgagccacggagctgacgcgggggctgtggacagcacagggcatgatgctctgcactatgctctgcacacacaagacaaggcactgtggaggcacctacagcaggccctgagccggcggcggcggggcggtaaaggcccttgtgtaacttccacgttctctaagaatcagagaagtttcttagagtcccatttgtttccatggaagtaatctatctgacaaataattgtcacctgggttgagagtttacgtatttattgctgctactgtgagaggaccccaaatccccatcccaaaagtatgatcacaaaattctttaatgcagcctggtctctcactgaggacagctctggctagtgttgtttctggcgtttgtgagttgtaattgtacatctatttgtgtgatttgttggtcactctctctttcctctaccagattgtaacccccttaggtgacaggccatttctgttttgctcaccattgaagttccagtgcttattaaagtgctggacatagtgaccaataaataaatgagcgaacaaaatgaatgaagtggcccatttctgggataggaaaccaaagttgctggatagttagggatccactaaacaagattggcttctggcaccaggaagatgtgcagtgagattgatcacagagaggccactcctctcagaaaaagtctgaagataagaatgtgggctggaagtacatggaacctgtcttctctctcattttcctcatatcttttcttataggtcagaggctagtccagcacccagatctcgcatcccaggtaagaccctaagtgcctcccccttttgcttttgacacaccccaggctatcccactgtgactattcctagtggtccttggggtgtcaagacatttaagagaagaaaggcactcctagggctcagttcgttgcctagtggccacactttactattctgtttccaacataggcctctccatctgagccccaggcaggttctcctcctaagagctcatggagagcagagcctgaagaggagcaagaggagaaggaggatgaagacccgtgctcggaggagtggaggtggaagtatgaagaggagcggaggaaagttgttcggctggagcaggagctggtgcaaaagacagaagagtgtaagactcaagctgcagcctatctggaccttgagaaccagattcgagagcaggcgcaggagctaggggtcctcctatcctgggagcccagagcttcaggaaagcaaggctctagtctccggcctggaggggatggcatggagcagggttgtcctaaggacctgctggctgagagtacacaagagctaaagaagcagcagcaggcagcagccacagtaaatccagtattagctccaaagaaggctgaggactcagccccaggaaagatccagtatgaagtccatggaaggtcccaaccagaagaacaggggccaccccagagcccagcgtctgagaccatcaggaaagccacaggacagcaactgactaccaatggggcacagacctttggccctgatcatgctgaccagctgcctgctggtcagaaggagagttcccaggttctaggagttgaaccaggaggcacagtggctgaaccagtgggcccagcagccatgaaccagcttctgcttcaactaagggaggagcttgctgcagtgtggcgagaaaaggatgctgcccggggggctttgtcaagaccggtcatggagggagccctggggactccccgtgctgaggcagcagcagctgcctgggagaagatggaagcccgactggagcgggtgctggcaaggctggaatgggcaaaggcaggactacaggtgaaacctgaggttccttcccaggagtccagagagggagccctaaaggcagccccagggagcatcaaacaggatgaagagaaggagaaaagggttcctggggctcgaggagagcctctaggggcccttggaggggaaaaggccctaggaggcctggcaaagggacagctggagaaggagatgtcagtactgagactgagcaacagtaacttgctggaggagttaggggagttggggcgggagcggcagaggttgcagagggagctacagtccctgagccagcggctgcagcgggagtttgtgcccaagccagaggcgcaggtccagctacagcagttgcgacagagtgtggggctgctgacaaatgaactggccatggagaaggaggccacagagaagctgcggaagctcctggcctcccagagcagcggtctccgagggctgtgggactgcctgcccgcagacctagtgggcgagaggagtgcacaaagcaaagcagcggagtccctggaggagctgcgggcctgcatcagcaccctggtggatcggcaccgggaggcccagcaggtgctggctcggctgcaagaagaaaaccagcagttgcgggggtccttgtccccgtgtagggagccaggcacctccttaaaggccccagcatccccccaagtggccgctctggagcaagacctggggaagctggaggaagagctgcgggcagttcaggccacgatgagcgggaagagccaggagatcggaaagctgaagcagctgctctaccaagccacagaggaagtggctgagctaagggcccgggaggcagccagcctacggcaacacgagaaaactcggggttcgctggtggcccaggctcaggcttggggccaggagctaaaggctctgttggaaaagtataatacggcctgccgggaagtgggtcggctgcgggaggcggtggccgaggagcgccgccggagcggggacctggccgctcaggcagccgaacaagagcgccaggccagcgagatgcgggggcgctccgagcagtttgagaaaacggcagagctgctgaaagagaagatggagcatctcattggggcttgccgagacaaggaagccaaggtgagcagctgaggtagccctggggagcactggggaaagtttctgtgtatttgggagtttactaacctgaatccagcaacctttattgcagcagtgggtcagattaataccccaaacggagcaccagtcctttgcagggaccacactactatgttctcgtgggtctgagggggttggtgagattggaggtgaggtaaggtataagtggaagagagaagggggcttaggtactaaaatttggcacccagattcagaagcagtgtgctcagggctgccaccagtgcagcaccatcgtttattagcatttggacttgaattgcatattagcctgggaagaggcctaatagcatgatgggttgctgtggttttactgaagttctgaggaggtcactcaagaactaatgagttaagaaaagtagacccagcgagagctgctcttctcgcctccacttcagggtgggttctacaaaacgatgtccattggcaaagagggcaccaatgcaaagaaaaaaatcttgaggccgggcgcggtggctcacgcctgtaatcccagcactttgggatgccgaggcgggtggatcacctgaggtcaggggtttgagaccagcctgaccaacatggtgaaacccggtctccactaaaaatacaaaaattagctgggcgtggtgcgggcacctgtaatcccagctactcaggaggctgaggcaggagaatcgcctgaaccagagaggcagaggtagcagtgagccaagattgcaccattgcactccagcctgggtgacacagcaagactctgtctcaaaaaaaaaaaaaaaaaaaaaaaaaaaagaaaaaagaaaagaaagaaagaaagaaagaaaaaaagcttgaaaaccactattagataccagagtttcctaatgcttgctctaaatgtgagtctacatgtttctatgagacatgttttatgaactctaaatatcaatttacacatggatttagtacttccagacttaaccgtgaaatgaatgatttcagacttcttattaaaacttggatacatggtcaaatttagaatgattaaaaaatataaaaaggccgggcatggtggcaaaaattagatgggtgtggtggcatgtgcctgtaatcccagctcccaagaggctgaggcaggagaatcactggaacctgggaggtggaggttgcagtgagccaagatcgcaccactgcactccagtctgggcaacagagcgagactcctccttctcctcaaaaaacgttatatatatatatataaaagaatgtatgttttctatagtgtggagtacataaaaatagaaggaatgttatccagaataggaatcagtgcgggttgaggttaattaaagaaagtatttttatgttgcattgaaggagaagttgaaagtagacaatcgggtgaaagcaaacatagtgtcatggttaagaatgtgttctctggaccaagattgtctgatcttgggcaagttatttaacatctctagtcctcagttttcttatctataaaatgaggataataaaatggttgtgaagattgcattaaataagaaattatatttatttaaaagatttggggctgggtgcggtggctcatgcctgtaatcccagcactttgggaggctgaggcaggcagatcacgaggtcaggagatcgagaccatcctggctaacacggtgaaaccccgtctccactaaaaatacaaaaaaattatccgggcgtggtggtgggcgcctgtactcccagctactcggagaggctgaggcaggagaatggtgtgagcccgggacgtggagcttgcagtgagctgagatcgcgccactgcactccagcctgggcgacagagccagattctgcctcaaaaaaaaaaaaaaaaaaaaatttggaactcttggcccatggtaagtactcagtaaaaggtagctatcattattcctactaccactattcctattactgctagttaccattaactgcatttgtgcctctgcctcaataagccataaggactcatctccatttcccttagtggtcagtagccaggagtaggttaggatctgataccaagttaagagcatcggccaaggagtcaaagagattgtggttcaaatcatgatttcatcacttattagctgtgtgattttgacaaattacttaatttagtctctttatctacaaaacgtagattataatacttccctcaggcggagcacagtggcttatgcctgtaatcccagcactttgggaggccaaggtggatggatcgcctgagcccacgagtttgagaccagcctggacaacatggcaaaaccccaactctacaaaaaaatacaaaaattagctgagtatggtggcatgtgcctgttcctgtgctactcaggaggctgaggttggcttgagcccaggatttagaggttgcagtgagctgagatcacatcactgcactccagcctgggtggcaggtgagaccctgcctccaaacacaaaacaggctgggcgcagtggctcacacctgtaatcccagcactttaggaggctgaggtgggcggatcacctgaggtcaggagttcgagaccagcctggccaacgtagtgaaaccccgcctctactaaaaatacaaaaattatctgagtgtggtggcgcatgcctgtaatcccagcttcttgggaggctgaggcaggagaatcacttgaacctggaggcggatgttgcagtgagcagatggtgtcactgcactctagcctgggtgacagagcaagactcagtctaaaaaacaaacaaacaaaaaaaaacaaaaaaacaaacttccttcagagaagtattgttcctcccggaagaaaagctgttttttttttaaatttttttaagttttcaatgttttatcatattggatagcagctttttttttaattggttacaaaacctaagcccatatacaaaattaggaacacatttagatgcctcttttgaaagaacattttagtctttttaaactgagttttaaaaaaataaaaacaatgcaatttttaaacactgttttgaaaacttaaaagtgcagcaatatagttagtttcctttatctacgaaatggggcaattccaattcagaactggtaaggtcacaaattgaatcaaggaaatgcatacaaatgtctgcactacttgatgctaatgttcacttaaatgttagtttgcactttaaaacatgagaggaaataggaatcatcacagtagaggcccacttttaatcataatgtgtgcaaattttaaaaggtaactgacaagtaaggaaagtccagaagaaactaaactggaaggggtatagttcacaatatcaaaaagatttggacttttaagggtttcaccgaagtttgtgaccttaattagcttttacgttgttattcctacttttagtgaacaccacacagaagaaaagctgttttgagtgttaaatgagacaatttgtataaaattggcacatattaaatactcagtaaaaggaagctgaccttgacccttgtgggagaaatgacttggagcctcattggttgcctctttcctcttggcctcagatcaaggagttgttgaagaagctggagcagctttcagaagaggttctagcaattcggggagaaaatgctcgccttgccctgcagctgcaggtatgttttggctgtcagggatggtgctggagaagaaggtcagcagtggaagtgatgtatatgtgggagacattctaggaattactgagggagacattctaggaattacagaggcctggctaggcagtggtccaggatgggccagtgatgggccaacgagcccacctggtactgctgaccacttcattgtgttgctcctcatgcttgggtgactgagggtggacatgtgacttcccattgatgttcattcccaggattcccagaagaaccatgaagagatcatctccacctacaggaatcatctactgaatgctgctcgggtgagcatggtggagttttgagggaggtatagacataaagctgagtatagggtattgcatttagggtccctctctcttctccagggtccctgtacacacttgctgtttctcggaaagctggatccagtgctaggtctctgatctcatttggtagatcaagagaggttgtgcatgaatgtgagaaggagaggtgtttccccctctgtttcaattctctggcctatagtaaggacttttcctgtccccaataccctttctcagtctcctcctggagccacttagtcctaaacaaggaagaagaggtaggtgtcttgctcccttgttaggaataataactacaaagaatggaacgaacacctattgtgtacctggtgctttgcttcatattcatggttgtaatcctcagagcaatcctgaaaagtagacatcattatcttccctgtgaagatagggaaaaagccatggagaagttaaatactataagtgaaggtatatagtaaataaatagccttccactgtaccacagaacctctccctcacctctctctctccattttctgttcttcatctccttttcttcctttcctgacatctacagggttacatggaacatgaagtgtacaatatcctgctgcaaatccttagcatggaagaggagtgaggcagcctcactgtgtgccctcagggatacgagattctctgttgtgagttgtgggttaagggtgatgagggaaggagtttgggagaaagggcttgggaaaggtgtatggaatgaaattagtcccttttgcccccgtggtggctgacaatggggagccttttggggcatagagcatttgaggtgactgagaagacagaacatggagaatcactgggtggagtcaggaatcagtgagcaggtggactaagggggctgacttatgagatggagactgaaaagaggggttgggtctggggtagggagatgccagtgaaagatgagtgatggtaggatagtggtagacagttgttccttagggcaggactctacaaaatccagaatctcttcactttgataccattcattcaaagagcagtcatcccccaaacctccccccaccccaatgcagatagtccccttctccagtccagatagatgagggtcccttttagcatgttgatatgagtgggaggagactgaggatatggaagtgggtgcatttcatctttgaatttcttctttcagggaataagaaaccctggttgacagaggcttcatcaggctgtggtgggcgggggtgttggccactaggcaatggtatgggcagggcttcacctgacattatggacctcagacctgagaacctggaccctggaatcagcatggatgagaccagaggaggtatggatggaaacaagctctatggaaaataaagcatgaggcaggacggggctgagtgtaattttttttttttctaaaggggagtggggaaaggaatatctttcatccctttattcttttctttttttctggaaacaaatattaacagtatgtctttattcttaaaaacatttttttacaagtagattttttttttgaggcagagtcttgctctgtcgcccaggctggagtgcagtggcatgatctcagctcactgcaacctctgcctcctgggctcaagtgattcttgtgcctcagcctcccaagtagctgggattacaggcatgtgccaccatgcccagggatacaagtagattttgttttttattttgcaaatagactttatttttaaagcagttttaggttcacaacaaaattaagcagaaggtacagagattttcatatattctctgcccccatgcaggcactgcctccccaattatcaatatcctcaccagagtggtttatttgttataattgatgaacctacattgacacattattatcattcagagttcatagtatacattagggttcactcttggtgttagagagtctgttggtttggacacatttatattgacatatatccatcattatgttatcttttttttgtttttgtttgtttgtttgtttgttttgaggcagggtcttactctgctgcccaggctggagtgcagtggcatgatcataactcactgcagcctcaacttcctgggctccagtaatcctccaactcagcctcccaagtagctggggctacaggcgagcaccaccacaactggctgatttttctgtatatttaatagagaccaagttttgccatgttgcccaggctggtctcaaactcctgggctcaagcgatccacctgtcccagctccccaaagtgctggggattacaggcatgagccactgtgcctggccatctctatattatcatacacagtggtttcgctgccctaagaatcctctttgctctgtctgctcatctccccatccctgctaacccctggcaaccactgatctttctcccatccccagttgtgcttagttggaattatacagtatgtatccttttcagactggtttctttgagttagtaatatacatttaaatttcctccatgtctttccatggcttgataactcacttatttttagtaccgaataatattccattgtctgaatgtgtcacaatttatttatccattcacctactgaaggacatcttgattgtttccaagctttggcacttttttttttttttttttttttttagcagagtctcactctatcactcaggctggagtgcagtagggcagtctcagctcactgcaaccgccgcctcctgggttcatgcgattctcctgcttcagcctcccgagtagctgggattacaagtgcatgacgccacatccagctaatttttttctatttttagtagagacggggtttcaccatgttggccaagcagtcttgaactcctgacctcaggtgatccacccacctctgcctcccaaagtgctaggattacaggcttgagccaccatgcctggccttggcaattatttaatttgtttttgaatgaaattcacaaatggccctataagtcagcaactttcaaactttttgatccctagtaagaaataaaaaaaattttttttgaggcagagtctcactctgtcacccaggctggagtgcagtggtgtgatctcagctcactgcatcctctgcctcctgggttcaaggtattctcatgcctcagcctcctgagtagctggaattataggcgtgcaccaccatgcgtggctaagttttgtactttttgaagacacagggttttgccatgttggccaggctggtctcaaactcctgtcctcaagtgattctcctccctaagtactgggattacaggtatgagccactgcatctggccaagaaatacattttgtatcttgtgtatacatagctcgaataatactttactatttctcttctattctttgctaatatactccatcaaaatgcatccactaatgggtcaagacccacggtttgaaaaatagccctcagtgaaaatggggtttgacactcttcctttccactttctcgaatctgtcacagctctaatcttttttctctgccttgggactgttgaatccatgatttttttttttttttttaaggggagattgagagacctggattttcttcaggatatactttctaaagtattttatcaagtgttaaacaatgtgtctatatttgacacacatggtctcactgttctttgtcccaggtgacaaaagggatgaaaagtctgattcctgggtagaggatgaagggatacccaagtttcatttttgcctgtgattccattctcagactgaaaaaaaaaatgtatctctcttggccacttcccctgggtctcctcctctgcctgcccttccaccaggcatgctgttaggtgaaaatgaggcagtgaattcctctaaaatctggaattgcagtttggtggcccgcacgctgatccctccccattccttctctcagtccaccctctgcttggttacactgggtcagacagcagcagttttggcagtaaagaggctgggttgagaaaaaagagtggggaggggctgccatggaagacagggggctacacaagggctgcagaggccagctccagagtttggccaagagtgaaaaagagcatctgagatatctggatcagatcctagagaaggtgcagaggttttacgtggatgggcacgggactgctttacggccaggaaaatggaaaaaggagggattgatggagaaagggggaagaggtgcagctattgaagaaagatcatcaaaagggtctgagtcatttctattaaggggaacagaacctctccttgccttcctgctctcaattaccaatgtatattaaaggactattacatttcttgttatatatgacgtgtggggtggggagaatgaagaaactgtagagagaagggtccagaaagggggagatcattgggctaaactcaagaatgagtcaggaagcagctttggtaatggaagccaggactttggctccctccggggctcctggaaactgattccaggatgggctgagctatgggagtggtgagtgatgttaatgttaacacaggagtagaaacttccttagcccctggttttcccagtctccctccctaaaactccacaaacttacctcaacagccccagtcttaaaatttttcttgagttcataaatttttttccccaaagtagctataatcctaatgttccctttattcctcctgggctctctaatgggacttagcagggacttatgattcctgcttcatctccccaccccattccccaggcttgagatgtaggagtatgtgggtgaaagtaggtgaaacccgatgggccatgatcaggttcagaccatgtttttgaatgccttcaatctggaactttgcttctgattcacagtttccctcctttggtaacattaatttattaaacagatatttaaggagtctactatttgtcaggcactgggaatagagtagaggcagcacagaaaaccttcttatccttttggagcttgcatgcaggataagattcaggttccccggttccgtcatcctgtagggatgctagaacttataacctcaaattaacttttttccaatttattttttctctctttcaataactttagtaacctcaaattaattttttttagatgtattattgctctgtcacccaggctggagtgcagtggtgtgatctcagctcactgtaacctctgcctccctggttcgagtgattctcccacctcagcctcccaagtagctgggactacaggcatgcgccaccacacctggctaagttttgtatttttagtagagatggggtttcactatgttggccaggctggtcttgaactcctgacctcaagtgatctgcctgcctcggcctcccaaaatgttgggattacaggcgtgagccaccatgcctggccttcaaattaacttttttcgtttgtttgtttgttttttgagacggagtcttgctctgtcgccaggctggagtgcagtggcacgatctcagctcactgcaacctcagcctcccgggttcaagcaattcccctgcctcagactcccaagtagctgggattacaggcacacgccaccacgcccggcgaattttttgtattttagtagagacggggtttcactgtgttggccaaaatggtctcgatctcccaacctcatgatccgcccacctcggcctcccaaagtgctgggattacaggcgtgagccaccgtacctggcccaaattaacttttaaaggagattcttccttcatgaaatcactagaactcaaggtgaggttttctcttaaatgtttacagctttatttatttatttatttatttatctagagatggagtcttggtctgtgccaggctggagtgcagtggtgcagtctcggctcactgcaacctctgcctcctgggttcaagcagttctcctgcctcatcctcctgagtagctgaaattacaggcgtgcgctgccacgcctggctaacttttttgtatttttagtagagacagcgtttctccatgttgaccaggctagtctcgaactcccgacctcaggtgatccgcccacttcagcctcccaaagtgctgggattacaggcgtgagccaccgtgcccagcatttacagctttacttattttttattttattttattttatttttttgagacagagtctctgtcgcccaggctggagtgcagtggcgcgatctcggctcactgcaagctccgcctcccgggttcacgccattctcctgcctcaacctctccgagtagctgggactacaggcgcccgccaccacgcccggctaattttttgtatttttagtagagacagggttttaccgtggtctcgatctcctgacctcgtgatccgcccgcctcggcctcccaaagtgctgggattacaagcgtgagccaccgcgcccggccatttacagctttattgacgtacaactgatatacgtcaatatgtctctccatgtaaaatgcatgtatttgaagtatacaatttgatgtgttttcatatgcatatacacccataaaaccattacacaatcgagataatgaacatatccatcacttccgaaagatccccgctttgtctctttttaataatcctccctaccttcctcatcctgcaactactgaaaattcttagaaatacaaactatagtaacttttgatctagaggactgaacagaacaacagcaaaaaagatctcaggacctgatgaagactcaggtgttggaagggagcagctggaatttagaactagttgagtctgagtttagcttgaagcgctcaccaatttgggtagcaaagcagcaaggaaagaacctgagtgttaggagagggtggcatcttccctagggacaaaaaccacaaagtaactgggcctagttccagttcaactggcaccttcaatctttggcctgggtagggtcttatgaggaggattatactgaaggcttaagctaaataaaaggatttttcctatttattaaagcccttttttggtgtgctgattataggtttaacatgtcttgtctctgctgctagactgtgaactcctgcaaggcttttatgtcctcagcacctaatgatccctgataagcactcaaatatttattgaacaaatatgcagccaactataaaatgctgtgagtttctcagtatgtagtgcgggtacatttcccttaagttggtattttctgggtcaggcgcggcggctcacgcctgtaatcccagcactttgggaggccaaggtgaggcgggcgcatcacgaggtcaggagtttgagaccagcctggccaatatggtgaaaccctgtctccactaaaaatacaaaattagccgggcgtggtgacgcaggcctgtaatctcagctattcgggaggctgaggtaggagaattgcttgaacccggggggcggaggttgcagtgagccaagtcgcgccactgcactccagcctgggtgacagagtgagacttggtccccccccaaaaaaataaaaaaataggtatttccatggatacagaaacagatttaatttggtgcctgcatgtgagtgatcagcttggttgggatggggcctctggagggtccaaggctttggaggaaggagagtgggtaggcagttcagagagggacagaaagatcccttttgtgggtaagaaaacccctctgttcatcttcagctacaccaaaggtatgggggctctggtggaggtattctgcacgtgtatctagggtagttactgttaggtacactttggattcagtaccccaggctttgccctagggagggacagttgtcatttcaaggaagactgctttatactgtcagatacctggttcacaccggcttagcagcagtgtgccaccaccccaatcccatacgtaagcgttgaggggtcacagaggtagtgagaatgatgggatccaaggatctcgtctctccagatccactcacaccaggagttaatctctccaacgtcgagctctgagtccctccctctctcgcccgagctccgccccccttccctcttggcggtcctggcgggcttcccctggagggggcggccccagcccgagcgctaggcggggcggagctccggcccgggcggagccgcggccgccgcgtccggctgctggaccgaacttctgccgtgcggacagcaggagcagcgccgagccccattcccccacctctccagctcgccctctgagcctcccgagccctctctccatttcccacaattgtgctggtaagtcccgctccccgcaccaaacttttttttgctgccgagtttgagtcctacgatcggaccacgagctgcactgtagttggtgtatgggggaggaggagagggtgaattactgaatgccgactccacggcttccctaagacggatcagcgctcgcccatttcccgagttggaagacctctcgattttagttgattaaacttatgcagagatggagatgagggtttgcgctccaacttcgctaccccctcccccatttctctgagctctagcagttcccgatactttccctccatctttcaagtatctttggctccctaaaagcttgtcccctcccaactctgccgtggcaaagcccccctccaccaggcacttcgggcccgcctcctccccgttgccctagggaccccgcgatcttgggggccatacactccctccggggctacgcgtcctgccaaccggccgcagacgtgtagctgctgggtcggctgtggagggaggggctcaggctggggcttgtccgaagccaggcgggcggggccgggaaggggaggtatagggggccggactgggcggagcaggcggcatttgcggccggcgccagggtggagagttgtgcgccggtccctgggcctgagctccggctccggctggggcgcctgcgatgtctcaagatggcggagctgggcgaattaaaggtaccggccccctccccccatccccatctggactcagcccggcggtacgccgtgtccgggaagcgaccgagactgggtgccggggctcgggtgggcgccgacgacgtggcaggcacgagctgctgaggatgggagagaagtagctgagagcgaggaaggggctgcggcggggctccgggggcggggctgcggggcagatgtaggggtggggccgaggggaattgcagctgttgggggctgaggcgcagggggcggggacgaggggtagaagtcggatttagtagtaggggcggttgttggggtagggccagggggaaaaggtgctgtagaggcactgggggcgagtcgatcaaggccaagagatgcaacagtagggggcacatgcagggatgggaccgcggggcagacgtaggggaggctccgggggaaaggcagctgagaggatagggtctttggggtactctcgggatccgagctttgggaaataccagtaggctgctgagatgcagggggcggggctgtgcgggccgatacctcgaggggtggggcagaagcatcctggaggctcagaggaaggtcctgccgtagtgaatcgcggtgtttgggaagaggcagaggcatgtgaaactatgggatagaaaggtgggaagttataggggaagctaatggagaaaaaaagacaggacagaggagataaggatggggagaaagaggagcaagtttctcatcacattccataaaaggggtccaagacaaagcctcctatgagaagaattgtgtagggctagcaagccctgcacatgacaggatctcctagagattcacagaagggagtcttctaaggagagcgctcccctcctgctacatagagtttggagggtgaccacatctgaggacatctcatagaacctcaaactaccgagttcatccgcctgcctcctggttttcttctgccctttgaaatgggagctatggtcctgggaaggctggaggtctagccactgggcccagctaccttcaggggatttgcgattctgtgccctgactcagaggcttttccttcatccacccagggtctctgtttagagctctgccctctcctcttccacccctataggggggcgctgtaagttgtagaggagtattaatttctctgtgtaggagagatgccagattatggttcctggcagatagagtaaacaggcaggatacttggactcagtgattcactgttaatctccccgacccaagttttggtcctgtttcccttccagaaaaataggactaagttgtggggagggggtggttatataaacgattccaagaaaggatctggggaagttatgagcattgaaccctgacctgaaaaccctggccacagaagcttcagaggcttgggggaaatagctgaggtgaattaaggtggttgggaggggtgggctgaagggcacaatcctccagccacctagcccctttcttcccctggggctgtctggcttgaatcctcttgtctctccctccttctccctgtctcctatcctgttcccaggaggctgggatgggtttgagagtctgagaaagggcaagagaggagataagcagcttaaagcagagtccagggatggaggcgggaggctgcatggactcggaggtgtgtctgagggtggcttgctgtctgccattccctgccccactctggctgcttccaggcctggggaaatagtgttgctcaagctcgggggtggtggtgatgatgctgacctgatggttgctaaagtgggactgagatgtccctttggataggtcgactacctggcagtaatccactagctgcgaagcatcatctttcccatcagtgctggagagaaaggcactgcccacctggtagctcagcccatgtcttggcagggcaggcctgtgcaagggaggatgctcaagcttctctgtttttctccacagcacatggtgatgagtttccgggtgtctgagctccaggtgcttcttggctttgctggccggaacaagagtggacggaagcacgagctcctggccaaggctctgcacctcctgaagtccagctgtgcccctagtgtccagatgaagatcaaagagctttaccgacgacgctttccccggaagaccctggggccctctgatctctcccttctctctttgccccctggcacctctcctgtaggctcccctggtcctctagctcccattcccccaacgctgttggcccctggcaccctgctgggccccaagcgtgaggtggacatgcacccccctctgccccagcctgtgcaccctgatgtcaccatgaaaccattgcccttctatgaagtctatggggagctcatccggcccaccacccttggtatggctctttgtggtcccttagtcttctggactccctacctgttccccaaacatttcttaggctttagtcctatgggatcagtgacctgggatgggggcgatttctgtggctgcctgtgcatgggcttggaataactgcccctttgtatcctcagcatccacttctagccagcggtttgaggaagcgcactttacctttgccctcacaccccagcaagtgcagcagattcttacatccaggtacatctcttccagtcttcctgcctcatccctggtctctgctttctgactttcttctcttctgccctgtgctcttccctatccctcctcctatacctacttgtctcttgttcttctgtgtgtctcttctctatctcctggacatctgactttcagcctttctgtgcattcacccttgccctctgggggctacatgctgacatctcttcatctccctccctgttacagagaggttctgccaggagccaaatgtgattataccatacaggtgcagctaaggtgagttcatcctccctgcctatcctgggtacccactgggggtaggagtgaagtaggggtatgacagatacccttacgagatgtccctgctctgccactgcctactgcagccctgcgactcttgttggatgctgagggcttcaggcatctatgactgattttctggggttccctgtctctctgccagattcaagttaagaaatttcttcccactctttcttcctttctcatctcttaccaggttctgtctctgtgagaccagctgcccccaggaagattattttccccccaacctctttgtcaaggtcaatgggaaactgtgccccctgccggtaaatgctctccccttcttctgtcagtaatcccttaccgtttcagttcataaatattaactacaaacctattctgaaagagacatgcctagcacagtgcgtggcacatagtaggtgctcagtttactgactgaatcaatagaatctcgagagtattaagatagggctgaacaaaggttttgtgagaactcggaggaggacattagttcaacccgagatgtaagaaagacttcttttttgttttttttttttgagacagagtcactcgctctgtcactcaggctggagtgcaatggtgcaatctctgctcactgcaacctctgcctccctagttcaagcaattctcttgcctcagcctcccaagtagctgggattacaggtgcccaccaccctgcccggctaatttttgtatttttagtagagacggagttttaccatgttagctaggctggtctcgaactcctgacctcaggtgatccacccacctcggcttcctaaagtgctgggattacaggcatgagccagtacacccggccagaaagacttgaccccagagctgagagttagaaaaggtgaggcatccttattcctcctcctcagggactcagtgagttccttttttctcagtcaataaataagctctcctttctccccaggagtgaaccccacacataaccctagacagtgctccagttttgtgagccactgaatgggcctccatccccttggtcagtgagtgagcgagttggccttccctccagggattgaataacccgagacaagatatcttttgttcaaagagcagagccccttcccagagccacttctccactgaccaatccctcccttctccagggttaccttcccccaaccaagaatggggccgagcccaagaggcccagccgccccatcaacatcacacccctggctcgactctcagccactgttcccaacaccattgtggtcaattggtcatctgagttcggacgggtgagcacagctaaagcaggtgcctggaaaagcctgctgagggtgaaggggaaccatccagtgtcctgggttggggaagcattttcctctttatgagtctgtctctggtcctcatggaacaaaagtgggcagtggtggtatgagaagcagaggctaattgtctaccccctgcctccaagtagaattactccttgtctgtgtacctggtgaggcagttgactgcaggaacccttctacaaaaactcagagcaaagggtatccggaacccagaccactcgcgggcactgagtgagtaacatctttcctctcttccccacctgatctggattcaagtcttcctggccctccagccttcataattaaacccatacctcttttttgacaacttactccccttctcacatgaaccccaaccctccccctctacccctgaccagtcttccagtctttatagttgaagttggaccactcccaggcacccttgaatttccaatcatgtatctgctttgcacctcacagtccctaactccagccctgctagaatatgggctctccggactggaaagaatcttaggggtcctctaatctaaccctcacatgatgcttcaactcctccagatcatctctaacatagccagagtgtcacgctatgtttaagcatcttcagggatgggaaaatcccccacacccagccttcatcatccatatcccagaccacttccatgtgacgtcccactggcccccaaagacgctccacccagcagcctctcagccagagccatctgttcctggccttaccaactcctgggcttcctccagccttgctgaccccatggctctggcctcacttttgtttcagtcaaggagaaattgactgctgaccctgacagtgaggtggccactacaagtctccgggtgtcactcatgtgcccggtgggtaaaaggggagaagggaacagggtgggaagggagttgggtttagcctgtggactttgatgagggttcctagggatactggcgtgaagttttctgggatgaaatcagagtagggcctctgacaagagaacttgcttctcctcagctagggaagatgcgcctgactgtcccttgtcgtgccctcacctgcgcccacctgcagagcttcgatgctgccctttatctacagatgaatgagaagaagcctacatggacatgtcctgtgtgtgacaagaaggctccctatgaatctcttatcattgatgggtagggccattttgcttcctcttacctaggacatccactagaacctcttttcttggttatttctttttctttttcttttcttttttttttttttgagatggaatcttactctgttccccaggctggagtgcagtggcacaatcttggctcactgcaacctccacctcccgggttcaggcgatactcctgcctcagcctcctgagtagctgggattacaggcacccaccaccatgcctggctaatttttgtatttttagtaaagactgggtttcaccatgttggccaggctggtcttgaactcctgacctcaggtgatctgcccacttcagcctcctaaagtgctgggattacaggcatgagacaacatgcccagcctataatatttcttttttcttttagccaccacctccttcagggtttttaattcatatggcttacttcccctcacatgaactgcaattctcaccttatctatcccttttaccagtctgtgtgtgtgtgtgtgtatgtgcatgtgtgtggagggggagggcaacattaaggacttagtatatacaaggcatcttgctgagcactttgcatgagttatctcattgaatcctcacaataaccctatggactcggctcctacctgtaattccaacactggaaggctgagatgggaagatcatttgaggctaggagtttgagaccagcctgggcaacatagtagaccctctctctataaaaaattaaaaaaattagccaggcatgttataatagctcatgactgtagtcttagctgctcaggaggctgaggcaggaggatggcttgaacccaggagtttgaggctgcagtgagctatgattgcattactgcaccccagcctgggcaacagattgagaccctgtctcaaaaaaagaaataatcctatgattggctagtgacactcacccagaaaaaaaaaaagaaaaaaaaaaaccctatgagataggtagtatcattacacatgaggaaactgaggccgagagagattgagccttgctcaaggttatattgttaagtggcagagccagtgtactgaactgtcataatatatcacctataacaactacctgacttcccactgagcattgcaataaggttcttttcagggcctggatgttctaatcttttgatcttgctagtcttaacctctttttggaatctacattatggttcctgttcccagtgctcccccactttttgtttgtttgtttgtttttgagacagggtctcgttctgttgcccagactggagtatagtagcacaatcatagctcactgcagcctcgacctcctggcctcaagtgatcctcccaccttggcctcccaaagtgctaggattgcaggcatgagctaccatgcctggcccctagtgcctttatttatttatttttacacaagtgtttagaaagccaaagacccagtgccttttggagatggtttatggacttctgtgtctctgctccttttgttccttatactacacgtaagtgctcagattttttttttttttttttttgagacggtgtttcactctgtcacccaggctggagtggtatggcacagtctcgtgatctcagctcatgcaacctctgcctcctgggttcaagcaattctcctgcctcagcctcctgagtagctgggattacaggcatgtgccgccacatccggctaattttgtatttttggtagagatggggtttcaccatgttggccaggctggtctcgaactcctgacctcaggtgatccacccacctcagtctctgaaagtgtgattataggcgtgagccaccacgccggctttttttttttttttttttttgaggcagagccttgctctgtttcccagggtggagaacagtggtgtggtctaggctcactgcaacctctgcctcctgggttcaagcgattctcgtgcctcagcctcctaagtagctgggattataggcatgtgccaccacacctggctaatttttgtatttttagtagagatgaggtttcaccatgttggccaggctggtcttgaactcccagcctcaagtgattcacctgcctgtacctcccaaagtgctgggattaaaggcgtgagccactgcacccagcctcagattgtatttattttaaaacctattacttactttgcaaagctcttttacataccttgtgttatttgattccaacaactcagagcggtccagtaggatggataatgttcttattttacagatgaggaaactgagatacaggaaggtgagttacagaactctggctactgttctgctcatctcccagccccgtgaattttcatctctctcttcccccagtttatttatggagattcttagttcctgttcagattgtgatgagatccaattcatggaagatggatcctggtgcccaatgaaacccaagaaggaggcatctgaggtttgccccccgccagggtatgggctggatggtgagtgaccccctgttccccagctaagctaaatcttggatggcctcttctctgagacgtagtcttcttaatacccacaggcctccagtacagcccagtccaggggggagatccatcagagaataagaagaaggtcgaagttattgacttgacaatagaaagctcatcagatgaggaggatctgccccctaccaagaagcactgttctgtcacctcagctgccatcccggccctacctggaagcaaagggtatgagaaaataggctgagtctacagcaaaacggacaggggaagaagtcaggattgctttctgatcattggacaaagcctggggcaagagaaatgtggaggggacagagagggaacctggggacctgagctgggtgagggcatctgtggtttgctggctgcctcagctcctctctacccacagagtcctgacatctggccaccagccatcctcggtgctaaggagccctgctatgggcacgttgggtggggatttcctgtccagtctcccactacatgagtacccacctgccttcccactgggagccgacatccaaggtatgacatgggtcataagatggaccctgcactgccacaccctccccagagctacatcagaacccctgttccttctcaaagcctcctgcttctcctgcaaggggccacagtccacagtgctttgtcttttggtggtaaaggggtcagataggaggttaattttgatttttcttttcctgccaggtttagatttattttcatttcttcagacagagagtcaggtaagtggttctttcttcagaaggtctcagatctctgaagcttcctttctagacactgatggggcccctccctctcttatgatctctggggatgtaaatctgctttcccgtgagggcagtggggtgtaggtatcttattatctcctcagccccactggtagttcctgagattcctacttaggcctccttcctagatcccctgttacttttctgccctggcctactcacccctacccccgtgtgcacttagagcaccatgcctgctctaaccggacattccacacatttcagacgcccacaaagccaagaacctaacaagttggaggagctctctcaaggcagggaaaggggaagggtgtagggaagtaggggaaagagggagaggctctcctgcttctcaagagaataccttcggatccacaggggttgattgctctcatacggcatttctgagatgagtgactgggaggtggggaagtcaggattgagatcttaaactatgcccttgattcttcctagcactatggcccctctgtcatcacctcactagatgaacaggatgcccttggccacttcttccagtaccgagggaccccttctcactttctgggcccactggcccccacgctggggagctcccactgcagcgccactccggcgccccctcctggccgtgtcagcagcattgtggcccctgggggggccttgagggaggggcatggaggacccctgccctcaggtccctctttgactggctgtcggtcagacatcatttccctggactgagttccctggattatggaaacttcgctgtcccccaacactgagcaagtatgctgtggagtcccaaccccagctactctgatccctctgggggctctggccaagggccagacagaccttcacagatgcctacttttggcctcatctctgcctgacaaggccagcacccaaagggttaatatttaacctctttttaaggacactggggtctgtttctggaaatgttctttagatggtggcacattcctttgggtatgttaacctaggcagtgggaggcaaatgggatggtatgtgagctaggagaagggctgaaccctcagccttgactatgtctagagcctcttggggaaggggcacctctcttgaaccccaaatgctctctcttcttattacccaaacccatggctctatttcttcttcacatccattgtctcttcatgtctattccattcccttcggccaaacagacaggtggaaaaactgagacaggcagtttcagagatggacagagaactttattttggattgtggatgtggacttttttgtacataaataagaaaaaccaaaatactccaaagatgacttcccctgcctcctactccagtatgacagaggaggatgtaaggccttagccatgatctgcaggggtctgggagtcaggcccggcctattgcttgggtctctctccatttatatatctaagttcacagtgtttcttattcccccctaagcttctagaggctcatggccctgtagttaggcctggctcattctgcaccttgccagggaggtggaaggaccctgtgccctccttcccaatcttctttttcaggctcgccaaggcctaggacctatgttgtaattttactttttatttctaaagttgtagtgaagctctcacccataataaaggttgtgaatgttctgtgagtgtcatggagatgggctagggaggggattttacacttcactttccagacccctggtttgggggaagagggtccatgttccattcttcctttgctggccctgggtccaggtaagctgcacttttacacggtgggggtgttctgtggaggaattccaagagaggttgtcctttcctgctttcccccgtgcctgtaaaaactagaccattccagcccagtactgtggagctctccagtcctttttcacttttacctgcccagatgttgcagccagagcttgagggcaaacttggttccagtgctgactctctctttgtcctctgccatggttgggatcatccgcaggagggtggacatgtgcaggaccagaggtcgggctcttccatcctcctctagttccactgcactgcatggtgacaactcctgttggggctgtgccttgtagcttacaaagaacttacatatatgttaggtccccgaatcctcccaactaccacaggaggtgggtgggtgttgacctcatttgcagaaaggaaacaggttcaaggagggttaaatgacttgcccctgtgttagaactgacacttagaccttcaatgctagccagttagagcaagaatctttggggtttgatggtcagtgtcttagatttcatgtaccttcttaattatcagctgacccactctccttaaatctcccccacaacacaaaattccatcctgaggacaggatagacgctgaacttctcaacatgaatatgttggtgtattagaggctgagggagaagctcttacttacaggacagagggtggtaggtcctgggggagaagtccgggtgtctctgtcccatcctctgcggcagccactgcagcagctacatctggtgtcagccacataagggcgctcacctcatttgggtttggttggatccgggcctggggtcagacatggtgacccctcagtcattgcctctccctgggctgcctgttcgtgatcaaaacctacccgcaggtttcatggagaaaggcaggagcaaggggaaagggcattgcatattcttcgttatctctgactacccccgccacccccgcccagctcctaatcacagtcagaaccaggttgcttgggctcccctgagccctgtttccttccctcactgccagccctacctgcaactgctgctgtgattcctgggagatcacgagtagatacagaacaatgtgatggtatttgggtaaaccccagctcagcctaggagggtaggcagactaggaaaagaaaacagcaaaagtgagaactttccgtcactttttttttttttttaagatggagtttcgctcttgtcgcccaggctggcatgcaatggcgtgatcttggctcactgcaacctctgcctcctgggttcaagcaattctccagcctcagcctccagagtagctgggattacaggcgcctgccgccacgcccagctaaaatttttgtatttttagtagagacggggtttcgccatgttgtccaggctggtctcaaacttctgacctcaggtgatccgcccacctcagcctcccaaagtgttgggattacaggcgtgagccaccgcacccggccctttgtgtcactttttgagactttgttaatacagctttagggtgaaacaaaatggtggccaaaagctgagggcgtggatggtacagatgacacagcagggacatgggtgagggttatggatttggggattccagcccacttatgtgctattgtttcccttgtagccaaggcaggtaggggctgatctatggaggagcttctcccagctacttgtctcacctcccataaacccagagggacccaagagaactggccctggggcaggtgtagtccactctcctcccaaagttctcgaagccctccgtccagcagctgggagtcagagaagacacatcagaggggccagtgcctgactcttccaag

SEQ ID NO: 5624 - DNA, 68992 bp, Homo sapiens
  LOC391105 gene - 154408132 - 154437123 of chr1; NCBI Entrez Gene ID: 391105; Build 35; sequence includes 20,000 bases upstream of initiation codon and 20,000 bases downstream of termination codon of the gene
tactcatcaaactgttgaaagtggttatttctggttgataatgaacagtatttattattatctattcaaactttgatttcttatagtgctatgttgacaaaagttttgggaaacagacagttactcactctgcaggtggaagagtaattactaagtcttttttggcaatcagcaacaatattcttaaatgtgcatccctttagccctttaattctacccaagattgttgataataaagaaaaagttggttctgtataaattatatcagcggaaaattggttaaataaattatggtacatccataatatgtagactgttatcactatataattatataactagaaagtccaaaaaagtcaaacaaaaaggttaaagtgttgaaaagtgttgataaactaataaaaattaattatatccatacatgccagttgtaagttgtaggaaattcaattgcttttaaaaaggagataacatttatgacaataataaagatgattacatttctagaagttcatatacagaaaataaacaataaataataacatccaaaaataagaaataaaggaaaccctgaactaagatagaaaaatatctcagttattttaaaaagaagacctacacatggccaatgaacatataaaagtgttagacatcactaatcattaaagaaatgcaaatcaaaaccaccatgagataccacctcaccctaggcagaatggctattaataaaaaatcaaaaaataacagatgctggtgaggttgtggaaaaaagaaaatgcttatacactgctggtggaaatgtaaattagttcagccattgtggaaagcagtttggtaatttctcaaataacttagaacagaattaccatttgaacaagcagtcccattactgggtatatacccaaaggaatataaatcattccaccagaaagacacatgcacatgtatgttcactgcagcactatacacaataacaaagacatggaatcaacctaaatgcccatcaacagtagactggataaaaataaaaatgtggtacatataataatggaatactatgcacccataaaaaagaatgagatcatgtcgtttgtagcaacatggatggagctggaggtcattatcctgggtaaacaaacacaggaagagaaaaccaaataccacctgttctcacttataagtgggggctaaattttgagtacatatggacacaaagaagggaaaaacagacaccagggcccacttgaggttggaggttgggaggaggctgaggattgaaaaagaacctgttgggtactatgcttatcacctaagtgacaaaataatctgtattccaaatccctaagacatgcaatttacctatatagcagacctgtgcatgtacccctgaacctgaaataaaagttagaaaaaatatgaagctaaaaaaaatttaaagaacaaaatatatcctggttcttacctgagataattaatgataacaaaatgtcttcatctcatatatttaatatagctgaaattgatattagaaattaaaaaataagatttcaaagggaaataaacatataaacagagccattctgttattcaagcaatattcccaagactttctattttttccaagacgcttgactgagaagagggtgtccagagttgccaacacaactcctctgttcattgggaaaaaattctcaattatacttgaaaaggatagttcttttggctgggcacagtggctcacgtctgtaatccccgaactttgggaggcagagttgggcagatcacctgaggtcaggagttcaagaccagcctggccaatacagtgaaaccccgtctctataataatacaaaaattagccgggcgtggtggtgggagcctgtaatcccagctactctggaggctgaggcaggagaactgcttgaacccaggaggcagaggttgtaatgagtcaagatcttgccactgcattccagcctgggcagcaagagcaaaactccatcaaaaaaaaaagaaaagaaaagaaaagaaaaagaatagttctttctataaattagtctatcatgaattttactccacacaatctggtcatttttctctgaatggataaagccaagccccaaatctaccaaagttgagcacacactatgagtcatgtactatattgagtttttatatacataagtgctgtgaatatagtccatgactcatagactcacaaaagattccaagagttcagtattataatacctatttaaagatgagactgaggctcaggtagtttaaatagttcaaccaatagtttatcatatgcaaagtaaagcaaaatccaaacccatatttgaccaactctgaaatctgtgctctacgttgtcacactacattgccttctagttacaaggatgatactagaattcaaaaggaccaaacgattttatggaaggagaacgttatgcagtttactaaacaactggcttaagcatgtgtaaatgatattcaagattgttctattatgaacctctaacccttcccaataaacacaatgcaggttctcttctttcattgtcttggttttgcattgttcattgatcctttatttcttccctcagtgatcattttgtatgcaatttgcatcaaaatgacttttcccttctgtcaggattttaatgttacttgcaaaacaaattcttattcactgtgtttaaaattgctcaaagtacagaaactttatcaagtctgtttttagaggtttgctttcctgagatgtcaatgttagtagaaatattggtgtctctgcagtaatttgtgtctctgtttatcaacatatatactatttcttcattaaatatacatcacaaccaacaagtttttaaaaaataattctatttaatggagagtgagcttctaagtagtctgattaaataaacacatagatatgtaggtgatagatgattaatgataaagaagatagatgatgatgatgatgatgaagatagatagatagatagatagatagatagatagatagatagatacatgcatacatacatacatacatacgtacatacaggtagatctgcacaaaagttgtggtctctgaaatatctcctctgtcacaggatcaatcatttccccccacctgtagcatctcagttttattccttaacttcagcactcactatttgaaagctactgaagcatcagcactaagctggcaggagatgtatagatgcaaaacatcaaccaataggctcaaaaaaagacattcttcccattgctcaaaagactcctcatctattcttcaattgactgacgtacattgagtaactagcattgaaaagataaataaaacaaaatccccctctgtgcttaagttttgggaaaatggacagaattacttttatttataatttcctctgaggtagaaaggaataactgaaattgttagcctgtatcacttgatatcacactaaattttttttagctttgagaaaaatgaatcttaagaagctaataagttcactgatgaccaataaacatcaactgatacaatttatcaacatcactcattttacatcagccattgttcatgactttatgtaaacaacactagaatgctttgaaaaccttaaaaataattcaaatattgaagtatgaagtgtatttcaaattttatggcttttctatttggtatcaatagcttagacaacagaaagtataatgcatataaaaatgcaatctactttgaagtttttaatattaggcaaatgaattcaactagcaaactaattcactgaggaaaaatttacttcttcttaaaaaggaaaatatatatatattttaattttataatagggccccatatgtcttgtttccagattgaaaggtggaaaatacaatccagaaatgtgggtgtggcctttagaaggattaaggaattcaagtggaatctatatgtgcttcaaatttgctccaaactttttcctcctggaggccccaggaaagataaagctattttataacaatagcccatcagcgtggactccctgaaaggtcctttgaaggacaggcacaaacaaagccagactgcaaagactaaaatgaatacccagtatatcaatgtgcagatatcatcacacttccataaagataaaaaacattctgggaagtatgacctcaccaaatagataaaataaggtgccagagactgacctaaagtgatggagatgtgtgatctctcaaagaaacaattcaaaatagctaatttaataaagctccaaaaacttccggaaaacagagaattgactcagtaactcatcagagaaatttaacagagtaattgaaataattttaaaaaatcaaacagaaattatagagctgaaaactacaacaaattaaataaaaaatgctatagggagcatcaacagcagaattagtcaaacagaagaaagaattagtgagcttgaaaacagactatttgaaaatagaagagaaaaaagaaaaaaacaatgaccaaaacttaaaggagctttgagaccaaatcaaaaaagcaaatattcaggttattggagtgaaggagggaactgagaaaacaaagaggcagaaagtttattgaaataaataataacagaaaactttccaaacttggagaaagatataaatatcaggtacaggatgttcaaagatcacaaaccagattcaactcaaataagaataccccaagacatattataatcaaattctcaaaggtcaaagacaaagagagaatcctgaaagcagtaaaagaaaagaagcaaatagcatatgagggagaagcaacatgtctggcagggaacttcctcagcaaaaatcatacaggacaggataaagtgggaccttatagtcaaagtgctgagagaaaaaagttgccaaccaagaatcctgtacccagcaaagttatcaataagaaatgaaagagaaggccaagcatggtggctcacagctgtaatcccagcactttgggaggccaaggtgggcggatcacaaggtcaggagttcgagaccagcctggccaatatggggaaaccctgtctctaataaaaatacaaaaattagccaggcacggtggcatgcgcctgtagtcccagctactcaggaggctgagtcaggagaattgcttgaactagggaggcagaggttgcagtgagccaagatcgcaccactgcactccagcctggacaacagagtgagacactaccgcaaaaaaaaaaaaagcaatataaaagaaaagaaatgaaagagcaacactttctcaaacaaacaaaaactgaggaaagttatcagtatcagaactgtctacaaaaaaaaatgcttcagagagttctttaaaccaaaagaaaaggatgctaatgtgattgctatgctaatacaattgttgtatttgaacaacgtgtatacttagtaagagactaaaagacaaaaccgttaagaataataactttaacaatcatataagagatatgcaatataaaaaatgtaagatgtacatcaaaaaaccaaaatgtgggggcaagaagggagttaatgtgtatagatttttttgtttctttcttttatctttttggtgatcaaagttaagttgatatcagtcttaaatatttgctgtaactgtgggatgttttttgcaagccccatggtaaccataaagcaaaaacctgtaatagatatattaaaaataaaaagcaatgaatgaaaacatgctgccatggaaaatcatttaagcacaaaggaatactgtataaaagaaaagaaggaagggaggagttagaaaacaagtaacaacatggcagtaataagtccttacctatcaataataacattaaatataagcgagatgtacattaaatgtaattggagaattaaatgtaattctccaattataaaacatagagttgctgagtggattaaaaaggaagtgactttcacttttatatgtgaccttcaagaaactcatttcacctatagattgaaagtgagaagacgtaaaaagatattccatgcaaattaaaacaaaaaaaaggcaggagtagttacacttatatgagatatagtagactttaacttaaatactgtaaaaagagaaaagggtggtcactatataatgaaaaaatggtcaattccacaagaggatataaaaattataaacatctaggcacccaacactggagctcccgagtacataaagcagacaacaatagatctaaagggagaaatagacttcaatatattagcagtagaggacattaacactccaatttcagtagtgaacagattatccaaacagaaaatcaacaaagaaacatcagagtaaaactacacactagacataataataggcccaactgacatttacagaacatttcaccacctgctacagaatacaaattcttttcatcagttcctggaacatcctccagaatagaccatttcttaggccagaaaataagtttttttgtttttttttttttttttgagatggagtctcgctgtcgcccaggctggagtgcagtggcgcgatctcggctcactgcaggctccgccccctggggttcacgccattctcctgcctcagcctcccgagtagctgggactacaggcgcccgccacctcgcccggctaattttttgtatttttagtagagacggggtttcaccgtgttagctaggatggtctcgatctcctgacctcgtgatccacccgccttggcctcccaaagtgctgggattacaggcgtgagccaccgtgcccggcccagaaaataagttttaacaaattcaaaaaagcagaaattatatcaaacatattttatgaccacaatggaataaaactagaaatcaataacaagagaaatcttgaaaacttcacaaacacatggaaattaaacaataagctcttcaatgaccagtgaagaaattaagaagaaaattttaaaatttcttgaaataaattaaagtggaaatgcaacatacgaaagtccatggaatacagcaaaagctatattaagaaggaagtttatataaagaaatacttacatcaaaaaacttgagacttcaaataaaaaactaacaatgcatgtaaagatacgagaaaagcaagaacaaaccaaacacaaaattagtgaagaaaagaaacaataaagatcaaaggagaaataaatgaaattgatactaaaaaaatacagaagattaacaaaatcaaaagttatctttttgggttttttttttttttttttttttttttttgctttttgttttctttctgaaacaaggtcttgctttgatgaccaggcaacaaagtgcagtggtccagtcacagctcactgtcgcctatatctgctgggctcgagagcctctcaccttggcctcccaagtagctgggaccagaggtatgagccaccacacttgactattattatttttcttttagagatggggtctcaatatgttgcccaggctggtctcaaactcctgggctctagtgatccttccacctcagcgtctcaaagtgttgggattacaggcatgaaccaccatgcctggacacctttctgaaaagataaacaaaaaaagataaacctttacctagactaaaaaaaagagaaaatacccaaaagagtaaaatcagaaattaaaaaggagacataacaattgagaccaaaaaataccaagtattgttagagactattatgtacaaccacatatcaacaaattggaaaacctataaaaaaacagacgaatttctggacacgtacaacctaccaatacagaaccatgaaaaaatagaaaatcaaataagccaataatgagtaatgagattgaagtcataatagtctcccatcgaagaaaagctcaggacccgatggcttcattgctgaattctaccaaatacttaaagaaaaactaatatcaattttattcaaactcttcaaaaaaattaaagaggacagaatactttcaaactcattctacaaggccagtattaccccaatgccaaaaccagacaagaacacagcaaaaaagaaaactacaggccaatatctctgatgaaaatagatgtgaaaattctccacaaaataataacaaacagaattcagcaacacattagaaagataattcaccatcattaaattggatttgtcctagagatgcaaggatggttcaacatacaaaaatcaataaatgtgatatcaaattaatagagtcaagaacaaaaaccataagattatctcaatagatgcagaaaaaggatttgaaaaaattcaacattacttttttataaaagctcttataaaacaaaatatagaagaatatatctcaaactaataaaggccacatgtgacaaaccagcaactaacactgtactgaactgggaaaaattaaaagccttttgtctaagatctagaacaagacaagaatgcccacttttaccacttttatttaacatgtaccagaagtcctgtcggagtaattagtcaagagaaaaaaaggaaaaaaaaagaaaggaagaaaggaaggaaggaaggaaggggaaaagaaaaggaaggaaagaaagaaagaaggaaagaaagaaagaaagaaagaaagaaagaaagaaagaaagaaagaaagaaagaaagaaagaaagagaaagaaagaaaagaaagaaagaaaactgttatagccgataaatgaattcagtaaagttacaggatataaaaccaacacagaaatattagaaaagtagcattgctatatgccaacagcaaacaatctaaaaaagaaatcaagaaagaaatcaaatttacaataggtacaaagaatataaaacatataaaaatcaatttagccaaataagtaaaagatctatacaaagaaaactaaaaaatattttattgaggttttttgcgtcgatgttcatcaggaatattggcctgaaattttcttttttgtcgtgtctctgccaggtttttgtatcaggttgatgctggcctcataaaatgagttagggaggagtccctctttttctattgtttggaataatttcagaaggaaaccagctcccctttgacttctggtagaattcggctgtgaatccgtcttgtcctgagctttttttggttggtaggctattaattactgcctcaatttcagaacttgttgttggtctattcagggatttggcttcttcctggtttagtcttgggagggtgtatgtgtccaggagtttatccatttcttctagattttctagtttatttgcatagaggtgtttatagttttctctgacggtagtttgcatatctgtgggatcagtggtgatatcccctttatcattttttattgtgtctatttgattgttctctcttttcttctttattagtctggctagcagtctatctattttgttaatcttttaaaaaagccagatcctggattcattgatttttttaagggtttttcatgtttctagctccttcagttctgctctgatctgagttacttcttgtcttctgctagcttttgaatctgtttgctcttgcttctctagttcttttaattatgatgttagggtgttgattttagatctttcccactttctcctgtggacttttagtgccagagattctggtatgttgtgtcattgttctcattgttttcaaagaacttatttatttctgcattaatttcattatttacccaactgtcattaaggagcaggtggttcggtttccatatagttgtgtggttttgagtgagtttcttaatcctgagttctaatttgattgcactgtggtctgagagactgtttgctatgatttccattcttttgcatttggtgaggagtgttttacttccaattatgtggtcaattttggaataagtgtgatgtggtgctgagaagaatgtatattctgtcagtttggagtggagtgttctgtagatgtctattaggtccccttggtccagagctgagttcaagtcctgaatatctttgttaactttctgtctcgttggtctgtctaatattgacagtggggtgttaaagtctcccaccattattgtgtaggaatctaagtctctttatagttctctaagaacttgttttatgaatctgtgtgctcctgtattgggtgcatatatatttaggatagttagctcttcttgttgcattgacccctttaccactatgtaatgcccttctctgtcttttttgatctttgttgatttaaagtctgttttgtcagagactaggattgcaacccttgtttttttttgttgttgttgttgttgttttttgttgttttccatttgcttggtaaattttcctccatccctttattttgagcctatgtgtggtctttgcatgtgagatgggtctcttgaatacagcacaccaatgggccttgactatccaatttgccagtctgtgtcttttaactggggcatttgacctatttacatttaaggttaatattgttatgtgtgaatttgatcctgtcattatgatgctagctggttattttgcccattattttgcactttcttcatagtgtcaatggtctttacaatttgatatgtttttgctgtggctggtaccggtttttcctttctgtacttagtgcttccttcaggagctcttataaggcaggcctgggggtgacaaaatctctcagcatttgcttgtctgtaaaggattttatttctccttcatttatgaagcttagtttgactggatatgaaattctgggttgaaaattcttttctttaagaatgttgaatattggcccccactctcttctatcttgtagggtttctgcagacagatctactgttagtctgatgggcttccctttgtgggtaacccaatctttctctctggctgcgcttaacattttttccttcatttcaaccttggtgaatctgacaattatgtgtcttggggttgctcttctcgaggagtatcttactggtgttctctgtatttcctgaatttgaatgttggcctgtcttgctagattggggaagttcccctggataagagtgttttcaaacttggttccattctccctgtcactttcagttacaccaatcaaatgtaggtttggtgttttcatatagtcccatattacttggaggcttcatttgttccttttcattcttttttctctaatcttgtcttcatgctttatttcattaagttgatcttcaatctctgattgaatttctttcttcggctggatcgattcagctattgatacttgtgtatgcatcatgaagttctcgtgctgtgtttttcagctccatcaggtcatttatgttcttctctaaactggttatttgagttagcaattcccctaaccttttttccagggttcttagcttcctttcattgggttagaacatgctcctttagctcggaggagtttgttattacccatcttctgaagcctacctctgtcaattcgtcaaactcatttgccatctagttttgttcccttggtggtgaggagttatgatcctttggaggagaagaggcattctacttttttgaattttcagctttttgctctggtttttcctcgtcttcatggattgatctatctttgatctctatctccggtgttggtgaccttaggatggggtttcggtgtggaagttctttctgttgatgttgatgctattcctttttatttgttagttttccttctaacagtcagacccctctgttgcaggtctgttggagtttgctggaggtccactccagaccctgtttgcctgggtatcaccagcagaggctgcagaagagcaacgattgctgcctgtttcttcctctggaagctttgttccagaggagcacccaccagatgaaagctggagctctcctgtaggaggtgtctgttgacccctgctgggagctttctcccagtcaggaggcacaggggtcagactgccatctgaggaggcactgtgctgggagatccactgctctcttcagagccagcaggcaagaacaagtctgccaaagctgtgcccacagccgccccttcccccaggtgctctgccccagggagatgggagttatatctataagcccttgactggaaatactgatgaataaaattgaaaaggacacaaaaatgaaaaaaaaactcattatcagttggaagaattgatactatcagaatgacaatactacccccaaacaatttatagattcaatgcaatccctatcaaaataccaatgacattcttcacagaaatttttaaaagtcttacaatttatgtggaaccataaaagaccctaattagctgaagcaattctgagaaaaaagaacaaatctggaggcatcacactgtataactttaaaatttatgacaaagctatagtaaccaaatcagcatggtactggcacaagaatagacacacagaccaatggagtagaacagaaaattcatttatgaatccacacatttatagcaaattcatcttcaacaaatgtgctaagaaggaccacctctttaataaatggtgctgggaaatttggttaactatagtcaaaagaatgaaccttagatctaaatctcttaccatccacaaacaaaaatagattaaaggtttaaatctaagacctgaaactgtgaaactactagaagaaagcattgggaaaatgctccaggacattggtctaggcaaaaattttctgtgtaaaacctcacaagcacaatcaatcaaagcaagaaatagacaaatgttattccatcaagctaagaagcttctgcacagcaaaggaaacaatcagcaagcgaaggaagacacaacctatagaataggagaaaatatttgcaaactaccaacctgacaagggattaataaaccagagtttataaggagctcaaaaaactcagtagaaaaaaaacccagcaaataatttaattaaaaaatgcacaaaagacctgaatagacatttctcaaaagaagacatacaatggccaacaaatatatgaaaaatatgctcaacatcactaatcatcaggagaatgcaaatcaaaattacagtgaggtattatcttactccagataaaattgcttttatcaaaaagacaggaaataacaggtgctggcgatgatgtggagaaaggggaaccctcatacacttttggtgggaatataaattaggaaagtcacaatggagaatagtatggagattcctcaaaaaactaaaaatagaactgctctaccatccaggaatcctgctactgtgtatatccaaaagaaagaaaatcaatatattgaagggataccgacactcccatgtttatcacagcattatgaacaatagaaaagatatagaataaacctaagtacccatcaacaaatgaatggagaaaatgtggtacatatacacaatggaatattatacagccataagaaagaatgaaatcctgtcatttgcagcaacatggatggaagtggaggtcatcatatcaagctaaataagccaggcacagaaaaacagttattgcatgttctcactcatatgtgggagccaaaaactggatttcatgaagagagagtggaatgatagttaccagaggcttggaagggaaggggagagagaggtatgaagagaagttggttaatgtgtgcaaaaatacagttagctagaaagaataaattctagtattcaatagcaaagtggggaaattttagttaaataataaactatatatttaaaaataaaataatatattgtacattttaaaatatccagaagaaatataatgtttccaacatgaagcaagataaatgtttgaggtgatggatatcccaatcacacttgtttgattattacacaatgtatacatgtatcaaatattacacatacccccaaaaatgtacaactatgatgtattaatttaaaacacacaaaaaattcctttgtctgttttctagaaatattatattttcacttttacacttaaatctataatccacataaagtgatttttttcatgttgcgtatagtgagaaaaaaaagtttgtttgtttttcttataagtaccctgttgttccaacactatttactgaataaactttattttgcctcttgttaatttgggttgtcttcttagtatgtggttgcaggagttatttttggtgatggtcagtctggtcaaccacaagggagacacagaggaggcaaaggaaaaaacaagtttcttatactcaaggtcctagagggacagagtcactgcatgctgacagggagtgatgtggaaaagagcaccaaggaaaaaggctcagccaagcaagtggggagcagagagcgggcaaacaccagaaggtaagtgcctttattggaactcaggttgagacacacaagaaaagggatacacaagaaaaattttactggtgtgttgaaatgttactaggttatggtcaggagaggttgggaaaggaaacttgtggcaggggccaatcttaccacactgttgcacctggttgtctgggtaggatgctctcagcctgtttgtgggttgttgaggaagcaagaaaatatgaagttttaaaatatacaatacaatataactttgtcagataaatgcctaccaagtattttctcccatttggtgacttgcctttacagtttcttaaccgtaatttgtaatttcaaattttttcgtttaatggaatttatcatttttttcttgtagttcatgccttatgtgtcctgtttagaactatttctctgaccaaatgtcataaagattttcttatgaaatgtaatatttttagctcttgtgtttagctatgtaaggcatcctaagtaaatttttatcacggcatgaggtcagggttgatgtcattttttctcccctgcaaatatccaatgatcttagcactctgttttgaagattacctgttttttgtttttcctttgaattaccttgtcattgttgtcaacaaccaattacctatataaatgtgggtgtacttctgtattattctcttccatttatgctaaagcagggaacccacttagagatgtttctttcccaggctgcagtgcaatggcgtaatcttggctcactgcaacctcagcatcctgggttcaagcgattctccagcctcagcctcccgagtagctggtattacaggcgtccaccatcctgcctggctaatttttacatttttagtagagacggggtttcaccatgttggctaggctggtctcaaactcctgaccgccagtgatccaccagccttggcctcccaaagtgctgggattacaggcgtgagccaccgctcccggcctatttgtagtttttttgaaaaaccttcatactcttttcaatagtggatatactaatttatattctcaccaatagttcctttttctttgcatcctcaccagcatttgttactttttgtccttttcataacagccattctaactggagtgacatgatgtctcattgtggttttggcttgcatttctctgataattaatgatgttgagaattttttcatatgctggtttggtcatgtgcatgtcttcttttgagaaatgtgtattcagatttttgtccatttttaaatcagattgtttttgtttggttcatttttgctgttgagttgtttgagttccttgtatatcctgtatattgatcatttgacagacgaatagtttgtctctttattctgttgagtgtttcctttgctgtgcagaagctttttagtttgataaaatcccatttgcctatttttgcttttgtggcctttgtttttaatgcctcattcataaaatttttgcctggacaaatgtcctgaagtattttccctttgttttttttttcccagtagttttagtttcaggtcttacatttaagtctttaatcattttgagttgtttattgtatatggtgagagataggtgtctagtttcattcttctgcatataagcattaaaagctatcagttttcctcctaatgctcatttagctgtgtctcacaaatattgtcctcattgatatggttagatttaggccttccatcttattatttgtttcttgttttcctctgatttttatttttttttcttttcccttccagcattcttctagattacttgtacatattttagtatttcattcagtgccaaatagtttctaatactcattttttcttcaacacattgctgttttaaaatatgttgttaattctcaagtatttgagattttcctgaatatcttattggtactgacttataatttaattactttgtggttggagaacataatattatttcagtcctttcagatttatcagcacttgttttatggcctggcatatggtctctcttggtgacatacatgtgcacttgaaaataatgtatattctacagtttcggaatagagtgttctataaatatcaattaattaaatcaagaaagtggtgagtgttgttcaaattttttgtgcttttatctcattttaccaacggctgagaaagcaatgttaaaaattttttaccatgattgtagaattattctatttctgtttttataccacaaatttttgcttcatatattttgagaccctagtaagaaatgcacacacgttagtaatgtcttcctgaaatagtcccttttgttaaaataaaacaccttatttttgtctaataatattgtttgtcttaaagtttattaattcagtagtaatgtaacctcttcagctctcttatgtttactgtttaaataacatatcattttccatcttttttactttcaatctgtttgtgtttttatttttcaagtgagcttcttgtaagcatcatatactttggccttactttttaaaatctatttagataatcttttccttcagttaaaattcttatactattcatagttaaggtaattattaatatggttgaatttaaaaaatttttattttccatttgctccaccattttttgttcattttttctcctttttctctttcgaatcatttgaaattttagtattccatcttaatgtatctgttttctttttagtaatacatccttgtattgttttcaaaggttgatctagaggttacaatatacattcttaatctttcatggcctacttaaaattgatactctgcctctccactgaaaatgtagaatcttgaaattgataggtatatatatgtccaccccttcaatcatttataagatggttgtcctatcctttcatttatatcccataagtgtccaatcatttataggatggatgtataggcattatatcaatgtatgttttaaaaatcccacgaaaaattgttataatttgttaagtacttatattttagataacttaaacagaaaaatgcagtcttttctatttttccctagatatttaccacttacaatgtcgttaattttttctaatgatccccattatttctaatttcatttccctttagcctaaggacttcttctttttttttttttagacagagttttgctcttgtcgcccaggctggagtgcagtggtgcgatcttggctcgctgcaacctccacctcccggattcaagcaattctcctgcctcagcatcccgagtagctgggattacaggcgcgagccaccatgcccagcaaattttttatttttagtagagacgcggtttcactgtgttgcccaggctggtctccgacagggacttctttagaatctcttgtagtgttttctgacagttagtctctacattttgctttacttattttttgaaaaaaaaaaatttgcatgcatttttgaaggatatttttgctcaatataaaaaccaagtttgataattgttgtccctttctttaaaaatttgttttttctctgtctacaatcaagatttggtctttatcttggatatttagtagtctggttatgtttttggtatggttttctttgaatttatcctgtgtagggttcattgaacttctcaaacctgtaaatgtatgtttttcaccaaatctgaggagatttcagctgcaatttctttaaatattattttatgtccaatttctctccttttctgctgggattccaaatatatgtatgttacagtttttgatagacttgatattgtcccacatgtccctagtttctgtttattttttcaaactttctttctatattttagatgaataatttaattgatatagttttaattttattgattctttcctttgtcctattcattctactgtaagtccatttggtaaatttttaaaatatgttacagacttatttcaaaaatttctatttggttctctatttatatatctcagctgagatttcctgcctttttattcattttatatattttttaaaatctcattgagtatagttattgtgcctactaaaaaaattctcatcaaataattccaacatcagatgcatctgaagctagcatctattgattgtctttattctgaaaaattgaattcattttcctgcttctttgtatgttgagtacttttcattttatcttggacattttaatgttatgttgtatagattctgtgttctgtgacatccagcatgctgtttttgtttttgtttttgttttttgtcttagcaggcatttaacccagttagactcaatgtgtaagctctgcctttccttccataggtggtggtttaaatcttaattcaattatttagttctttggtgtactgcttttagacagtcctgtgcttatatggctcaggtgtcagcctgaacttgtgtatttaaccacacagaaaattaagggacttccttctctggctctctcctctatggaattctccctccaccttctagtaactgcggttaatcagactccctttttagatcctctggccagaaagacaatgagctaccaaaaatcttaccaacctacaatatgccttctctgctacaaaaaacaaatccacaaatcaaatctacaataaaaatggaaaactaactgctatgccagtcacttctccaaatttcatttccccactacaccctggctgctcttttactcttcagaattctcaggtagtcattttctgtattttatgtaacatataattgttaccagttggatggcttgtctgattgttaccagttagatggcttgtctgaagggaatttacaatattattccagaagtgaaattctagcttaactatgaatggacatatttatactcattggtcagtaaggtctgcattattcaggatgtatctacatatgtgtgtatatgcattttacgtacttggactgcaattgtattaaatgcttattttacatatttgaacacttttcatgctttaaaaatattcttctaagacgcgagtttaatagctttataatactgcatctatatacgtaccctaatttaccattcttctgtatatttttgtttttttgcttttgtaaaaactttgagatgaaatcttttcctctcttcctcagaataaacttttattgtgaaaagtagtatacggaactttgcatctcataatccagaaagtttttacattgtatggcaccagcaggaaatcatttatgagttccaacactgggtgctgtactttctttattgtttttgcaaaaatgataacagaaattacattttattgtttaaattttaatttacttgactattagtgaagtagaatataatcttatgtgtttcagggagtgttctttttttaatcaatagtccatttaggataaaaatttttcacattttcaacaagttaagatactcttttcctaacaaattatgtgagttttttaatgaactaaggatagtaatctttaattaattatgtgtgatatagatatctatggtatgtcttttgccttttacttttgtttatggtatctttaacctaccaaggttatttaatagattatgaacatgtgctaatttaccaagatatcttgcttagccataggttaagacatgaggacttctactgaaacttctctaaatatggaaccaagacttcatctgagtttgagattaagagaagaaattatcacaggtaatgtggagacaagtcacttctccaattgtgttctctaaagtgtggtgttttgatggtcaaaacctcataaaattaggtccaggagagaaagaattagaaataggaattgctaacagaaaaagaccatttcagaatcatggactgagggttaccgttcaagagaactataacccttgggccacccagtctatagagcagcttcattttttgcaaaagtgaatatggtggcatatagattaaagtattaattattttctgtgctacacacttacaggagaaaactcttaatatccaagacaaaaacagtgccttgctgatgaatgaagagacatgtgtgtcaaaaatataactgacaaaaggccgggcatggtggctcacgcctataaacccagcactttgggaagctgaggccagtagattgcttgagcccagaatttcaagagcagcctgggcaacatggcaaaaccccaactctactaaaaaataaataaataaataaataaataaataaataaataaataagaatataactgacaatgtaggagcctcttacaggttcccttgatgcttcagtttcctctgtttactctgctttttgtggtaaaatcatatttacaaattcttctcttcctgacaattataaattcttatctctcccttccttggattcgttgagtgaacctatctacacaaactactcttaaaatggacctttaccctctttcctgtccatgggcaattactgtgattattctttagcagctactgtttcttcagcccttctgctaggatagggctgctttacatacaccatgtggagtcaaaaaagaacagagagaagtagtcacaaaaagaggaagtagtggttagtgggttcttgagaaagttctccaaaggttacaaactgaaaagattgaaaaattaacagttctatgctaatctctggtgtctcctttttggcagctccatgaggaagaaaaaataatctgtgacttctgtaccttcttcatgaccaccgggcaagactgactctctgaccagtgcacaggagactcatcaatatctatctaagccctttctctctaacagctgccagagtttggtcttctatcatctcaggccaaggaagcgcagtggttacactcatctccactccggtcacctgctttccattttatgcgagcaggtcctgccttacaaaataaacgtatctgctgagaaatgccaatgagggagacagaagagatcttcaaagggaaaggcagattttgtaagtggttgttgatggaccaaattccatgttataaatcttctcagggtgcagtagttgatataactccattgagatggaccctgaaaacaaatatgcacaaaaggaattttacagataaatccgtgttccatgcctagaataaagtaataccattataatcattatctgctttcaatatccaaccctgccatttagtttcagcttcaggtccaccggatccttcaaatatttcttcatacaatctccttttgtccctcaggacctgttggaaagaaaggcgtccaatgctaataaggaaaagagaagagccttcctctccatgcaggtttaagtctactgaaagtggaaattactcttttatttataaatactgataggactcttttggtagcagggaacatggacccacttatgcaaccttaagtaaaaacggtaatttatggtaaaggaaaatggatagctgtcagaattctaagcaggaaggtcataaacaagctggaatcagaaagtgggaggttgttgggatccttggaactacctcgaccctgcaatcagacagactcctctacctgccctctgtgtccttggacaaactgctcaacctccctatgcgtcagtttcctcatctgtaaaatgggaacaatgatatccatcttttaagatttttgtgaggattgaatgaattaaacaagtaaagagattggatctaggtctgaaatttgctagccactcaaatactagttatttcattggttgtttcatattttctgcccacgtatgttgacttctattttgtttcttttaaataatttgccactttctgaaattgtctaatttacctaattgctgacttgtagagcatgggtcttctcctctagtatttaaggtttatcacaccctcagtagagggaaggcaatgagtgttctgctacatgtcctgtttgctggagcggagaactttcagcctgtttctgacccagtcctctgagtacctctgctctgaaagttgtaactgtctctctttcccagggctgtttctatctccttagccaaaaagccagacttcctagcccaaggaggggagctcagtgaacctcaactataaggctgaatcaatcaggattaatgtagtttcaagccagactgagtagatgaccattactactgctactactttaagttctgccccctttgaaggatttccttcatcactttctttcaagaacaatactaattgtggttgcagtaatacaacagtccacttccagttttgctaacatattttactaaatcatctgtgaagcaagccctggttttccttctgtagttatctagttaaaaggagttccacatgaggctatagatgtgaactgcaggagaggagggaatgcagtaaaagttggtaccttagcagtctgagccacctgctcatacaacttacttatgccttgttaaacccagtcatatatacatcatatatatatagatgtattgctgctgtgcatgtacaatcttgtggctacataaaaccccactcatgatgagcagttcgaattgcagattgcgtggtcacttgatgtcccatgttaagtattaagtttttagtaaggtctaggcaaacttgatgctgtatcctaaaagaacattatctccagaagagagtataacttttatctaaaattctagaagtctgtgctctaattttccttttctgacccttagaagcactatacaacatccatattttctatagtcatttcaggctacatcggatctaccacaccacaagtctcaagtggtcaagcagctttcaaggcaatctggaattattgcagagccttctcttgccctgagcctcactcagaattaatagtgttatgggctcctcagcaaatgggtaagagttgtgcacgtaaatgaggatatattgcatacaaattccaaagatatccaccaggtattgtgcctcttctttagtaataagaaggtgcaagatgcagcaatttgttttaactctgaagacattctgacatgtgaataacagcataatctaacttataggggtttcctgagaagaaaatgaattccttagcccaacacatgacattaagtaagtgcttaataagtatgagctatgatgatgatgacaattatgtttattattactaccatacttgaaatttaagcaagactgcatagagaaggcctttttagatttccaaaaccttcccttctccacctcccaactgcaacatactgcaatcagaggagtaaaagaatagaaataatgtctgaggtagaagtaattgtatctatatctcttcataaaaagtagatatcaaattcaagaagtcagttctacctgtgcaaacagttgttatgtgctgaatcattttacatgtaacaatatgttccagtaaagtcttagaccactttatggtttttaacaaaaatgtgacagaaagtgtcctcactccgtactgattccatatgtttgtgtgaacttgtagtctgggaaggagtgtggagaatggctcggggaacagtgacctccacctacaagaagataaacaggtctttgggattgaagaacttaaccctccttaattctagaagaaatagctctttaggagcctctatgggctctctaatagacaactaatctctactttggaaaagagaataaatgtcttgagttcagcagtcaaaagcactgatggatggacctggaatgagaatgaggggaaaggaaagaaaaataagatttgggtcaaggaggaaggtagtcatctgctcctgaacagatagtgctcctcagtgtctccctgacactgttttcagggcctgtctatatctcaggaagcgccagggtcattcaaccgtagaatccactactgggaagaccattttacattctttccaaagaagcttcctggacactgttatggtatcattgtcacccacaagcttcagagcactggccacacactcagccatggaactgtcatagaagaaacctgggatacttgtaaaatcgatggagcactaaggacccactgggtgaggaaaagctgggcagtatatactctggaagtggactggagcagtttagtgcatgccaagtttgagacaaatagtcgtctcttttttatttatttatgtatcatatatgccaggcactatttgaagggctttcacatattaactcatttaatagtgatgaagaagttgagatttttgcccaaggagagagccaatagcttttagagcataggactttttgcaaggtgtaggcaaaatagaatctataaggaaccaaatggtatatagaaaatggcagataagaagtactctcgaaagatatcaagtttttagattctaataggaaatagaggacatgttattctctataaagtctttctacccttattagactagaaattacataaagataaggatcatgtcacttttgtcaatactgtgcaaccagtgaaacacagtgaatactcagtagataattgttaaatgagtgaatgaagtcccccagacacagaagctaaggagacttgaaactttctaacaggatagcaggtcttaaagttcctggatagcttcttgtctacttcagccataatgtcaccctgtatttaagaagacttaaaaacaagaaaacaacttcatttccttaggacccatggcagaagaaaggcaattagcaaatagcagtatccttggcttccctttttcgaaatcttctaggcaatgctcatgggtgccactgtggagagcatctgtactcagacctgaattgtatggtcattctccaagataaacttcctttgggttttccaggacaggtcctcatgttgctgtggcctttgatgctggttctaggtgagtggacaccgtgaatctagacctggattgggtgggcactgagcgctaacctcagatgctcacaaaatcttctgttgtattttgtcctaaggcagtctctaggctgagaggggactgggcaaatgtttttggactataagctcctggcctcttaaataagaatttagcagcacatcaaaaccaaaatgatgataatagaaatgttagtatttgttgagtgctcactagtaatttatatgttttaatccatttaaatctttacactaaatactaccaagtaggatttgtatcagaattgaagactatatggaaattcactgttattatatgaaaaaaaaaacacatcaaaatgctaagtaaaagaaactatgttggttaggcacagtgactcataatcctagcactttggaaggctgagatgtgcagatcgcttgagcccaggagtttgcgaccagcctgggcagcatggcgaaacctcatctctacagaaacaattagccaggtgtggtgttgtgtgcctgtagtcccagctactcaggaagctgaggtggcaggatcacttaagcctggggggttgaggctgcagtcagctgttatcacaccactgcactccagtctggacaacagactgagaccctgtctctcaaaacaaaaaacaaacaaaagaaattatataatgacaacaggtgtcaaaagtattgacataagtattaaaaatcaatatccattccaaaaataattattcttaagccagaagaatccttacttaacatgataaagaatgtgttctagactgacagccaatattacaccttaaaaacaagactaaaattgccattcaaattggagctagaaccaagatgattgcaatcatcatcatatgcaatagtttttagatcctggccaacacactaaattagtaacaaaaataggaagcatacatataggaagccaagattttaaaaagtattatttattctttaatcattcccagtgcatttatttatcaccagcttgtttgctattattgctatgaattatacagcccctgctcttgatcatatcatctatgtggtatagttataaatttatgaatattcatgaattaggaagattgaccataaatatcaaaacttatgaaatctgtgaatattattaattaccacttggagattataataaagaaatatcatctacaatagcaataaaagtgaaaacataggaataattagagttttttaaccaagaaaaggaaatatataaaactgtacaaaggatacttcaatgtataaggacatatcattagcctggatagaaatattaaagatgttataaagagatcagttctccccaagtgaatttgtagattctgtataatttcaaactacctgtggaattttccttggaactcaataaaatattcaaaagtgtatcttgaaaaatatgttggtaagaatgccaaaagatagattcttttctaaaaaaacagaaacattggaaatctaattatatacattaaagaatagattccatataaatataggtcaatggaaaataatacaaacccagaaatatatctaattacatgttatttaatatacaaaaaatagacatcataatacaatagatatttacaattctcctacaaatttaaaaataaagttcagataattataattttttaattatcaaaaacatgatagaaaataaaattaagactattttttaatataaattatttcttcctaaacattgaagtagtagaaggattagagattttaaatctaaaacttaaaaaattttgtattacaataataacataaccttaatagcaactaatgttgcattaggatatttgcagcaagtaaggcaaataattgagatatgatataaagaattcatgttcattggccaaaaaaacttgaaaatgttattgggtaaaaggataaatgtcagaattatagaatacacaaacactctttgtagctgctgcttacttgtctgcaagcttcataaaacccgttgcttatcctccaaacctagcagagtgcctggcacatagctggcattcaataaatatgtcttatattaatgaataaatgcattcaggaaatgcacacagaggtacaatttgcagtcattaaatttgcagcaacaacaacccccaaatgctggatactgtacagtgtaggaaggttggataagttatacattgctgtggcagtggaaatggtaaagctcatttagaaagccagttaacaagaaataacataaataagtatattttgactcagtacccccagttccagaaagctaagataaaggggtaagactgcagaagataatatacacaatgatattcattgtagttattatgataatattgagagaaaaagagcagaataaaaaacagagtcttaacacgaaaactaggttaagattatgcacatacaaggttaatgtttggaagggaacaagtagtgaaaccagattaactatgaaattgagagtatgcatggattgtttcactttttaaaatacaaacaatatttaaaacatttgaaaaatgatagaaaaactgaatctcaggtttcaacaaaacaggctcaacattttgactctgacttactcctgttatatcacaagctgcataaatggtcttttcttattcagcaaaagggggaagttggatattcttttcagtgctcttacaatgctctatacttccccttatcatagccctaccacactatgttatactgcttattaacttagtttctcctccagtagattataagtttcttgagggtaggagcagtatttcattcttcttggtaactacaatatttaggccaatgcctgcatagtaagtgcttaaagaatgtttgttggaagagtgagtgaatgaatgaatgatcaaggaagttgcctccactgagcgctcttgcaaaggcactgtctgccaggtaagatcttagtaagatcaggcatctgctaaaccccactttgtgtagtaaagccaaaccagagagcagttagggaaaccagctgctgaggaaagggaagggttggacgtccttctcctctgtccttcctgcctccgtgaaattccacatcagcatctgataccaaaaaaagagaactgcagaggtgccaatccgtcctgatgttgaactggagaagtgttctttgctgtttgggttggagtagagtgacacagagaaggcacagaagggaaagtgtgagtgtgcagccgaggctaatttctcatgcctgtccctcctgcagttcccatcagaggacagtcctgtaagatcccctctgtttcttctccttggctttggagtaatagtgcccagcagaggagcctgggaagtccacaccaacccatgtccccaacagctgcagggaactgtactcctttccaccgggcccagtcactttggttctgcctacctcactcactctctctgacaccttcctgctctgcactgcacaagagttgtgatttctgatgccttctacaaagggaaaattgtacacctgacaaaggaagggcaggcatcgagacagcctgttcccctggtcacagatgcactgaggcttctggggactacccagttggaagtccatactggggagcagggaggcaactctggaaaaaaagatattcgcaggaatggtcttatatccaaatctttggtccaggctcagaacaaattcctttcatctcttccttttttacttacatagtcagtatttgatactgacccttgttcaacttcctagcccctagtctgcacaagggtcagaagccatttggatgtaaaagggaaacatcctgtccccaaatatttacttatttgttctgatccatttgagaccctgatacatgaaatcatatgaagaaagtcccataactaccctacaccatgtgtactccctggttccttggccatccccgagcaagagataaggcttttgctaacctacttaatgttagggtctctttctctgactttctcagagagcatagtttaataaaaagatcatggtactaaaatttagagacaatgaggtttatcctatctttgtaacattctagctctgtgaccagaggcaaagtgacctgaggctaatttaattatttaaaaattaaatatgatgattatgagcccttggattcaatgatctcatgaaaagaatatagcctggagtctggtgcccaaatgaggcttaattcatgtccatttccttgccctgccttctaatcagtctccctgcttcatattgtgtctcactgaagtctatccactgacagagtgctccatcgaagttcaaattctatccctctcaatctcctccttgaaacctttccatgacaccttgtggcttttataataaaattagagccacttatgtgggccctgcaagcttctatgatcttatttcccccaacactcccaactcctgagtactaatgtcatttctccacctctgtgccctttctgccttgattactctccccatcacctctctccacacacaaatgctaacatccacctgcagactcatgttctcactcacagttttgtgaagtatcatctccttcaggtaccttcaaggatccatctgcccccttcaacaaatatacacacaaacacataccctacacacactcatatgtcctatacactgggctaggtggctcttctgcccccaagattcccgatgtgtatttctgttattgcacttacaccttgtgttacaattatattactttacattgtgtttctgtttttccaccagtcaacttcttgaaggcggataccatttttaaaattcatttaaaaaatccaagcaccatgccttagtatatatgaacatttgatgaataattattagattttttaaaaatgaattttttaatgggagaggtaatacatgcatgggaaaaaaaggaattaccttcttaaaacaaaatgctcttggctctatgttcatctctggctcttatttttgcagctcctgtcagtggacagcttggtgagttctcctgtctttggctcttcagcatctctggtaaagagtgtctcttcctaataaatagaaaacatttgtgatggctgcctgagctctctaatatctcctgttttcttgctgaggtcagcagggatttgaaagtgatgcctggtttactggcatcgcccaagggccaggatagctccatggtcaccccctgaccctccctgggggaagggatgaatgcccaagcagctcctggcttttgctaggccctgcatttactgttattgccaacagaccccatttagccaggcaggacatcttcaactccatggcaagtgtgctggactcaggataggatcctctccaatcagcgagccagaaaaatcctctgaaaacattccactgtgctgatgccagcaggaatgctgcgttttctacactttggagttaatcctccaggacatccaataactgggtccttacaaaaaagaaaggcacagaaaggggagatggggagaagacaagttatctgcatcccacatttaattagttctggctctcactgccattcctttggctcagagtggataattgagaatccatgaacagcaagaaccctctactaccgctctccttgtccaaatcagtggccccagctgtaaccttgtcctggtcacctctggatgtcagtgagtgacttgtctcttctttgctctgacacaattagctatggtgggattcttctgggcatttgaatcatcatttacaaaataaagatgttaggtaagttgagctctcaaggttttctcagggacaaatcttaagataatatgatttattctcttagggaaagtgcaaaattgtgattttatcatcacctttggagttttttatgagtgtatgaacatgatgaaatggcagcgtagtgttgattttctctgggacccactcccatgtaaggctacctaactgtgatatttgatggcgaatcctgctggtgtcaccttcctgaaatcattttgctcattgccatccctggtcaatttctcccttgggcgaggtgagggccatagactgacagggagctttaagttatcagtgaccctcccagaggacctctttcagatcctccaaacccaggtccttcagcctatgcatcaggaggccctgaggctggatctgcaggtacctacacctcagactccttttctctttccttgtcagcaaggacacacaagtccgttattttcctccagcctcaatggaccacagtcttccaaggagagagagtgactccgacttgcaagggattttgtttcatcatcaacctgacgatagaaatacttggtggctgcaggagcagatagaaaggcatgccaatctcagttgggaagttagaacaaatgtcttagaagagctcatgtgtgagttgagacctgaggatgagtgggaacatttcaggagaagaggatcgtggtgagggagggaggacatgttccaggaaatggacaggggtcacttcttgatgagtgcagcatagactgaacagtggagaaaggaaggataaggttggggaagaagacatggttagactatacttagaagtagagtaagggcttgggccacattctgcagggcaatctgggctccatgaatcgtttacatgttggggaaaaccactccagcagcacagtgagaaatgggtcacagagtagccagtttggggagcagccaggagtgaaggagagggcccaacaaaatagtgtccgattggacagcacacccaggccggtcccagtagaggaggtggaacatgagaaggaaggactctgggcaagggaagaggcagtatgagagtatgtaccactgtcaccaagagcagaacgagttctaagcagaagagagtgatccggtttggataaggcaaagctaagagatgacgaaagataaaaactgagtcacatccagtgaatttagccacaaagtactctttggcagaagaacaccgactagacccagaatacctgggtttgactgctgcctcttcacttactagctgtgtgactcacccactcggggcctcagcatcttcacctgtgaaatagggacaacaatagtacccacctcaatgaattgctttgatgattaaattagtgtctgtatatatatcaatatttacaaattacatccaacaaatatacaaacaccagaacttagttaaagacactgtagtgtcattaaaacaaacatctattttattatttttatcattatcatcataattatattcagaaacatgaaaatcagctttagtagattgttggggataaaaacagagttggaatgaagaaaatgtgcatatgagatatgagataaagaagtagagatgataaatgttggtcacttattccagaagactgaccacagaaaagtggagaaacagactgtgaggaacttcaaatgcaaatagggttgtttttctattgtctcatggtttttctaacatggagagggttaaacacatgcaaatggtgtttgcaagaagccagtggaggtaagaacgttttttctaggacagaggcaggtgtgcacaggatcaagagactgaagagaatcccccacagtcaggccagggaggctcttccatggtctcagggcacagtactgagtgaggagctggtgcaggtaagggtgtggttcagctggtggcaagacaagggaattcttccttgaaagcaacatctctgcaagagagaggcaggtcatacaacaaggggagctgggaggggagaaaagacgagaggtctggtggaaatggaacaggcagggaaagaccagcatggaggataggagagctggtgaaagaagcctgggaagtggctgggtcaccctgtgggtatgtggaacctggaggctgtggactggagactgaacatctgcattggccaaacattgaatctttgagccaaaaactacctgagacaggtctcaatcaatttggaaagattagtttgccatggttaaacacatgtgccccagattcagctctctgccttctccaaagatgattttgaaggcatcaatatttaaagagggaagagcagatattggagaaagaggaagaaatttttaaaaggtgtccatacgtaagagacaaacagtttcactcatttgagtctttgatcagcctttatcagaatctacgatttacatgtgaaaggcagggcagaggaaatagtcacttctgtcttcctctagcccaggagtctgcatttttaagtcagggaaacaatcagatatgcatttgtctcctgtaagcagcaatggcttaaagttctgtcttttgtcctgcacttgtgaaaatcagctgtcaatttacactgttaggataaaacaggaccctttaaaacagaaccattttagggtaaagatcttggggcccacaaagaaatatttcagtggacaaattttgagggaggtatgtagcttttaaaaaagtctttgaagttatcatattaaggaataaaataaaaggcaggtttgcctgaaacagttcccagcttgacctttccctttggcttagtgatttggggttcccaagatttattttccttttacaaaatctacagtaagaggcagaaacaaatcttgactaattttttctctctctcagtccccgtgtctcatcctgtcctcaccctcagctctgctaaggacttgaattttgagggagccaaggtgacacttcactgtgaagcccagagaggttcactccccatcgtgtaccagtttcaacatgaggatgtcaccctggggagtaggtgagcccactctgcaggaggagtggccatcagcttccctctgactgcagagcattcagggaactactactgcacagctgacaatggctttggcccccagcacagtgaggtggtgagtctctctgtcactggtaagccctgggttcctgccaatcacccactcctggccaagagtcctctctaacccagtccttcagaagtcagcatgtaccttccggtttcctctgcttcctctttgggacaacctaatgtcctcctccactctctggctcactgaacctgctgtccgccactttcagcctcgtctcattgcagtcttggtgccttcccacccctgcctaatgatacagcagctttctcttccctgctcctcaaattctgagcaggcaagtgcttttcttgtgctctccacttgtcctgtagatcccactgatgcctgattttcattcactaaattgttcttagtagatatagactcagactcagttcccaggagcacagaaatgtcctctgtccagttaatttcagacatcaatgaataaccagatgcaaagtcatgtaagatacaaagacaaatagctggatcagttacctcagcatgtgcctcttgcttaagccttttttagagttgattgggcactaggtaagaaaggcacaggcaggggtgggctgggggcaggccagaagacagcttcacctctgcttgcttggcttagtgccctcacagctattcaagtagctgtcaaatacttacgacatcaaaaaagtttatgtggtgctttgggtctcagttttgaactatccgtgtgtggctaaatgccaggttcaattttttttttttaagacggagtcttactctgtcacctaggctggagtgcagtggcatgatctcggctcactgcaacctctctctcctgggttcaagcagttctctacctcagcctcccgagtagctgggattacaggcacctgccaccacacctggctaatttttgtgtttttagtagagacggggtttcaccatgttggtcaggctggtcttgaactcctgaccttgttttccaactgcctcagcctcccaaagtgctggaattacaagtgtgagccaccgcgcctggccggtaggttcaatttttaaggagacagtgtgatttgggcctatacttttgacagagtgtccagtcttcgctgggcctggaagcagtctcagtttcctctcctgtgaaacaataataccagcttggaagacgagggagagtccagtccctcccacatggatgtgtgagattgtggaggagaggaccagggaacctgggggaagatatcacatgacttagaaagagaactgtgcccctgacatccaaaggcctaaggaaagtggagacagtgacatcgtgatcaaactcagtcagagatgtttaaagtcctattcaatgactcatttcttcacctaatactgattgcatatatttcatggaccagactgtactgacatctaaggatgcatctaagactagactaaactggccctgcccacatggttcataggggctaatagcaaatgcagacaagtaatagagaaaacatcaatctgaggatagaagtacctggtggctgcaggagcagatagaaaggcaggccaatctgagttgggaagtgagaaaaaatttcttagaagagctcatgggtgagttgagacctgcaggagaagaggattgtggtgagggagggaggacactttccaggaactggagagtggtcagttcttgatgactgaagcatagacggaacagtggagaaatgcaggataaggttggggaagatgacatcgttagaacctacttagaagcagagtaagggtttgggccatattctacaggggaatttgggctccatgaaggttttaaatgttggggaaaaccactccagcagcacagtgaggatcaggtcatagagtagacagtttggggagcagccaggagtgaaggagggggcccaacaagagagtgtccagtgggacagaaaccccaggccagtcccagtatgggagatgagacatgagaaggaaggactctggctgagggaagaggcgctatgagagtgggtaccactgtcaccaagggcagaacgtgttctaagcagaagatagtgagccagattggataaggcaaagccaagagatgatgaatgataaaaactgaatcagagccaggcgcagtggctcgcttctgtaatctcagcactttgggaggtcgaggtaggtggatcacctgaggtcaggagttcgagaccagcctggccaacatagtgaaaccccgtctctactaaaaatacaaaaattagctgggcatgatggcaggcacctgtaatcccagctactcgagaggctgaggcaggagaatcgcttgaattcaggaggcgaatgttgcagtgagttgagattgccactgcactccagcctgggcgacagagtgagactctgtctcaaaaacaaaaacaaaactgagtcacatccagtgaatttagccacaaagtactctttggcagaagaacacagactagaaccacgatacctgggtttgactgctgcctcttcacttactagctgtgtgactcaaccattcggggcctcagcatcttcatctgtgaagtagggacaacaatagtactcacctcattgaattgttttcatgaataaattaatgtctgtatacatatcaatatttataaattacatccaacaaatatacatacaccagaacttaaaggtactatagtgtcttataacaaatatcttttttatttttatcattatcgtcattactacattaataaacctgaaaaatcagctttagtagattattggggataaaatccaagttgtaatggacaaaatgtgcatacgagatataagataatgaagtagagatgataaatgtaggtcacttcttccagaagtttgtccacagaaaagtggagaaacagattgtgaggaacttcaaatacaaataaggttgtttttatattgtccgatagtttttcttatatggagatggttaaacacatcaaaatggtgtttggaagaagccagtagaggtaagaacttcatgtctgggacagaggcaggtgtgcgtaggtcaagagacataggaaaatcccccgtgggcaggccaggcatgggtcttccatggttgcagggaagcctgcatggttgcaggaaggagtgaagagctggtgcaagtgagtctggtggtggtaagacaaggaatttcttccttgaaagcatcctctcctctgcaaaaggaaggcagatcacagtataaagggagccatgagagaagaagagactattggtctgctggaaaaatgaacagatagggaaagacaggcatggaggataggggagctggtcaaagaaacctgagaagttgcttggctgccctccagataggtgaagcctggagatcctggactggagactgggcatctgggcactggccaagcattgaaatctataataagaggcaaaatctacaataagaggcaaaagcaactcttgactcattttttctcttcctcagtccctgtgtctcatcctgtcctcaccctcagctctgctgaggccctgacttttgaaggagccactgtgacacttcactgtaaggtccagagaggttctccatgaatcccatatcagttttatcatgaggatgtgcccctggggagcagctcaacaccctctgtgggaagagtgtccttcagcttctctctgactgaaggacattcagagaattactactgcacagctgacaatggctttggtccccagcgcagtgaggtggtgagcctctttgtcactggtaagtgctgggttcctgccagtcacccacccctggcccagttctctctcacccattcctttaaaaatctgtctgtccagtttcctcccctaatcaacttaatccccttcttggcttcctcttcaactaactagctggggttctcagtacttataagtcctggctcagccagacccctaaagtagctcagtagcttccctagcttttagcaaatgaatttctttactgtattttcttctcatttattgcatgttatatcagtactccaatttttcttgatgcacagagcatgtcctatttctctactgacatttacatattaacttagctacaagaacagtcttatagataaatattggtcaagaccttaaattctccaaaggatttccaagcagttagaactcctatggtagatttggagaaggctgcttttgaacaaagggggaaatggctccctaggaaccagctcctcagacttccagagtttttatgatcccttgttttctaatccactaaaatcagtatcattttattgcattattaaaaaaacttttattgaagtgtgacatacattcaagaaacgtatgcaaattgtatgatttggtgtcttcttgggagctaagttgcttctttttttacttgaatctttgtttagtagaaactgggggaaagtttattttcttttcagagaagcaaaatagtatgatagaaaaatcttgagcctgatgtgtcagacatgctcgtggtataacttgttgagtaaagaggttatttttaaagtttaaatgttctgagactactccaaagtcagagccaaatctatctaggaagcttctacacttcatgcattctgtatcccattaccatgtttttgtccatgttttactttcttctcatgtttagcagcatcttaagcctctttattttctgtttcttgactgttacccttaatgccaatggaatgtaagattcatgagaacagaactgcatccatcttggtctccacaacatccttgtgcctacttagtgtttggcacacagtaggtcctcagtcaatatttgtgatttatggatacctttgaaaactgttaattgaatgaagaaccaatctgagaaaacaatacagaatgcaaagtagaaagatacagaaataaaggaaaaattataatatggaaatcagacaatggagccccccccaattatccagttatgtggataattaaaatggagaccctcagaaaattgaaccaaagagtaaaattaaactcaaagatgtagtagaaattgttgggaagtaaagaaaacttgaataggtagatcagaacatatgtgttgatgaggttattgaactttgaggttaaaaatatacgtatgtgtttatgatcatggggaaaaaacagtcatctcagaaagaaaaatatcaagttagtcttagactttgcagagcactcagtgccaaaaagagaggaatgatgtccagacttggacctccaagggaggaataaccactgagaattttatatgaaatcaaaaaggcgttgtcaaaaatacagggattcaggaaaatgagaatgcactaacccttcttgaaaaatcacctaatgacaaaatctagtccaacaagatgtaaatgaatataaaggactcataatgaggaaaccgcattatgactggctctcaaccctggctgcacattagaaccatcaaagaactttgcaaaagacacattactaagcccctctccagactaattcaattcagaatctcacagatggggccacagaatcaatattttttgacatatcctcaggtgagaatattctgtgaacaagactggaaaccactgatttagatacagaaacaaaggctaatcaactgtgcgaattatggtcacagaatagaaagtaactattataaacactgaaaatataaaaaaaaaatgtaacaaagaataatcacttgttcagaggaaggagaggaagcaaaggaacaatcattttctcatgattattattatttcagagtaaattgtgaattatttcacaattgaaaaagaatggacagtttttaaaaattaatgacagatttcaaaatctccattttgtaaatcatttctgaatactttggcaacagtaactcatcattaatggtttatacttcactaaaattccatggaaaaccaactagcagcctgtaatgtcacataggatagaacaagtgaattcttcgggtcgagcaaccatagatattaggactgacaaaaaataaataataaaaataaacctgtgcattgatatggccataaatgatcagggaaagaagaaacagaaactcttgtacaccattattacaagtgtaaattggttcaacattttcttcttaattgacacattgtaattgtatatatttatagaagtgatgttttgatacacatacatggtgtataatgatcaaattaggagatttactctacccatcatctcatgcatttatcatttctttgggataaaaacattcaaaagcctcttttctagctcttttgtaatatactgtacctgactgttaaccatcatcaccctcctgtccaatagaacagaatttattcctcctaattataactttgtacacattgaccaacttctccctatcctcctcttccctctcccctccccaatctttgataaccactgttctactctctgcttctataatatcaactttggtttttttagattcaaaatatgagtgaaattatgcagtatcagtctttctgtgcctagctaatttcattaaatatgacatcctccaggtcttttcatattgctacaaatcacaggatttcattattttttatggctgaatactattccattgtgtatatataccacattttatttatctattcatctgttggtggacacttagattgtttctacatcttggctattgtgaatagtgctgcaataaacttcagagtgcagatatctctttaacatagcaactttatttcctctgaatatcaacccagcagtgaaattgctggataatatgatagctctatttttattttattgagaaacttccatgctgtttcttttagtggctgtactaatttacaatgccaccagcaatgtaagggttccttcctctccacaacctaaccaacacttgttttcttttgacattttgataacagtcattctaactggaatgaggtggtacctcattggagttttgatttgtgtttctccaataattagtgatattgggcatgttttctcatgcacctgttgtttatttttatgtcttctttagagaaatgtctgttaaagtatttttcccgtttttaaatccgtttctttttttttcttttttttgctgttgagttccttaagttctttatatattctggatattaacaccttgtcaggcatatactttgcaaatattttctcccattctataagttgtctctttactctgttaattgtttcctttgctgtgcaaattcttttcagcttgatgtaatcccacttgtccaatgtttgcttttgttgcctgtacttttgtattttaaaaggtccagtcttttagaagaacaatttgacaatatatgatattacttaaaatgtttgtatacttcatcccagaaattccatgtttaagaatttatcctaagaaatgcatgtgtaaatatacaataatatatctacagaattacttaaaacaacattacttgacatttaagaagcagcaacatcccaaatatccattaatggaaaaatgcttaaatgtattatagcatatctatacaatggaatactttgtcattgctaagaataatcaggtaatacttatccaaaattatcaagttgcaaatttaagagttgtactttattgtgtgtaaattatgccttaatacagatgaattttaaaagttagtgatttagatctttaagtaataccacagaaagatgcccataatatattgccaaggggaaaaagcaggttgtagaccactatgttattgtgatcccatgcacatgtgtgcttttaatgtatttatttatgtgtctatataagtgtacttacacatagaaaagatcaagaaagtatcaccaaatactcaacaaagataatttctgaaaaataaagaaaatggtaaaactttttatttttacttaggtaattctgcaaagtttgactttattaaatgaagagctgggtttttcttttttttttaatttcaatagttttggggaacaagtgctgtttggttacatgagtaagtttgcttcagaccttttgtgagtggacaattttatttcacactgtagtaagacagggagagagtacaaacctcagaatacaaccagacagggaatgagattagctgcttaagtttaaatattaaaatgatgaaaatttaaattatctgtataaaactcattcagcccatgggacactgacttcaagtagtgtatctagacggatataattctcataaatatcaactaaagtttacatggatgaaccatgcaaacactgcaatttctactgagtgcattaatgtctctaaactcgtggttcttaaagatcaatttgtgtcacatatcctgtgcagcttattaatcacgcagatactgaggacctaccctatatttactgagtaaaatgctatgagagtagggcccaggaatttgtatttttgcaagctgctttagtaaaagaatatttgaggagtaatttatttgaagggttcctgaatctatgtatagttttaagctatattatttgtttgcaataataagtagcaggagtattattttctatttagagaaagaaaaagtgagagagagagatagatgatggagaagtagagagagaatgagagataaaggaagagacatttcctttttttgccctaaaaccacctgttttgaaattgaaaccatgtcatcctaaagtcctttaatttagtgagaaaagaagcagtgtggtagcaaggaacaaataaaatgcttatgctctttgacttaacaatctctctcttaagaatttgccttctgaaacaattatagatgtccatccctgaaaactgcagactgtaaatggtcaagaataagactcattcaataaattacgttacggccatttagggaacattttgtggccactgaaagtcagattcaggaatgatattaatagcacagaaaaattttcataatatactaattgaaaaacaagttatcaaatctataattataattcccattccataaaaaatacacatagactgtcaagtatatgaagatggaagagaaaactggaaaaacatatgccaaaatgtggctggtgagacattagatgatttttacctgtcaactttttgcttttgaacttttctcaaagctcaagtgtttaaacagaaaaaaataaattataattattgtaacaatcctttttcccaacccattttttgaaatacagtctattttgaaaaacaatgagaggaaaagggaaacgatgagatgaaccaaataactgctgttgtgtttctcatagcttcgctgatcctgcaagctccactttctgtgtttgaaggagacttcgtggttctgaggtgccgggcaaaggcggaagtaacactgaatactatgtacaagaatggtaacgtcctgacattccttaataaaagctctgacttccatattcatcacgcaagtctcaaagacaatggtgcatatcactttactggatttaacggaagtaatttctctgtttcttccaacatagtcaaaatccaagtccaaggtaaagccttcattattttgtgaagtgagttggtcaaaaggagactccctggggacacagaggtagaacaggaggaacagggtgggctggaataccattaaacctcagggtatactcctacaaggaccaaaagaagtacagtattgctttgggctgaaggaagtcagggatcgatggcatccgtttctttgcctgcttttggatgtgctgctgcttgaagtgtgtttttctccagagcacatctcagcctcattgctctgggcctgttgtgattcttctctctagagctgttttcacgtccagtgctgagagccagctcctcccagcccaccaaagggagcccagtgaccctgatctgtgagacccggctctctctagagagatcagaagtccagctccagttctgcttcttcggagatggccagaccctgggatcaggctggagcagctccccgaagttccagatcagtgccatgcggagtgaagattcatggtccttctggtgtgagatagatactgtggctcacacggtcagaaaacggagcctgagatcccaaatttgtgtgcagagtaaatttttgtaaaaggggatattggagacagaaagaggagggtagagtagggacattgcttacaccttagttccttttttcctttaagtggggagcaggggtctattctagacagattctggtgctatcttgagctcttcttcctgctagtgcattaggagtggaatgattatcaacagactccaagaaatctcaagacttctggatctttgctaaatctctctaaatttgccctttcatattgcaaagtaatcagatatttattgagtgtccataattgtgctatagaggctgtggaggacacagatgatatatgaagcattatccctacagacaggaaacaactgacattatagttggaaaagaaagagagtactatttaatattcattgaaatttgctttgtggactactagtagtgatagtcaatgtttataaatgttccatttgtacctgaaaataaaatccttcctttagttattgagtgttagttttggtatttacctattaaatcaaattagaatttttctccttatatatttttatgtgtatttttcaattactgagattcctgttaagatcccctactgtgaaaatagatttgtttttcagttcttgcaattctgtcaattttgtgttatatattgtaaggctatattattacaactgttgttacgcattgctagtagatgaagaattattatatgatccatgctgtggtctaaatatatgtgtcctctccaaattcatacattgaaacttaacccctaagatgatggtaataggtggtagggtctttgggaggtgattaggtcatgcagagatctcatgaatggggttagtgccctcataaaagagacactaaagagctagttacccccttcaccatgtaaggacatagtgagaaggtaccatctctgaaacagaaagcaagttctcaccagacactgaatctgtgggtgctttgatcttagactttccagcctccaactgtgaaaaataaatttctgttgtttataagttacccagtctgcggtattttattactgcagcccaaatgaactcagacaatctcctttcactctgtcatgtctcttataaaagctttctctcaaatctcttcatttctggtgtctaattggtgagctttttcccatttaaggtattgtgactgctgatgtgtatggaattatttctatcaccttattatttccttctatttgtcacgttttacctatttttcttttctaacttcattaaatttaaatctttattctatttttttctctactttttttggaatttatacactgtatttctattcatgtagagatttgacctgaaatttttatatgtatctctaacacaaagcctatataaatatctctttatatccgcttcctagaaattaaaggactttggagcactttcaaacttttcatcttcctcttgtcttatccaatattatttttctgtatttccactaccacagttataaatttttttttttttatgaaatcagtgttcggacttattccctgtttgccaatttctctgctcactatttcttatcccttttcaaactttccttctaggaccatttttctttgtcatgaagaagttctttagtgcttatctaacggtagtgtgcattctcagttttaatttgcctggaaatctttttattttatccttgttgagtaatagttcaattgaatatataattcaaagattaattgaattgaatgtataatgtctaatgacattatacatttataatcctgctgtgttgtaattttcctttcattcttttgtagataacctatcttttctacctctgtctattgtacaattttatctttgtctatagtgtataacatatttattcaggttgatagctgacccaatcataggcaaaaccagtgccaaatgaagatctgagttagaacaatcaataagtttaaaaaacagaaaattaataatataatatttatgatacaatcaatgcttccaagaaaacaatgtgtataagaaatgactaaagacccttgggaaaagtgaggagcccatgtctagagaaggtgtctggggctaagcaagccttctgcttccatcgctggggatagagcatctcctgccccagtggttcctgaaggcacctgatcccactgtggcccttagtgagatattctcagtcaatagaggtccacttctgacaggcacaggctcccgagttatgactccctggatttacttccctactgagtaagtaagtttgaaatattatctgactatatagatatatatttaccatcaatactttttaatatttgccatgtcttttacctgtttcttcgcttaagatttttccttctcattccctcctgcctgttttttcttcaaaatgttttgttttgtattacaggcttgacttctccctttagctctttctagagtttaagcatggttttctgaagctccgttgcaaatttctctgttaattgtggttgccagactaagacttctggttagtggcctttgctaactctctatcagaagcttgtgcatttcctaacatgttggtaattttttactgttatcatatcttcagcagtgattgttctttacaagagcccacactgtgccctgagatgaggaagtctcctcatgggtttattgtttccactgctggggtcctataggtttcatctatttttaaggttgtttctgggctcaaagttctagcacaaagtgaaaattaatgtccacattcatgcactgtgcaggattggattccaatttctcacagattccatctttaagacaggacaggtggcattccccaacctggtttcctaaatgagaagacagactcgttctcctatatccaccccaacccctcatctggctttgcgcagcttcactacaagcacaagcacagcctagacttcatcctcatgtagggatataaacatgggcgtctaagctctgcttctggttctgataacttcttgggtctccagaacttcaaatcccactcacctccttagcatggagttccctcttgtttctgtacctggagttttcctgaacctaagttacataattaaaattttttttatgtttttatcaaacactattgtgtggtcagagtgttaggaggggcttactgtgtcagttcaagtgccttcttctctggaagtttccaaagtatcttttccatttctgtaattcttattgcccacaagcatacaacatttgggatgcagtcagccattacttcaggcagaggttagaaccctactgagaatgcagaactcagtgttcaccttttgactgccaaaatgggcaagaactaaattttattgatagaaaaaaaaatagatttgtgtgttccaaaccaaagattgcagattcagaggatagagttcttccaagtcacaaaattaaaaaatgctaggtaagatatgtatatgagtaattttccaccatctatatataatgttctgtatctaagtaagcattgaagaaatgcctaaagttgagactctgattatgactcagaagggacttgatatcaccatttcctaggactcaacagagggcgctgtggggcagaaggtaacagagcaggccaggtgataggacctccagataggttgacaggaaaaacaaagacggggattaggtcccacttacctttgacaagggagggcagggcctcctcccagggggccctgttgagcagaaattggggcatggtatgtttcagaagaacaagggcctctagaagtgctacaagttctcctcagcttgtgcatgatgctgggagattctgcagttctcttgggcctccatagagaaatgaattactgagaggggtcctgagccagaagaagcctgagctcaaataaggaatatcagagagcatgaacctcattacaaaggctgtggcaggaaccacaggtgtcagcagcacctgcccaccccagccccagccaagcaggaccagtcccatcagcagcagatgtggagagtgatacccaaagaccaggataaaattccctgcaaacacctacaaaggtgaagaagagccaaaagatggacctccttcccccaactccatgaggacaggcagggagaagcagtaaagaggatggagatgaaagagatgggaaaggctttcctgagtagttctacgtggtcatcagttggttctctgggcttgatagtgtgcaggctaattctttctcccccagggcattttcatagcttccctggatagatagcctttttcacccatgctgcaaatctgtcacctactttgtcattcacaatgcactctcagtgtgaccactgatgactctctctttggcccctgtttcccagctggtccgttttcatacagactttccctactagggttctattgctccttcaagtgaccctcttgacaaattcttttaaggtcccgtgtccagcagatgaaaagcagtttcatttgactcctcaatttggatgcagtttccccactggtagtcctgactctgcggccataggctcagatgtgagtcaagcacctgtccagtgcatccccaagctgcaggggacacacatcaagttctctgaatggtcttattgatgccactctcaccaggcttgaggtgaagggtaggtacccatggggtgtggaggggacccatagcagagctctttccaaagaactttttttcccatgatcaccaaatcctaagtttttatgccttcaatataaatgagagcttaagagtctcaaacccagttttcagaactagctttgcaaattcttcagtggaaggcattttcccaagaggttttattgtaccctccaagttctctgaggattgtaaaggatctgatgaggcatttgaagggcaatgaatgtggattcagctgcgtgtagtacaggcaggggacacagaagtggtggaggaagctacaagactttggctgttacaccttctctaaatctggggttctgtatcactttctcaggatatgactttgggcaaactattttacttcttcaaatcttggtttctttggctgtgaaatatcttgcctgctcatcaaggtgctctgaaactaagttagataatcaatgaagaacatgccttagaattataataattattattttatttcctccttcccagagtctgtgcccctcccccagatcctggctgagtcatcatccattacaccaggctggtgcaacatcaccatggagtgaagggttccagggaccacagatgacctgaacgtgacctgagagagccagggcctccccaggagctggagcagatagggacactaggaccagcctccaacccatggattctggctgtgagcctgcccccgagccagttcaatgccagcctcacttgtgtggtcagcaactacgtggaccagaaaactgccaccaaaaaccttggggaagtatgttgggctcaaaaatgtgccaagcaaggtgaatatactcagcttagaagacacttcttttcctggagactgggggaaggggagttgtgctgaccatctcatgccaaccttgccacctctcgacaataaatgccagctgggaagacccaccaatagtaaaaatttgcatatgccccaggaaactacccggggaaggaatggaatcaggggttttaggaagagaaaagagcagctatactaggcacttacctctgctttgctctgaatcctacttgaacagccactgagtgtgtgaggagtcatatttgtagcaagtgatttcaaccgggaaacatgaagaaattacagaaaggcaagttttaactcataatattagagaagatctttatgtggtcagagtcatacaaaaatggaatggaagccttaggacacactgaggtccctgtcattggtggggcataagcacggccatggccatttgataggggtgttataagtgcagaagggggcaggactttatggtaagtttccttccaacagcacattcttagattctaggtaactctctttgacaaaaatcacatagacttattcccagccacaaactgtcaggtggagcagagtgcctggtactgagccagtcccctgcaggaagcatggcagccccaggacccagttacccagcggcctctctctccctgctctgtgtctgacccaacagggactggaacttcactcttattcccattactgtggacgatgcttgcaaaaggccttgtgctcctcgggctccttgggaagttggaagtctaacaccaggaaagagtttccagcagaaggggagtaagaactacccaagcagccttgacaactggatgggactttattccttgttcatcaagttttctgaaccacaaatgaaagctttctatcttctgccaagatatacattgtatttgttattacaaaaatgatctattcattacaagtttgagtgaatccactgtcagtaggatttggtccttacgtgcttgaaagaggaaagactaatataagttttacaatatttcctgtgttggttttttgaggtttatacacacatgtaaatcaatttaaataatgtatgtttttctagaaattgttcatttagtgagcattttacactaaatagatgttaattgtatattatatctcttagagtttgttcttggtgttgtttggctatttcatatgtgagagcagcttgctcaaaggctaagtgataaatctggtgaagattctaaccttgagagctacagaatcccattcaccagttcacagtttttctcactgggtctgtttaccaatgcagtttggtgattcagcaggtactatatggtatgtgatacactgagggatgtcctcctcctccactccctttactaagaatttggaagtaagggaaatatggttgggtggttttgtttgtttgtttgtgttttagcagttaaatgtaattctgtatagctagatcacaggagaggtatagaaattctagtttacaatccagggtaagacttaatctcacatgacctaagaaacaatatgtcaatcagaaagacagataataagaaatgaagcacaaagaaaggtaagtgacagagacaaataaagtgccctgttaagctggaggagattattttgcactgatcccgtaagtcgtattgccctgatccggtaagtcctacaatgtacaagaaaagctcagactccagattgtcggtggaatccacactagcagcatctgctcactggccctgactcccagctctccaagcaacttatggatgtcttagtttcccatgttgtctgtctttggaaagagggtgcactggttagggtaacagaaatatccagtcacgttgacaagtatacttcttactgtcaattaataaatatgcattctggactcatctattcatagtctatcacatctgttagcaagattttgcatccccaagacaggtcagctttggacattatttgatggagcatggagccactaggctcagtctcagggtctgagggtcagactcagaaccttggtgaacacaccagtataaggccaacctgtgggttctcatcattcattcattccttcctcagccattaattattgtgttgtacactgaggacatgctgaggattgtcttggaagacaagctgtgtcttatgtatgtggcagcccctccttgctacatacattcccatttgaattttatgaagattccatgaaaaccacgtttgagttctcaagtgcaattatgcatgagaattgcatattgactttttaagaaacacagatgatccacagtttggggatagggtccaggcatctgtgtttttaaaagctctgcatggcatggtggcgggcacctgtagtcccagctactcaggaggctgaggcaggagaatggcatgaacctgggaggcagagcttgcagtgagccgagatcacgccactgcactccagcctgggcgacagagcaagactccatctcaaaaaaaaaaaaaaaaaaaaaaaaaaaaaactctgcatgtgttctaatgaacagccagggttgttagcaattcaaaggattgttcatttggatcagttagaccaaaagttcactttgcctgtactgtctacacaaatccagagatgattaagagtgatttcaataaagatcctgaaggggttgtttcaacacaatagaatgctaaaaggggagaatggacataaaaactgtaactggttaccaagataacaagcctcttgttgacataatgtggctttatccatttgaagcacagcactgaccatgtcacttgtgtgctaaaaaactgtgatagacaaactctttttctgttaaatattacagagaatctgatgatacaaaaaaaaatctcagaaaataacctctgttaactgtttcaacttttagacttcctttatgcccacataaatatatgaataaagacagaagatacgcttcacaatttcaaaactcagcagaaagctaaaataatcaagatgatgtagcactgacatgaggattgataacaggaataaaattgaaagcccagaaataaatccacccatcaatagtcaattgattttcaacaagggtgacagaacaattcaataggatgaaattagaaatcaataatgttaagaagtttgggaaaatcacaaatctgtgaaaattttaaaaggtactcttcaacaaccaatgtgtcaaagaagaaatcacagtggaattagaaaacccttttaagattttttaaaaaaccttgaaaatacaacataccttataccataaacaaaaattaattcaaaatgtatcaaagactagattgtaagagctaaaactaaaaaactctaagaagaacatagctgaaaactttcatgaatgaaattatttgtttattaggcagtagtttcttagatatgatgtctaaaacgcaaacaaccaaactaaaaacagataaattggacttcaacaaaactaaaaacttatatgcggcaaagaacattatcaagaaagtgaacgatgacccaggaaatggaacaaaatatttgcaaatcatataccttataagagtctactatccagaaaatataaagagctcttatacctaaatgataagaacataaataactcaatattttttaatgagcaaataatttgaatagacatatctcaaatgaggtgaaaaaatatttcacatcattagctattaaagaaatgaaaatcaaagtcacaatgagatacttctttatatctaccatgatattataatttaagagtcacacaataccaaatgctgacaagcatgtggaaaaatcagaaccctcatttattgctgaagggaatgtgaaatgatgcagccacattggaaagcagtttggcagtttctcaaaatgttaatcatatagctcacacatgactgagcaattccactccctggtaaacttccaacaaaattgaaaacatatttatataaaaacatgacattattcataataaaggtgaaaataacggaaatgttcatcatctaatgaatgaattaacaaattgtagtatatgcatacaatggaatatttaatctttatattttcttccttctgcttgctttgggtttggtttgctattctttttctagattcttaagttggaaggttaagatattgatctaagatctttccttttgtttaacataggcattaatagctataagctgccctctgcatactgctttcaatatatcctgtaagttttggtatgttgtgtttccagactttttcatctcaaagtattttctaattccattgttatttcctctttgacgctttagttgttgaagagctcatttttaaattttcatagatgtgtgatttttcccaatgtcttgttgttactgatttctaatttcattccattggctttggagaacatactttgtatgatttcacactttttaagtttattgaagcttatgaaataaagttttatggcctaatatgttgtctttttgaaagaacattccatgtacagttgaaaagaatgtgtgattagctcaatagcgaacaagcagttcaaaagaagaaagatgaagtgttcaacaaacttccgttaggtctaactggtttagggtattctattgtcttctattttctgaatagattttctagccattattgaaattgttttattaaagtcttaaattgctattgttgaattatctattcatacttttgattctgtcagtttttgcctcatcttttaaggctcttttgttagttgcgtatatgtatgtttataattattataattctttattcctacattgtcacctttttcgtattaaacaattattttgtatggtgtcattttagttcctttcttatactgtatattttgtagttattttctaagtggttttcctggggattacaattgacatattaatttatatgtacctgaattgtattaatatcagcttaatataaacattaataatataatatataatatttacataacagaattcatttaactgtcctgaatttaaggtcaacatattaaaatacatgatatattacaaccaaatataaaacataactgaagaagaaaagatacaatgcacaaaactaaatttttttgaataaatgtaaaaagggttattcttaactggagactgtctctccctctctccgttgaacttctcaaaagattgttaatcattttatcacactcacatattttaggatagagaggtagtcaagccttctttactcttctctgttgtatccagtcacagtttctccacaaaatgtttgatacccagtcctttgaggatatgtctgactatatcacactctacacctccttattgcagttatctatctaccaaccccctggtcacttctcaccaaaaacaaactcagacattttctctagccaaattcctgtactcaccctgcatgacatcagcacccatgactgcatcaactaggatacttggctgcaaataaccagctctgattcagggtcaggaagtcaccaccagcactgctggctgcagagccatgcagtaccttctaaatgcacattgattcaagaaaaatcaaagaccaacaccttttctcccgacacccacagatatagagagacacatgtgggcctctgctatggcagaaaatccagtgacaccatcgctgtccttaacacagaagggcagataaagcaaaagggtgacttctgcctcacttccaacctccaatcccacctctgacaatgaagtttaaatcacattcagagccccagctgccgcagagcctggtaaatgtggggttcgctttactgcctccagggtagaggaactccattgagtacctgctcactatatctagcacacctcttttactaccctgctaaaacctcacagataagcacatcaaacattccagccaggctcctaaatacctctgtttcactaccaccaggtcttacctacttagcaaatcatgaaccttgtattgatccaacctctgcacaacactcacactgcctaacagaacaccagtcttctggatgacctatcacaaattcacgatacctaaccagaacaaaatgttaacaccattcaacaatcagttaagtgcatgacagctaaagataatataaactaataatagctatcacatattgagtgcttcctatgcgccatgactcttctaatcattctgcatgttttaactcatctaatcctcataagcactctgtgagatagatgtcactatccccatttacaaattatgaaggaagagacatagaaagactaagtcatttctcaagtcctcacaactaggaagtatcagaaccaggatttaaatccaggtagtttgaatccagagcccacattttcatctttctgctgactgcctctcacattctctcaaacttccatctgctatggactgactgaaatgcattatcctcccctcccaaaattcatatattggatcctaaagcccagtgtgatggtgtttggagatcagacctttgggaagtaattagattagatgagatcatgagggtggagtctttgtgatgggattagtggtctctaataagacgaatctctctctctctctctctctctcccccccacccacccccagcccacccccatcactctctagccaccatatgagcacacagtaagaaggcagccatctgcaagccagagagacctcaccagaacccaaccatgctggctccctgatcttggatgtccaacccccagtattgtgaaaaaataaatttctgttgtttaacctattcagtctatggtgttctgtcatggcagcctgagcagactaagacaccaacctaccttatcactcatgacaaatgacagaacctcccatttttcagagaaaaatgaacagtagaaagtaatgtcttcaagttcctaccagcacacttcccactgacccgcctttatattcatctgtcctaactctctcctgtccccacacaaagcaatgtgctcctgttatctaaagtgagtgccttctcctgtggttcaagtcccttttcctcccactgtttcaggaacactgatctctgatgcagctcccctttctctggtgtgttccatggaccctgctcactcctttgctacagcccttaaacattctcaggactctcccctctcagcatccccttaacctcaccctgcaactatctcctgtttcttcatcttccatgtcacagctagacttctacacttgctccaagacactgaatcctcggacttcctccaccagcaagtacccctgagaactccaccaggtgaccaggaacctcccagcatttggcactgttgacctctttctctttctctttctgagaactctcttccttggtttccctgatatcactctctcctggatcctggctcctttgctgcttcctctttctgcacctccatgctcccctcaagcactgggtcttgtcatgagccgattttcatctcatattttgtgttctcactaggacatctacttccctactttcaatgttcattcccatgctgctaatgcccacgtctgtatctccaccccctaccctctgctcagcatcagaccctgcattcagctctctactagacgtctccactggcacctcacgctcagtgtgttcactgctttatctttaccttctagcctatttctgtgttctcattctcagcaaatggccccatccaggaacctgggtattatccttggctccttcctctcctgaccccctggggcaattgatcaaggacctagaatgtgtcagatccattgctaagcacctcacatgcaaaggtttcattttactgtcacaatcttaacagagaggaaagaaataattaaactttggctgtttctagcacctattggtgaggacattgtagcagagctccctaagccatcacacaccatctcagcttctccacattctgtggcatcttcttcctcacctctgtccctagacccagacctgctcatgggcccttttgatgttcttcacttgtccctcatcacacttttttgcaacatggcaggttctttgttttattatatggaacttggagaaaagaaagatgcattatttgttacaggaaatgaaagcagaagctatcattgtgtgtgttatctgtcaaaaaactggtattcatctcatgggaaagcttagaatagtttcaggtgatttaaactggtcctacaaaaaggtattaaaaattatcctcttctctcacctgtccccaccaccacctctattcctcatgcaaacaagacaacctgctatatgctcaatttttaatgcaaacaaacaaacaaaaaaacttgtctcttttgtctcttctcttcaatctccccagcttagcctgcagttcccactgcaatagtcagattcccagagatcagaggggaaccaggcaaatttattatccctcatccccagcctctttaaaggacacacatacatgcaccacagacacatgaatgtgtaaatacacacaaatacacaacccacacacaccagcttccagtcatgccactatgtgtgaattatgactgagatcatcccaaactatgaagattacatgttaaataaggattctaagtacctgaggacatagtcacctactagatgagttagggagcagcattttctccctaaatttttcaagtacatgttctgaacgtggctcctttcccttcagggttccagaagttcagccttgctggtgggcaagaagcaggtatttttctttccaggggacactgagatgcactataatagacagtaatattattttccaaataatccatggaggaagtgcccccaacttgaataaaaaaatggttcatattttcaatttatactgaatggtaagggagacatatgagattggaggtgggtacacaagtccatgatcagtgctacaaagcttaacagggctacatgccatcatagccctgtcctcccctctagtccattttacagccctggaaagattatcctcctctctgcacactccttcaaggacctcaaatggactcctaaatcttagaatccaaacatttccctatgttagaagtgaggcctggtggaaagtgatcagatcatgggggcggatccctcatgaatggtttactaccatccccttggtgataagtgacttctcactcaactagtttgggaccttccccttctctctctcttgctcctgctctagccatgtgacatgctggctctctgtcaccttctgccatgattgtaagcttcctaaggccacagcagaagcagatgccagcaccacgcttcctataaagtttgcaaaacaatgagccaattaaacaaactcttttctttataaattatccagtctcaggtattcctttatatcaacacaggaatggcctagtacatcttactaagctcatttgttggttctagaaggtttatctatgtagataaaacatgttatctacagataacaataggattttctccactttccaatctgtataactttgtctctttttcttgccttactgcacttaatagaacttgaagtacaattttaaatagaagtggtgagatggggtatttttattgtctcattcatttctactcctatctttactatttcctttcttctacgttatctgggtttttacttttacttttctctctattcagaatgtgcaaatttaaatttctaatgagacatatcttcttatctaatgtaagcctttaatcctaccaatttccctttaagcactttttcagcttcatcccactaattttatacattatattttcattttcgtttagttcagctatgttgtaacttcctttcagactccctctttgacccattgaatgcttagagatatcttatataatttctaagtgtttggagatgtttctgttatctttctgttagaaagttgtagtctaattccattacaatcagagaatatggcttacattatatttgtcacatttgttttatgacccaggataggacataccttagtgaacctctcatgtgccattgaaaagaatgtgttttttgctgttatttggtggagtgttttattaatattaattgtgtctaggtggttgatggtggtattcagttctatattcctgctgattttccttctaccagttcaaagaagtgttaaaatctcttattataatggtgggtttctctatttctattttaagttttgtcaggttttgcttcattttttgaacctctgttttcagtgcatgcacatttaagattgttttctctcgttggtgagttaacttgttcatcattaggtgatatccctgtttttccctcattgtgctataaagtttgctttctctgatactaattagccatttcagctttttaagggaaattttatatttttattaatacagcatagtgtatatattttggggtacatgtgatatttcggcacatgtataccataagcaatgatcaaatcatgttaactgggatatccatcacctcaaacatttgtctttcttttctgttggaaacattgaaagttttctcttctagctattttgaaatatacatcaaaccatttttagctacaatttctatattgcactatcaaatattagaacttattccttctatctgactgcattttaatgcccattaaccagcttctctttattccctcattccccttcctttcccagcttctggtaactatcattctactctctacctcagtgaaatccactttataacatcccacatatgagttagaacatgcaataattatctttctgtgcctgatttattttacttgatatgatgatcccagctctatctgtgttactgaaaatgacaaggtttcattctttcttatggatgaataatatcctattgtgcatatataccacattatctgttcatctgttgacaatctgttgacaattccatatattatctattgtgaatagtgctgcaataaacttgagagtgcagatgcctctttgatatattgatttcccttcttttgaatatatactaggcagtgggattgttagatctcatggtagatctcatttaagctttttgaaaaacttccatactgttctccatagtggctatgctaatttacattcctatcaacagtgcacaggtgtttccctttctccacatccttgccaacatttactgctttttgtctttttgttaatagccattctaactggggtaaaataatatctcactgtggttttgatttgtatttccctgatgacaagtgatgttgagtgttttttcatatactggttggtgatttgcatgtcttcttttgagaaaagtctattcaggttattatttatttttaatcagattatgtgtttgttttattattgagtcatttgcattccttatacgttctggttattaatctcctgtcaggtggatagtttgcaaatgttttctctccttctgtaggttgtctcttcactttaattgttttctttgctgtgaagaagctttttatcttcataaaatcccatttgtctattttagttttagtggcttgtgcttttgaggccttacccaaaaaatctacgcccagaccaatgtcctggagtgtttccttaatgtttcagtaatttaatagtttcagttcttacacttaaatctttaatacattcagagttgatttttgtatatggcgaatgatgggaatctagtttcattcttctgtgtatgaatatccaattcttccagcaccattttttaaggaggccatcatttcccaaatatatgttcttggtgcttttttgaaagtgagttggctgtaaatgtgtagatttacttctggattatctgttctattccatttgtctatgtgtatctctctatgtgagtactacccagttttgtttaccatagctttttggtaaattttgaaatcagatagtgtgaagccttcagctttgttctttttgctcaagattgctatagctattcaaggtctcttgtggttctatgcaaatttgaggatttttttttctttttatttctcagtagtttttggatacaggtagtttttggctacatggataagttctttagaagtgaattctgaaattttagtgcatccatcacctgagcagtgtacactgtatccaataaataattatttatctcccacccacttccaaaccatctcccccgagtccccaaagtctattatatcactcttgtgacttttcgtcctcatagcttagttcccacttacaagtgaaaacatacaatatttggttttccattcctcagttaattcacttagaataatggcctccagctccatccaagttgttgcaaaagacattattttattcctttttatggctgagtagtattccatgttatatatatatacacatataaaacatggatatatatatataaatatataacatatatataacctatatataaaacatggatatatatacatatatacacatttatatatacatatatatacgtgttttatatatatatatatatatatatatatatatatatataaaacattttctttatctactcattggttggttgatgggcacttaggttggttccatatctttgcaattgcaaattgtgctgctataaacatgtgtgtgcaagtatctttttcatacagtgactgcttttcctctggatagatacccagtagtgggattgctggatccaatggtggatctacttttagttctttcaggaatctttatgttgttttccatagtggttgcactaatttacattgccaccagcagttcaaaagtgttgccttttcactacattcattctaatatctatcattttttcaccttttaattatggccattcttgcaagggtaaggtggtatctcattgtggttttaatttgcatttatctgatgattagtgacgttgaatattttttcatatgtgtgttggctattcatatatctttttttgagaaatgtatattcatgttctttcccaactttttgatgtgattattagttttttttcttgctgatttgtttgagctcctcattgattctggatactagccctttgttggatgcatagtttgcgaatgttttctcccaccctgtgggtagtctgtttgctgattatttctgttgttgtgcagaagtttttagtttaattaagtcctatttatttattctttggttttgttgcatttgcttttggattcttagtcatgaattctttgcctaagctaatatctagaagaggttttctgatgttatcttctagaattttttatggttttaggttttagatttaagtctttgatccatcttgggttggtttttgtataaggtgagagatagagatccagtttcattcttctgcatgtggcatgcccattttctcagcaccatttattgaatggtcatccttgggttggttccaagtcttgctattgtgaataatgccgcaataaacatacatgtgcatgtgtctttatagtagcatgatttatagtcctctgggtatatacccagtaatgggatggctgggccaaatggtatttctagttctagatccctgaggaatcgccacactgacttccacaatggttgaactagtttacagtcccaccaacagtgtaaaagtgttcctatttctccacaccctctccagcacctgttgtttcctgactttttaatgatcgccattctaactggtgtgagatggtatctcattgtggttttgatttgcatttctctgatggccagtgatggtgagcattttttcatgtgttttttggctgcataaatgtcttcttttgagaagtgtctgttcatgtcctttgcccactttttgatggggttgtttgtttttttcttgtaaatttgttggagttcattgtagattctggatattagccctttgtcagctgagtaggttgcgaaaattttctcccattttgtaggttgcctgaatgactactgggtacataacaaaatgaaggcagaaataaagatgttctttgaaaccaacaacaacaaagacacaacataccagaatctctgggacacattcaaagcagtgtgtagagggaaatttatagcactaaatgcccacaagagaaagcaggaaagatccaaaattgacaccctaacatcacaattaaaagaactagaaaagcaagagcaaacacattcaaaagctagcagaaggcaagaaataactaaaatcagagcagaactgaaggaaatagagacacaaaaaccccttcaaaaaattaatgaatccaggagctggttttttgaaaggatcaacaaaattgatagactgctagcaagactaataaagaaaaaaagagagaagaatcaaatagatgcaataaaaaatgataaaggggatatcactaccgatcctacagaaatacaaactgccatcagagaatactacaaacacctctacgcaaataaactagaaaatctagaagaaatggataaattcctcgacacatacactctcccaagactaaaccaggaagaagttgaatctctgaatagaccaataacaggagctgaaattgtggcaataatcaatagcttaccaaccaaaaagagtccaggaccagatggattcacagccgaattctaccagaggtaaaaggaggaactggtaccattccttctgaaactattccaatcaatagaaaaagagggaatcctccctaactcattttatgaggccagcatcatcctgataccaaagccgggcagagacacaaccaaaaaagagaattttagaccaatatccttgatgaacattgatgcaaaaatcctcaataaaatactggcaaaccgaatccagcagcacatcaaaaagcttatccaccatgatcaagtgggcttcaaccctgggatgcaaggctggttcaatatacgcaaatcaataaatgtaatccagcatataaacagaaccaaagacaaaaaccacatgattatctcaatagatgcagaaaaggcctttgacaaaattcaacaaccgttcatgctaagaactctcaataaattaggtattgatgggacgtatttcaaaataataagagctatctatgacaaacccacagccaatatcatactgaatgggcgaaaactggaagcattccctttggatgcccattcttttattcacttgcttaactgttctggttagaactttcagtcctatattgactaaaagtggtcaatataggcctcattgtctgcctccagatattagtagaaaggctttcaattttttttgctcagtttaatattagctataggcttgttatatggcttttattgcattgtaatatgttccttctatacccaatttgttgagggtttttatcatgaagaggtgttgaattttatcaaatgattttcagcatctattgtaatgatcctactttttttctccttcattctgttgatgtaacgttatcatgtttattgatttgcatatagtgaaatatttttgcatccctgggatgtatcctacttgactatggtgaatgatctttctaatgtgttgctgaattctgtttgctagtattttgttgtggattttgcatttatgttcatcagagatgttggcctataattttctttttttgttgtttctttatctggtttttatatcagagtatttctggccttctaaaatgagtttggttgtattccctcctctttgattattgaaatagtttgagtagaattggtattagttcttcttcaaatgttctgtggaattcagcaataaatccatcaggtcctttgattttctttgatgggagaatttttattactgcttccatctcattacctcttattgatatattctggttttctgtttctttatggttcaatcttggtaccccttttgctatataacacagattctaatatgttgtgcttctattttcgtttttttcaataagcgtttaaatttcttaatttattcattgaaccattgatctatcagaaacacgttgtctaatttccaggtatttgtgcaggtttcatttctcttgttatttctagttttattccattgaggtcaaaaaagatacttgatatgatttctactttttcaaatttgttaagacttgttttgtgatctaaaatatggtctatcctgtagaatgtttcatgtgctggtgagaaaaatctgtattttgcagcagttggatgaaatgttctgtaaatgcgtgttaggtccaattggcctagatatagtttaactctaatgtttctttgttgattttctgtctggaagatctgcatatggccataaatgggatgttgacgtgctccactattacggtgttgcagtctacttttatttttctattatctatctattaacaaattgttactataacaatcacaatttagcatttcttatagaaaaggtctgataaatttctttacttatgggggccggaaggggttctgggaaagtgtttgtctcctttattcctaaaggataactgtgcttggcacagtattcttgggtttttttcccccctcccttagcactctgaatatatcatcccattctcttttggcttgtagactttctgctaagaagtctgctgccaggtgtattggatttccctcatatgttatttgctttcttctctcactgctttcaagatcttctttttcagttacaatttgtcttgtggcattacaatttgggttgaatctgattggaatctttgaccttcctatacctgaatatatagatacatcaatatctggatctatctatctaatcatcatcatcatctattacttatccatatctagcttttcaaagtttgaaaacccttccattattacttctttaagtaataacactataataacacaataataataccactttgcctttctccagttccctttttcacttgaataacctgagtatttccttttgatgttgtctcatagataccatacgctttgtttattccttttaattctttctttttttctcctctgactgtgtacttccaaataaactgtcttcaagctcactgatcattctgtctgatcaattctgtgataatctccactgcattttttgtttcatttattgcattttcagctccagggattatgatttttgttattatttcaatctctctattaaatttatctgacaaatttatgaattggttctctgtgttttcctaaagttttttgagtttccttaaaacagctattttggattttttgtcttagaaatcacacatctccattactttagggtcagtttctggtgtcttattttgtctcattggtgaggtcatatttttctgaagtttcttgatcttgtggaagtgcaacaatgtgtgcacattaagacgttaagtatttgttttattactcacagtctggctttttgtgtgcctgtcctttttcagagttccttctaggcattctaagctttctgacggttgtgttccctgactgtgtgaccactgcagctgtctcagcactaagaagattttctaatctgaggctttctgtgagtctcatgaggactccgatacagctttccagcccaggtggatctggagaagacccaaggaaagtactgggctgcatgaaaacactggccagggaccttgggccaaaagtctgccctgttggccttgattggcatccctctcccagcaagttcctgcacagctgagatagttccccaattgcaataggaggtgccagagctgagactgagacccctcaggatcctctgtagtacagagcctggagagcccatctcattcatccagtcagatatgcctattttagcaggtctgagaacagatgagatagttcaccatctgtagcaagaggaaccagagctgagactgggtccccctgggatccagtacaggacagaggctaaggagcccattggtaagggttaaactcccaggctatgaggtatgggtgaatcttcctctgggtccttatataagcagttctgatgtgggacctcagctgaagaagcctgcagcagggcaaccaggcaactttcaggttcactgccaagactggtgtcagcaaacagatgaacctttctgccaaggcactggtgtgcacaatttcttctcagacccttgacaggtagttttgcttgcaaactcaaagccaaacagagaagtaattaacccccttagggcactagattatttctggacttgaacccagaagcaatactggcaaggcagatcagccacctggatatctgtctgcactctcaaaattaccttcttagatctttagctccactgggcttttacaaactcctatctatgcgcagaatatcttctattctgccatcttggtgacatcactttgatcagtttcagctttctttgaatgagtgtttgcatggcatatctttttttttctcctcttacttttaacctactgatatcattaattttaaagccaagcaaggtggagaattgtggttgtgagtgtccagttgccagtctgctcctccagctaaggtattccctccaccaccctctgccctcttcctgtttctcctccacctaaatgtccatgctgaaaagccctacacaaattacattatcccattattcatagaggacctttatttttcttgactactgattttctgagatcctctctctcaaccctctttcttctcagtttatctcccattctcatttatgtctcagtcaaaatatcatgttttatttttcttgctgtcatagtggtccactcagccctagatagcatctagttgcccagctgtagccagtgtactgcaatgataattatttcctttgggttgatgtttcaggactagactcaagggggagaagacatgtgggtaagggaccagggattgaggattggaggagtctcctcaccacttcagccctgctaatgttctcaagacaagaatgatgacaacaagtgatattgattttactca

SEQ ID NO: 5625 - DNA, 60920 bp, Homo sapiens
  SELL gene - 166391466 - 166412385 of chr1; NCBI Entrez Gene ID: 6402; Build 35; sequence includes 20,000 bases upstream of initiation codon and 20,000 bases downstream of termination codon of the gene
aataatagtgtgaacttcataggctcatggttacatggtgcctggcacacaggacacattcaataaactgtaattctgtgtccctgcgaggaacatgtactcacctcatctaggtggtaacaagacgttgcagtagaaatgagtgagttacagagtccagggtatcttggttcatgctctggcctctggctctgtaatgactagccgtgtagcatggagcaagtcacttgaatgaaatgaggtctcagttcctaaatttgtacattaagagagttagatgagcttctctccaagattccttagcacagcgttgtgcagtagagcttttgtgataatggaaatgttccatagctgtgttttccagtgtgtacctatgagccacatgtggttattgagtacttgaaatgtggctggtgacactgaggaactgaattttaaatgttatttgatttcaacgaattcaagtttaaatttgagtagccacacagatagtggctactatagtagacagtgcagcattagggttttaaaatttgtaatgtattctagtacttaaatttgaaatatagctttgtgaatggttctcatcctggttggaagcttactgtagtatttttagcagttgtgagaaaagtaacaagaaatttgttgtggtacctaagtttgctgtgtttgttcatataatttgaacagttttgaggtaaacacaattacactactctccccatatcactcaatatttcttttttatggttgtcatcactgcttttttgttgttgttgttatggatcagcattttcttgaataaaagaaaaggggtagaattacagtcaattttacaaattccattagaaattttataaatttttaaactaaaaaaaaaaaaaaccaaactgtagttctagtttccagtgttcttatctgttaaaggtgagagatgagcagaactgatttgggtttctttttcagttgtgaactgtacagccctggaatcccctgagcatggaagcctggtttgcagtcacccactgggaaacttcagctacaattcttcctgctctatcagctgtgataggggttacctgccaagcagcatggagaccatgcagtgtatgtcctctggagaatggagtgctcctattccagcctgcaatggtaaatccctctgagaatgcacagaacgttctgtaactcatccctcattgcttctgttttttgattcaacttacattttcaaaacttcagggaaagttttttttttgtttttgtttttaatacaatttgttctctcagccaatgtatattgccaacccagtacctgcttgggttgagagaggtttttttattctatgcttgaaatgggtgtttctgaggctctggtgatttgtaagggagaccataaaacaataaagctctagaaatctcaatggatttctcatcttgtttccctgtttaacttttccaagccatgggactaacttaagaccatgatagtcaagcagtcttagtatctctttttctctcttaattttatctttctgaaccagaggccaaaaaaagaaaaatcagttcttcaggctctgatgggctaaaataaatgaatagcctacgtatgtcagtactagtcataactcctaatctggaatctattttttttaaatttttacctcacgtaaatgataacatagattagagaccactcagcataggcaaagtggaaatcagaaaagatagaatatccatgaaaaagaataaaagcttttattctggctgtgcatgtccctaagaattgacataggactttgggatctaccctttgaaggcagcttcctcactctgttaggcacccagctcaataggaagtgaaaagatcattcttctgtaaaattcatggtgctctttaaaatcctcagtggttgagtgtgatgctgtgacaaatccagccaatgggttcgtggaatgtttccaaaaccctggaagcttcccatggaacacaacctgtacatttgactgtgaagaaggatttgaactaatgggagcccagagccttcagtgtacctcatctgggaattgggacaacgagaagccaacgtgtaaaggtagagttgttccacatggagacttactgtgaacattctttctctcaacccatactggaaatgggcaagctaattctaggccgtgctaatatcaatgcgtatatttgttacagctgtgacatgcagggccgtccgccagcctcagaatggctctgtgaggtgcagccattcccctgctggagagttcaccttcaaatcatcctgcaacttcacctgtgaggaaggcttcatgttgcagggaccagcccaggttgaatgcaccactcaagggcagtggacacagcaaatcccagtttgtgaaggtaagcttgagatccttcgatttatactttcttaaagaacaaccatcttcaaacttggacagtgaaaaaaaaaaccaatacccactttaactatagaaatcagatttgatgagcaaccctcgtatctttgagattcatttaaaagaactaatgtttggccagggaaaggatcatatgtgttaagaatgaattctttgctgtttttttttaactgtgatgtgctgataaaactttgtagacattagcatggaatagacagaattcttaatctaaaggaatcatattagaaaattcggaaagcagaataatgagaacatgatttgaatgtaaaactctcatcacacctgtcttctgaaatggctcataattagcagtgatgagactgtttcaagcatggtgtcagctacagagatagtattgatgcatatataagcagtaaattttaattcactttaaagtgagagcaaggatattgaaaacaagcagtttttactatcaggcactggccttgtcctagccaaagccagcacagaatgatttccagtagcaaaacataacacaaaaaccaaactgcaaaacagacaaattttataggggtgctttcttttctttctttttggcaccatctataaacatccatgacccatatgttgtcctcagactgcgtgaaatctttccttggaccataatttattttgtgtgttagaagaacagtgctcaggaactaatgttctgattaattagtcttttaattagtgccatgatcagtgagggggctgaaattcaaagaaaacacagccatcttcccatttgtccagggaattataaagaatcttcagttctccaagtgttgcttgaatgaactgggttcactcaacaaacgccaagtactctctagttccactgcaatattttctgaccatcattttgatgtctcagctttccagtgcacagccttgtccaaccccgagcgaggctacatgaattgtcttcctagtgcttctggcagtttccgttatgggtccagctgtgagttctcctgtgagcagggttttgtgttgaagggatccaaaaggctccaatgtggccccacaggggagtgggacaacgagaagcccacatgtgaaggtacagtctttgtttttattttattttaagataaaaagaactattgaagagcttgggaacttggttaccttgggaaacgtattgctggagatgcaaacaaacttctaaagtgctctctcgtgtgttccagctgtgagatgcgatgctgtccaccagcccccgaagggtttggtgaggtgtgctcattcccctattggagaattcacctacaagtcctcttgtgccttcagctgtgaggagggatttgaattacatggatcaactcaacttgagtgcacatctcagggacaatggacagaagaggttccttcctgccaaggtagaattgagtgcagacttttttagggtacaggtcaaatacttcataaagtttctgaacctagattgccccaaaggggtttggtcctaatttcctacatgctgaaaactaagtagcgcttacactttacattcattgttgacttttaagcaagttttggaagttttccagtagatttttctgaaactctgcctgtgtacctaacatttgcagtggtaaaatgttcaagcctggcagttccgggaaagatcaacatgagctgcagtggggagcccgtgtttggcactgtgtgcaagttcgcctgtcctgaaggatggacgctcaatggctctgcagctcggacatgtggagccacaggacactggtctggcctgctacctacctgtgaaggtgatgcattgattgatggtggttgtctggtgattaaaaagaaaaagggggagctatcttgttacagtaatcaactattcattatatccaaaccagaaagttcgcccaggttgacaagttgtgaatattaagttgtatggggatagagaaaaaacagaagttgcatgttgatggaaagggtagaattctgacaactggaaaaaggagacagagagaggagaggagaaaggggaaatggaaaacaagagggagtgagagcaagagagcaagcaagtgcagtgtttattaaccaaggtgtggtgtggtattgtgaacgagcttggcaagttagagttctgcctgccaatggtggaaatagcttcaaaggtggcttggagcagatctcaaaggcctgtaatgccacatctctgcttcttgtattaaactagatagctcttctgctcctagtaatgaatgtacagaaaaaaggccaaagggacaggacggagagactttaacatcaattcttcctcatgacctttcttcgtctcttacttccttagctcccactgagtccaacattcccttggtagctggactttctgctgctggactctccctcctgacattagcaccatttctcctctggcttcggaaatgcttacggaaaggtgaggaagtttatgaatgtacttcaaaaatgtttttgaaaatacatttctttctcattgataagtcatggtcttgcttactgatttaaacaataattagaatctggataaaatgcagtataattaagcagaagtattaagaaaagagttagtagtacaactcagtgtgggaagtgtttcaggaaataaaaatgttagtcgtgcctaatattgtacaactccagggggtgctattcatgttgaattatatgatgcctcccggaattgtgcaatggaactgccatgatgagcactctaaggaaaatggataaaattcttcctaaggagatttatttggagtacaggcttaaatttgagagtctctcataaggaatatggaagcacatctgactacactcatggtttgtttggcttacatgtttaagagtacttaaaacatttttgagttaagttctgacgtttacaaaataggaaatctcacatttaaattaagactttggacttctcatgaaaaattgggagctgaattgggcaagatgaccccgtagctatttgctggcattaggaagctgctatgccctttggatggctgtgcactttgcattttaccctagatgccacagagccatgcttgtgctctgattattacagaggccctgaagcatcgagtttgcaacacttgatgaattaagtcatattgtatctggatttaatatatccttaaaagtcatttagtctgaattaatggttgtttgtcttttcttttgcagcaaagaaatttgttcctgccaggtaagttgcattcttatacaaagcatgccattgaacattccacatatttttctctcttcatgttggaagacagtgctttacctagtgttctcatgtattccacagcagctgccaaagccttgaatcagatggaagctaccaaaagccttcttacatcctttaagttcaaaagaatcaggtaagacttgtaaatcacaaatggttatgagagaggtatcttctctacatgctctgtttctccttgaaccctccaaacttgccaatatcttagggagggagcaggggagaaatcatcacctgggtattgttctggaaagttgctttattttttgtagaaggagaggaaagaaacggatctagctttattgtgtaatttcatttatgatagataataataatgaagatagctgacccttacattgcacttattatattctgggaatttttctaagctaggaactctgagataggggctggtactatatttcttatcttttctttttactttttttttttttaattttgagatggagtctcattctgttgcctagactggagtgcagtggcatgatcttggctcactgcaacctccacctcctgcgttcaagcaattctcctgcctcagcctcctgagtagctgggattacaggtgcctgccaccacacccagctaatttttgtatttttagtagagattttgtattttttcgtcatgttggccaggctgatcttgaactcctgatccacccgccttggcctctcaaagtgctgggattacaggcgtgagccactgggcctggcctgttactttatttcttatcacacagatgaagaaaatgagacagagaagttaagtaaattgtctgaaatctcaaagctagtaagtggtgtagccaggattcaaactctggcagtctggttctaaaatttgtgttcttaactactccgacctgctttgagagaatttggaaaggtcaagtccctctgaatactttttaaaaaattaaaataactttttttgtgtgtgcggttttaagtttacagaaaaattgagcagaaagcacaaagagttccaacatatctccccaccaccccttcaattccccctgttattaacatcttatattagtgttacaactgatgggccaatattgatacattattattcattaatgtccacaggctacattagaattcactctgtgctgtgttgtatattctgtaggttttgacagaggtataatatgtagacatcatcactgtcctaactgaatagaattcgatgttcctacatggtctatcctagtgagagtgtctgtgttagaaggtacattttgttgtcatgatcagtatgcagaatattaagtgttctgatgacatgcatgtttatatttacagaaacaggtgcatctggggaactagagggatacactgaagttaacagagacagataactctcctcgggtctctggcccttcttgcctactatgccagatgcctttatggctgaaaccgcaacacccatcaccacttcaatagatcaaagtccagcaggcaaggacggccttcaactgaaaagactcagtgttccctttcctactctcaggatcaagaaagtgttggctaatgaagggaaaggatattttcttccaagcaaaggtgaagagaccaagactctgaaatctcagaattccttttctaactctcccttgctcgctgtaaaatcttggcacagaaacacaatattttgtggctttctttcttttgcccttcacagtgtttcgacagctgattacacagttgctgtcataagaatgaataataattatccagagtttagaggaaaaaaatgactaaaaatattataacttaaaaaaatgacagatgttgaatgcccacaggcaaatgcatggagggttgttaatggtgcaaatcctactgaatgctctgtgcgagggttactatgcacaatttaatcactttcatccctatgggattcagtgcttcttaaagagttcttaaggattgtgatatttttacttgcattgaatatattataatcttccatacttcttcattcaatacaagtgtggtagggacttaaaaaacttgtaaatgctgtcaactatgatatggtaaaagttacttattctagattaccccctcattgtttattaacaaattatgttacatctgttttaaatttatttcaaaaagggaaactattgtcccctagcaaggcatgatgttaaccagaataaagttctgagtgtttttactacagttgttttttgaaaacatggtagaattggagagtaaaaactgaatggaaggtttgtatattgtcagatattttttcagaaatatgtggtttccacgatgaaaaacttccatgaggccaaacgttttgaactaataaaagcataaatgcaaacacacaaaggtataattttatgaatgtctttgttggaaaagaatacagaaagatggatgtgctttgcattcctacaaagatgtttgtcagatatgatatgtaaacataattcttgtatattatggaagattttaaattcacaatagaaactcaccatgtaaaagagtcatctggtagatttttaacgaatgaagatgtctaatagttattccctatttgttttcttctgtatgttagggtgctctggaagagaggaatgcctgtgtgagcaagcatttatgtttatttataagcagatttaacaattccaaaggaatctccagttttcagttgatcactggcaatgaaaaattctcagtcagtaattgccaaagctgctctagccttgaggagtgtgagaatcaaaactctcctacacttccattaacttagcatgtgttgaaaaaaaagtttcagagaagttctggctgaacactggcaacaacaaagccaacagtcaaaacagagatgtgataaggatcagaacagcagaggttcttttaaaggggcagaaaaactctgggaaataagagagaacaactactgtgatcaggctatgtatggaatacagtgttattttctttgaaattgtttaagtgttgtaaatatttatgtaaactgcattagaaattagctgtgtgaaataccagtgtggtttgtgtttgagttttattgagaattttaaattataacttaaaatattttataatttttaaagtatatatttatttaagcttatgtcagacctatttgacataacactataaaggttgacaataaatgtgcttatgtttatctctgtgttaagtctctttcttagaaattttatttagataaaactcactttccataaaacgcaccctttaaaaatgtatgtgattgtacagctatcaccattgtttaactccagaagatttctatcaccctgataaaacattatttctcagtgtgtctgtgagagtatttccaaagagattagtatttaattggtagactaagaggattgccttcaccaatgtgggtggccatgatccaacccattgaggccctatgtagagcaaaaagagtgaattcactgtctttttaagctgggacacccatcttctcctgccttccaacactggcactcttggttccagggcctttggactttgaagtattccactggctttcctggttctcagctcgtagacagcaggccatgggacttctcagcttccataattgtgtgagacaatttctataaaaaataccacacccccacaccccaacacacacacgcacacacgcacacacacacacacacaccattggttctgtttctctggagaactccaactaatacatgtcccttcacgagaactggctacttacactaggtctcctctttaatgccctcataatccatatgtctcttccttcctttaattgtaataaataattatagattattacttgcacaattgtttgtttaatgtctgtcttccccactaaactctaagttccttaggggtagggaaaaattaccttgttcattgctgtattcccagaacctagcacattcctgatacagagtggacatccaacaaatatttattgaatgaataaatcaatgcatgggtgaatgaatgcatattttggctcataataagaagtagaatcacttttcacaaatggaatgagtggtctcagaaggctagactttaaaacctagttatgtatcaactgcccccactactgccagtttgcaatttaatatatctatctctcaaaagtccagcaattatttcaatccccatttacagaaatggggcttgtaggaatcattgtgagggctaaaggtcaatagaaataaaagggaaaaaattttttaaaaaaggaggtgtaaaaatagcacaagaggaagtaataagagagaaaaaggaaagatactaaaagaaaaaatattgagatgcatagagtaaacagtacagatgctacagaagggaaagatctagttttgtattcactcacctgggagcttaaaacatccacacaagtgctgggcatggtgactcacgcctgtaatcccagcactttgggaggtggaggcgggtggatcacgaggtcaagagatcaagaccatcctggccaacatggcgaaaccccaactctactaaaaatacaaaaattagctgggcatagtggtgcgtgcctatagtcccagctactcaagaggctgaggcagaagaatcgcttgagcctgggaggcggagtttgcagtgagcagagatcacgccactgcactccagcctggcgacagagcgagactctgtctcagaaaaaaaaaaaaaaaaaaaaaaaatccacacaagcgtacatgctaatgtgcacacacatacacagagagatatattcctaaaccctaacccacaggtaatttgccctgaagataatgaaaattaagcttcagggcccattacttagataaacctttaaattacaagggcctgggtcctaggaatgtgtttacatggtaatacatctttgtaagatctataaaagcaagacgcttttacgttccttttctcaaagagagacctcaaattatataaaccttggaccctgaaaaactcctgaatgttcctgaaccaacccaaaatattctgattcagtaggattgggagcgaatgttgcgtgtatatttttttgtttttttaatgttaccaagtgatttggatgcacaaccaggtttggaaattactgaaaaaggactataggctgattagtttaaagtgtccctgatgtctatgtggtatttctggagctttgccaccgttgattgggtcatataccatataacactatgtagtttgggaaaagtggacaatgggtaacattcatttgcacagtgcggtgatggtcacatccccccgtgttgagtaattagctatccatctgtatgtactggctgtagcaatatagttcttttcaacaagaaataaagagaattcagacacaacattcacagttgtaaatatcaagaaaacagaataaattcattaaacaaaaatccaattttggaagcaagatatatctgccaacagtgtaactgtccaatgggttccttttgtttgctgcccagataaaggtgatttatcaagatgggaactgcaatagagaaagaatttaattcatgcagagccagccaaatgggagaccggggttttgttattactgaaatcagcctcccccaaaattctaaggctaagatttttcaaggataatttggcaggcagaggaatggttgctgctgattggttgggatgcaatcatagcggtgtggaaaatggtccttgtgcatgttaagtctgcttctgggtggagccacaggacttgttgatgggtccaggtagagccaccagttgaaatgtaagaatctgaaaagacatctcaaaaggccaatcagattctatgatagtgctgttatctgcaggagtaattggcgatgttgcaaatcttgtgacctccggaataacagttggtaattgtttacatctacaccttagcagaattcaggctcctctcatcctcctaacctttcattggtggtcttttattagttttacaaaggcagtttagttttggagaagggctattatcatttaaactataaactaaatttctgccaaagatagcttggcccaagctcaggaattattaagggcagtctggaaggtaaaggcaagatgggggttgattatttcagatctctttcactgtcataattttctcactattataatttttgtcaaggcagttttaatagtgcagcatagacttgaaataaataaggagaaaccaggtggggcatagtggctcatgcctataatctcagcactttgggaggctgaggcaggtggatcacctgaggttaggagttcgagaccagcttggccaacatggcaaaaccccttctctaataaaaatacaaaatcttagccaggcgtagtggcatgcacctgtagtcccagctactcgggaggctgagacatgagaatcacttgaaccagggagatggaggctgcagtgagccgagatcataccactgcactccagcctgggcaacagagtgagaccctgtctcaaaaaaaaaaaaaaaaaagaaacaaataaacaaacaaacaagtaaggagaaacctgatggttagaaataaggaaatgtttaatggcctggaggttcaatgaggtagaagtaaaaagcattgcaatgagatacttgagcaatacacttgcaagaataggagacagtggttaaagagtgaagtgtttgaacatgtgactttagagacggtacagtcttaggtgttgtcgaggttgaggctgtgcctagggaaggaggtagctcaagtctagtggaggaaaatgtcattggagagctgaggatctgggctgtggtattggttgtgccatggatggtgaagtcccgtaagactatgagaagtgcttacagggaaaggaagatcaggaactaggtgccaaagccaatcttgcatgaggagttgagaggtcactacaatgaggacagtgagatggtttatctcagtgtcacaagcttcaaagaagcagagttattttatttcttctttgtgtgtgtgtgtgtgtgtgttttacaagagggcagatgaataaacatatataagaggcactcattataaaggagaagattgcccctgccttccaaccctgaagtatgtgctgtgtggagaataaatattgtcatcttgagagatctgcaggggaagtgatgtcctagggaggcagtcgggctaatgacaaagcaaggaggtaggagaaaagtttgaacaggaaactggaagattgaggggagtttggtgatggtgaagacaggaatcccagagatggcaaggaagcatttgggatgaaaatcaaggttgggtcaggagagaacagtttaggtgaactgtgtaggagatagatgacagacagtaagaggggcttacatgccaaatgtaaggaaatgtgagccatggtgatttgtcctgataggattgtggaggtaggtgggcagttagttagttctctactgcacattccttttacccatgataaactgatagcaactgcagtgagtgcagccttggttggcagcaatgagcaaataaatcttgcggtcatctgtaatggaggcgtaggctagggaagggttgggtagtggtcctttgaccatcccttggacccagggatgctgctttcaatggcattcactggtacttccctcatgtctcatggcaggcaaacggttcttcagcactgggtcctctctccagggttttgtgatggttttataatgctcaccaactcgatctagttctaccttttgagggccacaaaacagtctaataaccactcttttccttaccacccatcaaatggctgttaatatatctccatgacctttcctattccaaatcttcttttggctgaatgtacattaaatatttttttttattgaggtgaagttcacacaacataaaacaaccatcttaaagtgtacaatccagtgacgtttatcgcattgtataaccaccatctctgatatggtttggatccgtgttctcactcaaatctcatgtcaaattgtaatccccagtgttggaggtggggcctggtgggaggtgatttgatcatgagggtggggtttctcatgaatgatttagtaccatcctcttggtactgtcttcatgatagtgaatgagttctcacaagatctggctgtttaaaagtgactgtcacctccccacatccctctcttgctcctgcttttgctatgtgatatgcctgctcccctttcaccttctgccatgattgtaagcttcctgaggccttaccagaagctgagcagatatcggcaccatgcttcctgtaaagcttgcagaagtgtaagccaattaaacatcttttctttataaattaccaagtctcaggtaattctttataacaatgcaagaatggcctaacaaaatgtctatctagttccaaaatatttttatcagaagaaaactctgtaccctataagcagttagtccccatttcttcctcagcccctgggaacctctaatctactttctgtctctatggatttacctcttctatatgtttcatataaatggaatcagacaacatgtaaccttttgtatctggcttcttttggaacaggaattaaaagaaattaaataatgtgtaagcggaaactcagttgtatgtaacaaaacccaactccccctgagaaagagaaagagctggagccctttaaaaattaactgcctgtttttctgtggctagtgagacttacctctcctcctttcccaggcattgtgaagaccctgtttctctagctgtgcagctgcaaggtcactagacagataaactcaagtcgcaaaacatgtttcttcttgaaaagtaagaaatgatgtaatgcatgtctcaattaattgaataactgtctttatttctcacttctgtagtatgcttccccctgcacagatacccctctctcccaccccacaaaatgcttaaaaggtaacttaactctttgttcagggctcagtcctttggatgttaatctgacttggccagtgcacctaaataataaatatcctcctgaaccccatcggtctctctgatttcttaaaaaatcccgcaatatttccactaccaaaatttgttgacacattggatatgacttgtgaaaaaaaagagaggtgtctcagttaactccaaaagttttggtctgagtaactggaaggatggagttataatccactgagatggaaaggctgtgggaagagccctacagattggaggagaaattcagaagttcagtttgggatatgtaaaatatgagaggcttattgaacaactaaatttgtttggggatggagatgttgagtaggcatttggctacaggagaatggttctggttgtacagaatttagaattcgttcgcatttaaatggtattcaaagtcaagagtgtgaattggaccaccaagttagtgaggttagacacagaagagcaaagcggtgatctctggagtactccaagggtttggaggttggggagatgagggagaatcaacacatgatacagaagaaatagccagtgaagtaggaggaaaaccaggagctccctggtgaagtaagatgaggatggagaataggctgtttgtgttagtgaagtgtaggaccttggtgagagcagtctcagggaattggtgtggctgaaagcctgattggacaagcttcaagacagaattacagcctgagcaacatagtgagatcctgtctctacaaaaataaaaaataaaaaaattagtcgagggttggggcatgtgcctgtagtcttagctacatgggaggctgagggagaaggggcactagaccctaggattccttgagtgcaatgagctatgatcgcaccactgcactctagcctgagtgacagagcagcattcccatctcttagagaaagagagagagagattgagagaattagaggagaggacttagaaaaaagtaagtctagatacttctttcagggtatagtgggagcactggcactttcacaagtctccctggctccacgtttttccccattttaccatgtcttccaagttcctgccataagttcagcttaatgatcaagagcatggatttggaactgattggcctctgttcaaattcccaaccatgtctcttactagttatgtgactaaggcaactttctttttttaaactttttttaaattatactttaatttctgggatacatgagcagaacgtgcaggtttgttacataggtatacatgtgccatggtggtttgctgcattcatcaacctgtcatctacattaggtatttctcctaatgctgttcctcccctagccccacatcccctgacatgccccagtgtgtgatgttcccctccctgtgtccatgtgttctcattgttcaactcccacttatgagtgagaatgggtaatgtttggttttctgttccagtgttagtttgctgagaatgacggtttccagcttcatccatgtccctgcaaaggacatgaactcatccttttttatggctgtatagtattccatgatgtatatgtgccacatcatctttatccagtttatcattggtgggcatttgggttggttccaactctttgctgttgtgaatagtgcctcaataaacataagtgtgcatgtgtctttatcgtagaatgatttataatcctttgggtatatacccagtaatgggattgctgggtcaaatggtttttctagttatagatccttgagaaatcgccacattgtcttccacaatgattgaactaatttacacttccaccaacactgtaaaaagcattcttatttctccacatcctctccagcatctgttgtttcctgactttttaataatcgccattctaactggcatgagatggcatctcattgtggttttgatttgcatttctctaatgaccagtgatgatgagctttttttcatatgtttgttgactgcataaacttcttcttttgagaagcatctgttcatatccttcactcactttttgatggtgttgtttgttttttcttgtaaatttgtttaagtttcttgtagattttggatattagccctttgtcaggtgaatagattgcaaaaattttctcccattctgtaggtttcctgttcactttgatgatagtttttttttttctactgtgcagaagctctttagtttaattagatcccatttgtcaattttggcttttgttgctgttgcttttggtgttttagtcatgaagtctttgcccatacctacgtcctgaatggtattgcctaggttttctcctagaatttttatggttttaggtcttccatttaagtctttaatccatcttgagttaatttttatataaggtgtaaggaagggatccagtttcagttttctgcatatggctagccagttttcccaacatcatttattaaatggggaatcctttcccaattgcttctttttgtcagctttgtcaaagatcagatggttgtagatgtgtggtgttatttctgatgcctctgttctgttccgttggtccatatatctgtttttgtaccagcaccatgctgttttggttactatagccttgtagtatagtttgaagtcaggtagcatgatgcctccagctttgttctttttgcttaggattgtcttggctatacaagctcttttttggttccatatgaaatttaaagtagtttttttctaattctgtgaaaaaagtcagtagtagcttgatggggatagcactgaatctataaattaccttgggcagtatggtcattttcatgatattgattcttcctacccatgagcatggaatgtttttccattcatttgtgtcctctcttatttccttgagcagtggtttgtagttctccttgaataggtccttcacattccttgtaagttggattcctaggtattttattctctttgtagcaatcgtgaatgggagttcactcatgatttggctctctgtttgtctattattgctgtataggaattcttgtgattttttcacattgattttgtaacctgagactttgctgaagttgctgatcagtttaaggagattttgggctgagacaatgggattttctaaatatacaatcatgtcatctgcaaacagacacaatttgacttcctctcttctatttgaatacactttatttctttctcttgcctgattgccctggccagaacttccaatactatgttgaacaggagtggtgagagaggcatacttgtcttgtgccagtttttaaagggaacgctttcagtttttgcccattcagtatgctattggctgtgggtttgtcataaatagctcttattattttgagatacgttccatcaatacctagtttattgagagtttttagcatgaaggggtgttgaattttatccaaggccttttctgcatctattgagataatcacgtggtttttgtgattggttctgtttacgtaatggattctgtttattgatttgtgtatgttgaaccagccttgcattccagggatgaagccaacttgattgtggttgataagctttttgatgtgctgctggattcagtttgccgtattttattgagtattttcgcaatgatgttcatcagggatattggcctgaaattttctttttttgttgtgtctctgccaggttttagtatcaggatgatgctggcctcataaaatgagtgagggaggagttcctctttttctattctctggaatagtttcagaaggaatggtaccagcacctctttgtacctctggtagaatttggctgtgaatccatctggtcctgggctttttttagttggtaggctattaattgctgccttaatttcagaacttgttattagtctattcagggatttgacttcttcctggtttagtcttgggagggtgtatgtgtccaggaatttatccatttcttctagattttctagtttatttgtgtaaagatgtttatagtaatctctgatggtagtttgtatttctacgggatcagtggtaatatcccctttaccattttttattgtgtctattgattcttctttcttattagtctagctagtggtccatctattttgttaatcttttcaaaatgcagctcctggatttattgattttttgaaggctttttcgtgtctctacctcctatggttctgctctgatcttagttatttcttgtctttcgctagtttttgaatttgtttcttaacctctttgagactctttagaatggggataataatcatatctatagcagagagctgttataaagattaaacaatataataaatatggggcgctgagcttcagagtttttgttgttgttattattattttcctaaaaatgcaaatctgatttgcatttgactcattgactcacatcagtgggtcttcctttttattgtccttcatcatatgggtcctaatttcacatgcagtcttataaaaccatctcattttatagtccaagaatattaaaggtacttgtaggctcccaaacctacacggtgaaaagctagagagcatgggctctcttcaggggttaacttcaggaagtgccactaacaaggacgtccactaggtggtgagcaaggaaagacggaggtgaaggaaccgaaacgagtcaagtccactgcttagctctactgaagttttgcaaacatcataaatatgtctgaaatgcagttttgatttgtagtatttgcaatttccaagggccatttaccacaggtagccaagagttagtttagcatttatgaaaaagataggggagggtggtggaaaagaaggaggaggaggagagagagaaggaggaagaggagaacaagaaccaaacaaaaacaagaacaagaacaagtagaagaagaggagcaggaggaaaaagaagaggaagaagaacagcaacaacaatgagtgaaggaggaggagggtaaggaaagatgcataggagaatggaaggaaggatagaaaggagggaaggaagagagaatctagtcacattactttctgatcagcagttcatttttgtctcagtgggaggcaatagaggccagtctaggaaaggggtggggaaagaggaaagagaagtgcaggaggaaggggagggaaaaggggaggaggaggaggatgtgagactgggttagagaaatgaaagaaagcaaggctttctgttgacattcagtgcagtctacctgcagcacagcacactccctttgggcaaggacctgagacccttgtgctaagtcaagaggctcaatgggctgcagaagaactagagaaggaccaagcaaagccatggtgagcctttcagcctaaaagacgtttagatgctcagatagaaactcttggggttgtagaggcaggtggcaaggataggaatcaccccatttcaattctggttttaaataatatagaaactaaacattttctcagaccctcaaaaaaagtgatcctgaaatctttcttctcagatatgctgatttcctcttcttgactttgtctctggggagactcttgaagaaatactattgaaatcagatcttttgcaataaacactgtgtctacctgagaagtgatatgctttggaagatagaatttttttaaaattatactttaagttctagggtacatgtgcacaacatacaggtttgtcacacatgtatacatgtgccatgttggtgtgctgcacccattaactcgtcatttacattaagtatattttaaggtgtgcaggaaatttgtgactttgtcatttcagttgctcaaaaaggtatttctttttattaaaaaaagaaatacttttctttcctggtgtctggctatctaattttttttttttttaggtatttgaggcattgacccattatgatcaagagtgaggctataacattaaatataagcatcaatagttaattaagcagcaacaatactttaaaaaatatacatagtaaatattaaatagttttatctaatagctcagcagaaaagcaggtataaaaattaccaaaccatagaaaaaattcagggcagtaccgattagcaacttgagactaaagcgtaaaaataaaatagaacaaaacaaaactgtgcatcagttctgatgtaaatttgaagtaatttttcatctatgtctgagaaacctgttacctcagacagggttagtagacatatgtgttttattctgattattaagaaagttgtaagcaccacctcaaaggctataaatgtgtggtttaagagtatacatctaaatataattttgtatttcatttgcagatatttccatggaaatgtcagagcacccagagggacttatggaacatcttcaagttgtgggggtggacaatgctctgttgtggtatgttatgatatttatatatcgctaagtctattttacttatattcatttttcttaaatatccactagttatacatagtctaagggaaaattatttcacagagctgttaattctatcccttctgtaaacatctcttttcttcttacctttagttcttccccagaaactcctgaacactatttttaacctataatagcccatgctgtagagttcaaatcccaataaccccacaaaatccctcaattataaaggaataatgttaattaagaaatctctgttaaggtacttacaatctgtaccaaatatttagcacctcattttctattttttattcatagttcagtgtacattaatgtcatttctacaattacaatacgagcttattaagggacgggggtttatcattttttggtccttctcccattgttgtgacaaattttatatctgattcttgaagactctccagcaatagctttgaacttggtttttcatttcctaagtaaactaatgtcttctttctccctagcctggattttcagctctagccaagcaaacatgctaactctcccgttcacacattccttatgccatgtctgcactgtgtcacatagaaacttagtgctcttttcatacaacaggtattttctgagtccctacaatgtgtgaaatttatgctaggcactaaggatacagcagtggacacaacagttttttccctcttagaacttgcattctagtggaatgctcattcaaaactctgttcaaaatgtttattttatgatgctctttaccatcaattatatctgtttctttactgtattaaatagtgattcatgtagatcataccatgcttagaatgccatatattattatgaagtcattgtgtaattatgtgtttaattagatatcttcaaagccctcatatttgatgggtccatatgtttattaaacatcatcagttgagtctctttgtgtatagaacatgatctaatgaatttcataatcctataccatttggctttgtaaattgttctttttaaaaattatacagttagatatataagagttgagtggtatattgggcttttccagaagcagttcttcctatggtaaaataaaatgttttttatgtaaaagaggttacttaaaagtatgtcactgttcttcctgtccttattatgcttctcccataggtacatatgtgttggccttcaagaaatgattccaggattaaaaagtatacgtaaattgtatagttatatgatattacacggtaattagttgtaaatcattaacagctacaaagaaaaagaaatatgaatgtctaaaatatgttggttaaatttcacctgaaataattttgagaaaaaaattaataagaaaataaacctagaaaaccactaaatttgtttcaaatagaaccttagataaaagcatcttatattcaagccagaaggtctaggttctacttcaaatctgcaaacaactattctgtgatcctgagatggtcacatacactcttaggctctgtttcctcatctctaagtgtctagctcagcctggagtagtgctaggttctttttagctgtaacattatgtaagtctgcataggtcacactgatgtcttgcagatttcctggcacatcatggaaccgactgctggacttaccattattctgaaaaacccatgaactggcaaagggctagaagattctgccgagacaattacacagatttagttgccatacaaaacaaggcggaaattgagtatctggagaagactctgcctttcagtcgttcttactactggataggaatccggaagataggaggaatatggacgtgggtgggaaccaacaaatctcttactgaagaagcagagaactggggagatggtgagcccaacaacaagaagaacaaggaggactgcgtggagatctatatcaagagaaacaaagatgcaggcaaatggaacgatgacgcctgccacaaactaaaggcagccctctgttacacaggtagggagtgacaagacggctatgctgcctcagactcaggaagggccacggttaagagaatactcagatttaccccatggaaaggtggggggatgagaacagcttctggttcattctaaaatacatctagccctctatataatcttgcatcgtgtcactcctaagaatttttggtgtgtaagatttgtccctgtgcacaaaagctatacccctaaatcaagttacatcaaaatgatagatctacgtaggaagtacagaggaagagctagacaatcagtgcctttgataataaggcaggggaggagaagctgacagctggggccagttggaaacttaggctcacatcacctcagttttcacattgtgaagtagagagtgtggtgctgcgtgcttccttcttggtctaaccttatataattttatataaaaattgcactatctttggtgtatgaatatttctgtaaaatcttctacaattccaaaacagccagcattttccaagtgatgttttaataatgaaccatagttaatttggtctcttataaattggactctaccgttttagcaaatttggactttttaatctttgatttctataaagaaagggattgccaagaaataattgcatgcagaaatgattgaggtcaggtcatcatttaaccttctcactcattaaaaacaagtaatttcaagagtttcaaggtatgccactaagtttcctataagtgttacagaatattagtattggtaatttcattccaaaagcaaataaatgcctatgactatatgcttagtgtattttatacgtaaaaattttagcatatgatttttatgctatgaatttacaaataaacctttcctgattatttaaatcatctcagacaaaaggttatctatgtctaaagaaatgactttgagtactaaaatgtaatcacattaaaatattttttttctgacctccttaaagcttcttgccagccctggtcatgcagtggccatggagaatgtgtagaaatcatcaataattacacctgcaactgtgatgtggggtactatgggccccagtgtcagtttggtaagtctctttcctttctttgcttcttcttaggtaaagtcacaggaatcattatagcttatcatgaagctggttggaacaaaatgatactagccactctgagaaatgggaagttttgatcagaaagctctgctttcacaatattgttacctttccgtaaagatttcataagtcagcatgaagtttcgactcacttctcaacaagtctttttgagtaccacaagaagcacagtgttgggataaaagctgtcagggttaccataaggaattagcatggtagattcccgctctcaagaagctcacgatctaatgagcttgttagattaattagaactctaaggtctggaagaaactatgccatttatcattaggaggctgagttacccagaaagtatcttgctttttccttctagtagttcctttccttcttgcagttctccacacttaacacatgtgctctgtagcacactgactttgctggtggccttctctctcattttgcacatggccaaaaaacatgtcatctttaagacattgttcaaagacagtttcttctaggaagctttcttagttctgatagctccacatatttcttcctcatttctcccacttatgttgaagtcatctgttcacttgtccgtctcctctggtactgaaaacttcttgagatcagtaagtgtcctatttatcattgcatctttgggatccacaaaatgcctgtatatatgaggcacttgcttgtgagcctgaattgaattggacaatttaattttttaaaaaagcaatgtttgtaaacaataaagaattaaaaccaaaatacatttaaatgtcaaccaactgaaatagatctatagatctaactcatttcacttgatccctgggccatgactccttcctaatactttaccctcaccccatttttgaactctattttttaacccttatgttattggtatgcctattttactcatttttaattattggtatgcctatttcactcatttttaacattttacttttctttgtcttggtttctctcatatcactcttttctcattctttctacctgtgatcatttctcctgagatccttcatgagcacttatccaggaccataaactactataatttctcagcttttgtcttttgtatattgctcttctgactctaatctacatgtatcctttggtcaaacttactgacttttgcggactcacaaatctatgtgatctttggactgataagcctatctccagctctgaactcaaatatgctaaggatgtcctttgggatgtttaaaagactataaaaccaattgttcccagtcagcttttctcttcgtatttcttatctcagtatgtggaatcaccatttacatgggcaccctggtatgagactctcttaactcccccaacatttatgcagggtaacattctaccaatttttacaacttagtgtttttctaatttgtcttccacttgtcaactctactaccattgccgtcattatctttcttctagattcttgcaatagtttattagatgagttccacaattttaaattagctcccctcaaatacattattcatactacagggagactgatcaattaaaagcaattaaaacacatcacacatacatgacaatccacccattaatttctacctaccattttgtcctacagggtgaaatctaagctcttcaagccccagagtaatgcttgatatataatagatactctttaaatcaatgaaaaaagataacattttctcttagttcccatgtttctccctaatctcatctcatatagtttccaaatacaaaaattcttctgattccttgagtccattcttccttgaagtctctagagcaaggtagcaataatggcttaaatttgacagatgaggaataagacatgaaagttgtactgtttactaaatggcatggcagggtctaaaatgtgaaaactttgatttccaagtcttaaatttacctattgtaccaccaatcagaacagggaaatagatacagtttctggagagggttgtcaaaatcaaaagagttaaaattctggaactgagctagaatagaagacagaattgaggtcaaaatgcttcctagacttttatattctctccttgcaaagaaggcttattatggagacccactctttctctgaacatcttgctcccaatactctagtagactcaggggctctgatgtgatagttatttcccgactaagctggtcattcccagttacacctatttggctttaaggattctcactacagataatgctgaagataataatatgaagactagctaatgtttacttagaatttctgatgagtcaggctttgttctaaggtccttgacttatgctaattgaattacatttagtttccatatcaatttgataaagataacacaatttcattattcctcttatatagatgaagaaactgaagttggagggttcaagtaaccttgtttaaaggcacatggttatcaagtggcagggctaggattcaaatccaggcgtcagttcctcttaactcttccccatactgtttctttccctattgaagtgattcagtgtgagcctttggaggccccagagctgggtaccatggactgtactcaccctttgggaaacttcagcttcagctcacagtgtgccttcagctgctctgaaggaacaaacttaactgggattgaagaaaccacctgtggaccatttggaaactggtcatctccagaaccaacctgtcaaggtgagtaacttcagactagaggttttgtcatgcaatcctgggcttacagtcagaacattcagtagaagtttgctgagaagtcaaacttaggagcctaatttaacctaactttgtttaacctactgtgatgtttctcaaaggacttattctaactaaatttttttgaaaaacctcccaaacaaaaagtaaaaaccaaatacccctgaagccatctcccagtgtgtaacatgacttatagcaatacagcatggttatactgtgttttttatttttctcattgccattgcataaataatgtcttgttgaacctcagttacattttggttcttctcctctcaataacacctgttttatgtggtgtcctacttaataccaaccagtttccttcccagggtagtggaggtctttcttggttgttttatttggcttattcttaaaatcacttttacttttcctcatgcataaacttttaggagaataacaactgaaaaacaaaaacacaatctcttgatcttttcaagtttgaaataaggtaggtttttttttttttttcatttttaactgccaaccttatctccatatgggagaaaaccaatgtcatctgaacttacgaagttttggttaacttttctacaagtatgctcctgatgcattagtttaagtagtttaattcttagaagtgctatcaaaatcccttattgaaattataaaactgtcaacccacctactggaatttacggaagttggacttgcttcagtgaattgggatgtttttcaaaatgcttgggtagatatcagaacagatgaaacggcagagattctctgagaatatcccataagagcccttgatgcagaggccatatggcatggtacttccagcagaaggggagggtcaccttagctagggcagcagcctggagtagctactcctctccccacagctttcaatgcttccttgccttcatctctcattcaccacccaccatcattctcaagaaaataaagcctggaagcaatatcacaagtaatgtagtcaggcagctttggctaaaaatcctttgctcaagggagggtctctactcagaaatactgttttgtcttttttttttttttctttttcattgaagtgattcagtgtgagcctctatcagcaccagatttggggatcatgaactgtagccatcccctggccagcttcagctttacctctgcatgtaccttcatctgctcagaaggaactgagttaattgggaagaagaaaaccatttgtgaatcatctggaatctggtcaaatcctagtccaatatgtcaaagtgagtaagtttgtcctggaaaactgaaatcttaacgatggagctgatggatgagcagatatgaggaaagacatacataaacatttacatgttgttttgctaagaatatgtggcctagaaataaatttgtatgcttaactcactgtaaaatctttggctggtctttcctcctcctttaatgacaatcatttcctttttttgttctcacctcttgccatcttaactcctaaaatctgaactcactgatttactttttacccattcttctattccactacaatctaacatctctgttagcccattgaaatgcctgtaaaaggtcactaatgaccacctacttccccaaataatggatactcctgaatcatcactaagctaatgcctccaaaatctatctgtatatgagaagaatcatgtcttgttcatctttgtataccctccacctgacacagtgcctggcaataggtgctaaagcaaatgcatgttaagctagcatgtgaaagaatagctacctgtgtctgctcctgagactatctgcatggatgacaaaagtctttaaatggtaggatctacagaagctgtcagaaatgctgatctctgtgtgctgcgtgcccagggccagggagtagagtggatgagcagagagaggcagggaggcctttagcagaggactgtgtattaggcctatcagagacatttccctttaaggcctagctagtgttcatttcctcctcatcttcatcaagccaacaggtaccttctgtctggagctcctgggaacttgagccttctctcaatcatatatttgggtgtggggatcaaatcaccttgaaaaggttcatcaaagtaatgggaagaactaaggatagaatcagaccctctgccaatatgtaaaaaagtagattccttcaaatgttagtatcaggagacagatttttttttataccagtattttcaaatagaggctcccaaatgaacttagtttacacttacaagagtatctctaaacatgcccttttacttattcgtgaaggaagtagagggaagtggtaactactgcattggaaagaaattagtgcaggtccttggcatgtaaaaatcaagtgcttatttttgcacaactgctttaaagtaaaagcattaatgatttcctttgactggtgaattatccagttcagatcattggcttttatttttcctgaagttgtattaggcttttagctcttctctgtgtttcagagttccagtcattgaacaagtccatggagctaaatacaacgatgaccattcttgccaacatttttaggtgcattttcaggaactctatgaaccacaaatctgggcattgagattctgtaggcattagactagcaaggctggtccagtctttgcctatgctgtagactcatcaggggccttcccatgccagtttcctcatctgtcaaatggcatcaaatgggctactactgggagatgtaaggaggaaaaaagtcaaatatcatgagatagactaaggaaataatgctggtggtctcatgctatgtgccttactgatttctctttcagaattggacaaaagtttctcaatgattaaggagggtgattataaccccctcttcattccagtggcagtcatggttactgcattctctgggttggcatttatcatttggctggcaaggagattaaaaaaaggtatgtgagtttaacttcacatgaaaagaacacaactttaaagtgaaaaagaaaaaaaaaagaaacccacaggaaattaaatgtgatagattcaacacaagcaggatgccaagctttacattctagagccatcagtccctggagacatgtaaatcagcccaggacacaccttcattaaaacaggttggctgattttcgcttttcatctgataaacttttaaaaatgtctattaccttcaaggcagcttgctaggctgataacaactaagtgagatattctaatggttctttgctcttatgtaattctttaatacttttttttttttgagacagagcctcactctgtcaccaggctagagtgcagtggtgcaatttcagctcactgcaacctccgccttctgggttcaagctattctcccacctcagcctcccaagtagctgggactacaggagcgtgccaccatgcccagctaattttttgtatttttagtagacacggggtttcactgtgttagccagagtggtctcgatctcctgacctcgtgatctgcctgccttggcctcccaaagggcttggattacaggtgtgagccaccacgcctggcctgctcttaattaattctgaaaaaatgacacactatctctgtcctctaagagcctacatgccttggatttcaatgctacaattccactaggaagtgggtctaatgtccactaaggtttcaaggcactgctcccaaatacctgacctcttcaagagtcacctggttcccaacacatgggcattgcattaaccctgggagaaattcccatgtattctcccaagtatctattcaccaaggccacagctctaaccaaatgcaccatatatgctttccaaccatccgtcactggagaggaaaagagaaggaggactgccttgagaagttaacatctgctgcccagattatcactccctttaccttaaggcatgagtgtgtctcagctttaaagtgtgagcaacccactagcctgcagcaggccttgggtgtatggtgccacatttggccaaactcacctggaagaaccattcaaggctgtaacattcatggacattgggcagcttttaagatatacctgttttggccaggtgtggtggctcatgcctgtaatcccagcactttgggaggccgaggcgggcggatcatgagctcagcagttcaagaccagcctggccaacatggtgaaaccctgtctctactaaaaatacaaaaattagccaggcgtggtggcgggcacctgtaatcccagctactcgggaggctgagacagaagaatcacttgaacccgggaggcggaggttgcagtgagctgagaccgcaccattgcactccagcctggtgacagagtgagactctgtctcaaaaaaaaaaaaaaaaaagatatacctgtttcaagttcagggatgatctcgaaacaattgctaaccaactgctctgtgttgcctttctgtgggctcagttgattgtcattttaattttccttccatcaaattagttagtacgtattctgttcactgaatatggtatgtaaaggttgccccctgtccatttacactggcaattacaaaaatattatttatcagtccctaattgcgtgccactctgatcttatctttcatttaaatttgagaatagtgggcgctaggtaagttttctaaccaatccagaaagacaaagtgtgtgaggggggtggggattgttgatatgcaagaacttcattagctatgtataacctgagagcactgagcagttaaaatgtctctgcccttgctattagaaattctgtgctgattgaatctcactatcttatagtattatacagtactaagtactatacagtactaagtataagtatcaagtactgcattaaggcaaaagaagaatgacagttttctccaaccactgattattctttccattgagacttcaaatcttgaccccggttgtcctgtctttcttcctaccttgggcgatgatggcagaactgacggatagagaacagggtgggttattacacactgccccctgggataaggtggctattgtctaaataattttaaggactttggggctgtaagtcaccttaataaggaagctatttatttccgaattctaaaatcttttaataagtgtttgtagaatcaaaagaatagaatcaaactcatttgcatgtagtgaggggttagctggctaaggctgttttataagcaagggtaaaaaaattagaggggttgtttttaaattttttaccttggagtcatttctgtacaagatctcaaaccgataacttgaaaactgctgtgggaatcagtgtggggcaaacaggaaacagataacgggcagttaggctagttacagttatgccaacaaagaaaacagaagccccaaaagatcactggcttggtaggaagcttagggtatctttaagataacattaaatagtcttcatctgtgggccaggcaccttggctgtcacctctaatcccagcacttttggaggctgaggcaggaggattacttgagcccacgagttcaagaccagcctgggcaacatggcgaaaccacatctctacaaaaatacaaaaaattagtcaggcatggtagcatgcacatgtagtcccagctacccaggagactgaggtgggaggatcacttgaacccaggaggtcaaggctgcagtaagccatgacagcaccactgcactccacaacagagtgaggccctgtctcaaaaaaaaaaaaaaaaaaagtcttcatttataaaacaacatcttccattttcaccaacttacaaatgattctgctttccaaagattttagttgtaggttggtcctttaaaacatgaagagtatttttcctatggaggcaatggtagaaataatggctacattcccaggctaaatctaagacaaaatatagttaatggcatttacaaggataaaagtaaaaagtcataaatctctatgtgtgtgtttaggtgtgtgtgtgtgtctatgtgtgtgtgtatatgtatatatatacacagagagagagagagagagagagagaatttataggctttttgggttctaatagttagaaaaagggcacaggtaactatttagagcatggtagccaatgaagtgactagagccttcacccctattcttctgtcctcagatgaatcttctgactctagcactttgtcccctgccctagtagtcttagtatggagactttccctcctttcttttaggaaaggaataaggaacagttccagaaacatgtgtccttgtgcatgggctcatctagacacattttgtgcaccaggcattatcattttctgattagtcactaccattggccctgtttggtaaataaggaaaccagggcaatgatgttttaggccaaatctcaaaaataccatatcagcaggacccagagtcagagattagactccagtccagatacatcttctaaaatcactggtcttcagatttgtgaactggttttttcctcggttggaagaatttcccaccagaaccaacacacagggttagaccagggcatgaaactgaacacatgcccccttagttcctttttcttcaaaatgaaactctctcagtaggaacagattcttactcatctattgctgttaggttcatcatccctaaaaaaaatatttatgtgaagctaaccagaatctgaaattaattcagatttgattccccctgctcaagtgcacttggtcatcagcaggctgaattttagaagaaaagatttcaaatagtagtctttaatactttaaaggattaaaacagtaatgcaacactgtctacgtgctaggacctgaactaaatacttggaaatattttattttatcaacccaatgaggatgatacaattattatgcctctttaacagatgaagaaattgtagtttagaaaagaaagtagctgttcaaatacacactacactacaggtggcaaaatagggctttcacctgggtaggatgattctagaatgccactttacagccactgaaatatattgcctcccaaatgattctttctgctcaaagagttttttttaagttatctacttatttatattctgcttttttcaaaaagaatgtgagaacagtacaaaatgtgttcagtatagcaaattaaaattaattaaaaagtaagaaaaagaagccaatttgggcaacccactcgggtccccttccacgctgtggaagctttgttgtttcgctcttcgcaataataaatgagcttgatgttttattgagtacaaaaaaaaaaaaaagaaagccaaatttaaacttagggtacaaaaatcatttggaaccaaggttgaagttatggcacaaaaatgtatgtcacaaagttttatatacttggtaggagagggtctcagatctagctctgagtttccttacagccagtcaaaggagaaccatgtgatattccttgtgtttgtaagataaaaacacattagttactcagatgaggctgcacaattcctaccaacaagaccaaagtgaaattctcttgtggattctcatagagatgatgctgtgagctgtaatggcacatagttttacagtattagcagctgtccctcaagggaagaatctgcaggtaggatgagatggcagattgggaagggataaacacttgaatggacatattgggtcttgccaccaggcaatttagcaattctgtcttcttgagtagcacggagaatggaatggaacctcaggaggcatctgcatcaacatgtctgttctgtattagtgtctaccactgtttattaagccagttcctcaaatctcctttgacacagatagggtccacctaacaaatacctaatatacttcaaaagacagttttgagagtgggagtcttccttctcccttacttgaaaaactttaaattgtctaatttttgctaatgccttttctctattttctattttcaggcaagaaatccaagagaaggtaagttttattagtggcgaggagtttccacatctgctgattcattctctacttccttaagttacttcctgctctagctagacacattaaccccatagtagtttatttacctggggtcctcatccaaatgaccagataaggtgataaatctactagcttcctttcagagctgtgctttttggtgctagtggagctgaatgaatgaatgaacgaacaagtaatccctattagaaaagggcagtttatgtaaagggagatttttctgattacctcagaattttttctgagggttaaaaacattgtggtgtgttcttcttgttcttaaatatattatttaagaaatattcaattgaacaagcacttattgagaaatgaataaatgcttattcaattgactatttgcattcaattgctctaacaggcattgtccttcagaaatgtgggaaagatagggagcatgaattctacctacagcttccccaaggaggcaagtatttttcagtttggtcttgaagctcaaatttcttctactggagaaatagcacagtgggaggagatgcagacatgtgaaagttgatggcccacctggcagaaatgaagatggaaaaatatttctcagtatctagggtttagtgacttgctctggaattttaggaaggagagtttaagtaaaataaactatgaaaggaggactttggtgacatattcagtacccagctggacaactgagcttcctttaaaatgctagaaatgaagtgagatgatttctgaagggattggatgctggtttgggcaaccatcctaccaatcacaaacttagtatgggccattgcttagaatgcaaaggaaaaagtggggaaaaatgaggcaccagaagccagatcataaactaatgtataagccatgtgatatgggctttatcttgaggtcttttgggatatcactaaaggggtttaaacagtgagtagccttacctctggcatcttataaggtcaccctgcagagcagtatggcaagtgtgggagacaggtgagcctggattcaaagagacttgttttggaggcatttgcagttattagattaaaaccgatggcgcctgtctagggaactagtagtaagaatgggttcatgaaataagaggaggtgatattaactgaatgtgtctgttaattggctaaaagtgagagagaagaatcaaattatcatctttctcacctggaaactggcggatggtagtcctgtttacttctgagaagggaacataaaagaatgagaggttttggaggtaaagatcatgggttcagttttgtactgagctttgggtgtatgcacatcattcactgtggctcattggacctatccaaagcacagaggctatggcaggagaagtggatttgggtccctcacatttcaggaggtaactgccatctcaggagtgggtactatcatccagggagggtgtgagtgctttaagaatggaagaggacctgggagagagtatgggagccagaggaacatcattatctaataagtcacctaagggaaagagaaatgaaaagatgttgccaggcagggagaaggaagaggagaaagagtgtggggtaatgaatgccaaggaaacaaagaaaggggaacggtttcaaacattgccaagagaaccagtaagtatcccctggatgcaacaagggtgtcagtggggagactatttgcagtgcagacatcaagacagaggtcagacggccaagcattgagcattactgaggatgagaaagtagagacagaacaagcagtcatctcttttaaaatgtttggctgtgaaggagaagtggggcaggggtaactggatgaggatgtacgatcagtggaggttctttttattctttttaattactctgtcttctctttactagtgcaaatggagtctagtgaggaaaggcttctttctctgggctggtctccctatgtctgtggcaggaaacccacagatgtgaagatttctttcaaactcgcacctactgagtgaaagtattttctggcacaatctacccagagctgttttctggctaccggaaccacctgttttaattgccactagatggaagcagatcaactagattttttttttttaagatgtccttgaggcacaggaggagagactggctggaagaatattagcaaaaagctaattaccatgctaagcaaattgctatattaagtttaatggttcactgattttttataatcagtcaattaatagttgtttattgaacatttttgtgttggaaactgctaagctttcttgagacagcaagaggagtcagcctggtccctgatttcaggaaaattattacctagctggggagttaagacaggaatatagaaagaaaaaaatcagaaaaatacaaggcagagcatggtaatggccaatgggtgctatatttaagaaggaaaaggtcatttggcttggtggttatagaaaatgttataaagaaggttgcttatgaagaatagataggatttaggtatatggagaaaagcaggaaaggaaggcagtctgtaggaaggaaattgtgtaagcagtggtatggtagtgagactatgaaagcatttttcaggggccactgagcagaactttcttgagcccatggcttattgaggagttgtggagttgaagttggaaaggaaggctggccccaataacataagtcttgaatgcttcaccagatggtctagaaaggcctagcaaagaagaattatttgcccagctctcatttattgaccaaggctgtattaattcataagaatcacagaattctaggtctgaatatgatcttggtggatatcacattcaaactctttttgtagttgaactaattaagtaagttttctataggccttgagcaagtgacagagttagttacaataatcataaacctttatcaaatattaattccatgttgtatactgttatgaatggtttacatgtcttaaatcatgaaatatgcctttaagtctgtgggagaagggtctatgaacatcttcattactgataaagaaacaggcacagagaaataaaatagcctgaggtcacaataaatggcaatgctgagatccatactcatttggatccaggaatcatgctcttaacgcgtatgcttttagaactcaagacccttgactaccagcttagagtggcaagtcccaggcaccctccttttccagtaacgtggttttttttttcacactgaaaccattgtgtgacggcactgaggaagggtggggtagaagtatggtgtgtttttagaacaagtcaaaggtaaaatgaatactatcacactaaacaccatgagcctttttttttttttttaagttcttgggtgaattttcatagtagtttgtgttcatttctattagcttttgaatggtgaatgaatgactccttgggcatttgtggtttcatttcttgctgggttattttgactcttctgcaaaatgactctgtttatcacctcatttggtttctactgtctaaattctggcaggatagaagctacacccaagatacacaggaagatatgatgccaacctcagaggagggcatatgtgaaattttgttttcagaaacatttttttgtctctattttggcaagcacatttgcagctgctgaactgtggtttaccctgacagttcatcatgagaccagctcctcagaatctggttctccctttgaaaggtgctgtgaagacataccatatttcattctctccttgtcctttccaagaataagacagttgtgtcacacaaaaaaagtgtcacttatttctttaaactaaatgtgttaccatctcattaaattatatcccaggatataatttatcacgagtttataaccaccactatttcatgagtttaaattttctccaatttcactttccatttaagcatgccttctaattccttgactttccactgctcaaaatcaatctacagctgggctcggtggctcacgcctgtaatcccagcactttcggaggccgtggcaggtggatcatgaggtcaggagtttgagattagcttggccaatgtggtgaaaccccatctctactaaaaatacaaaaattagctgggtgtgctggcacgtgcctgtattcccagctactcaggaagttgaggcggaagaatcgcttgaacccaggaggccgtggttgcatgagctgcctccgtgccactgcactccggactgggcaacagagtgagactccatctcaaaaataaataaataaataaattaaattaaattaaattaaaataaacataaatttaaaaaatcaatctacactgtccttcagactcattagatctggagacaaagaccgtatgcaccacaaaaatttctccaagtggggtctgtgcgccagtggcataagcatcactaaagagcttgttaggggtgcagaatctcaggctccactcagacctactgaatcagagtctgcattttaacaccatctctgagtggtaagcacatgaaaatctgagaagtgctgctactagggtttgcttacatttgttcatcttcagaggttcctaaagcctggcctcttgtctgagatttccagctgaaagcatttccttgctcctcttctcatctctaatgaatatttacctttactactaacactccaagttttgcaatttttaaactcttattatcttttgtttttctttcagtatgaatgacccatattaaatcgcccttggtgaaagaaaattcttggaatactaaaaatcatgagatcctttaaatccttccatgaaacgttttgtgtggtggcacctcctacgtcaaacatgaagtgtgtttccttcagtgcatctgggaagatttctacctgaccaacagttccttcagcttccatttcgcccctcatttatccctcaacccccagcccacaggtgtttatacagctcagctttttgtcttttctgaggagaaacaaataagaccataaagggaaaggattcatgtggaatataaagatggctgactttgctctttcttgactcttgttttcagtttcaattcagtgctgtacttgatgacagacacttctaaatgaagtgcaaatttgatacatatgtgaatatggactcagttttcttgcagatcaaatttcacgtcgtcttctgtatactgtggaggtacactcttatagaaagttcaaaaagtctacgctctcctttctttctaactccagtgaagtaatggggtcctgctcaagttgaaagagtcctatttgcactgtagcctcgccgtctgtgaattggaccatcctatttaactggcttcagcctccccaccttcttcagccacctctctttttcagttggctgacttccacacctagcatctcatgagtgccaagcaaaaggagagaagagagaaatagcctgcgctgttttttagtttgggggttttgctgtttccttttatgagacccattcctatttcttatagtcaatgtttcttttatcacgatattattagtaagaaaacatcactgaaatgctagctgcaagtgacatctctttgatgtcatatggaagagttaaaacaggtggagaaattccttgattcacaatgaaatgctctcctttcccctgcccccagaccttttatccacttacctagattctacatattctttaaatttcatctcaggcctccctcaaccccaccacttcttttataactagtcctttactaatccaacccatgatgagctcctcttcctggcttcttactgaaaggttaccctgtaacatgcaattttgcatttgaataaagcctgctttttaagtgttaactagtttgcctagtttgttattttgaaattatcatatgttttgttttctccccagtgagattacatgctccttcagggcagagtttgtgtcagatccctggagtatctagtgcattacttgacactcaataaatgaatgttcaaataaatcagaaagagcatacagtgcactgctgatataagtttcagcaaaccctctttctctatggcatctgatgacctgggcagatatcacctaatgtcaacagctgaattcttatgagagaatagagccctttcagaagctagctggaaatacctccttgtcccatggccaatatagatttcatacaaatttgcacacattatgagaataattttttggtaatgattacacttttctttctcaaagacatctcagattctgtattatagcaaaagctgttgcaaaagattctccctatagtacactgtaaatcttggatgtgcaaatcacattcatgtggtttagggtacatcccctggaggtgtacagtgcacacgtgcacagacacacatggcaaccctgacaaaaatgtttattccactaacacatcagggccaaggaacccaaatggacactactccttgtaattatgatgtatatagatttaaaaataaagttctatattcaagctctaggattcctatatgatcttaggaattacataatagtaatcccataaatcaagattcataatataaaattctccagaaaccttggtcttaacctccctgagacttacttcctatgcccataaaacaagaatgaaatttgccttgcttaccccacagggttattgtgatggtaccttaagtatgaaactgctttgtgaactgaatctgaaacacagactttttttttttttttcctcactcaaatcttacctttcatgctttcatggtgtaagattctggttcttatcctaaggctggaacagatggagctctgagtccttatcctgagattagaagccaggaagtctttcacttgtgttccaataggaactcagccctcagattttcactgcacagggtcagctctgccccctgcacttctgcttgcgggaggaggaagggcctgggacagggagtcagaggcatcagtgggaaccctgcctctgtctccgtgatgtgaccctggccagttgttactctctctgaacttcagatttatttatgaaatggggatcccattatctttgtcacatgattgtgctccacattttatgaaataactcctcctatgctttactcagagtaccaagttcatgaaattgtcagagtcccaggaacacagaattattcattccttctgatttgttcacccaagatcaatgtgcctgggctgtattattgtagtttcctacagaaatagttcaccaaattaaaatctaatttttaaaaaattagctgggcatagtagcacatacctgtagtcctagctagtcgggaagctgaggcagaaggattgcttgagctctaatgatttaatgagaatagaaagaagcaagaaagaggcttcttgtccaaattgcactgtggaaaatgaataaatgtattctttagacatctatatttttccccttaaacttcctcccatctgccagttgacttctctgtacagttctttctccaaagttctttgcattgccctctttcaacttcagcaatttgatttttcccttctgttcaaatgtcctattatggacattttatggaaagaaaatctgccatcaccataacagcctacccaccatttatgacaaaggacagggaaattattaggagaaataatgagatctttacttccctttggcctttgtggccttgtctgatccagtgggccccaacattttatgagatatatacagccttccctgcgagactctgaaagggttttagttaaaagtaatataataattatcacgcgtgtcggtgtgaagagaccaccaaacaggctttgtgtgagcaatgaagcttttgaatcacctgggtgcaggtgggctgagtccaaaaatagagtcagcaaagggagatggggtggggctgttttataggatttgggtgggtagtggaaaattacagtcaaagggggtttttcacttgtgggtaggggtgggggtcacaaggtgctcagtgggggagcttctgagccaggggaaggaatttcacaaggttaatccctcagtcaaggtggcgcaggaacaaatcacaatggtggaatatcatcagttaaggcaggaaccagccattttcacttcttttgtgattcttcacttgcttcaggccatgtggatgtatacgtgcaggcttgggctcagaggcctgacatttctatcttcttatattaataagaaaaataaaacgaaatagtggtaaagtgttggggcagtgaaaatttttgggggtggtgtggagagataacgggcgatgtttctcagggctgcttcgagcaggattaggggtggcgtgagaacctagagtgggagagattaagctgaaggaagattttgtggtaaggggtgatattatggggttgttagatgaaactgtagcaggacaagacacagacaaaacccctcagacactgagttaaagaaggaagggctttattcagctgggagcattggcaagactcatgtctcaaaaaccgagctctccgagtgaacaattccttttcctcttaagggcttacaactctaagggggtctgcgtgagagggtcatgactgattgagcaagcagggggagcaagcagggggtacatgactaggggctgcgtgtactggtaattagaggaacagaacaagacagggattttcacagtgcttttccatacaatgtctgtaatctatagataacataactgattaggtcaggggttgatcttaaccaccaggcccagggtgtggcatcaggctgtctgcctgtggatttcatttctgccttttcatttttacttctttctttggaggcagaaattgggcataagacaatatgaggggtggtctcctcccttaaaacatttgtcgtatagaatgattggtgatggcctggatacggttttgtatgaattgagaaactaaatggaagacacaaggtctgcataagagaaggagaaaaacaggtattaaaggattaagaatcgggagaacccaggacatctaattagagtgcccaagggggttcagcataattacttgcttggttggcaaggtttttggctctatccttgagttttttttatgttgtcatataccaggccagattgatttaggtaaaaacaacactcttcatttaaaaatatgcagagtccccttttttagcagtgagtaaattgaggactcggtgattttggaggaaagagaaattgtaaagccagcaattgtttgttaaagaaggattagaaatggctaggagagagtgagtgagattgatagtgtggtggagatagctggggagaggtagagagtggcataagaatgggaacaagaataagagtgaatataaaagtaaagaatagggctttattagggtgaaagtattggagtgtaccttgtcactgaagatcttctatccactttaagagagacttaagggtggcggtttgaggtaaaaccaggagatatcagttatgatggtttggaggaaaagtataaatcagcactgtaaaaaagggcagggcatttacaagtagttgagaatggtgaataggagtatgactagacagaagattgtagggatgacaagtttttggggcacagttcaagttgggctggtgtctggaatgagactggggcctaataaaaaggagcgtccatacagaatcttaaatgggctgtaccttgtagcatttcgaggacaggcccgaattctgagaatggcaagtggtaaaagtactgtccagtcctttttaagttggaggctgagcttggtgaggtgtgtttttaaaagaccattaatcagttctacctttcctaaggattgaggacggtaaggggtatgaaggtttcactgaataccaagagcctgagaaactgcttgcgtgctttgactagtaaaggcttgtccattatcagactgtatagaggtgggaaggccaaaccaaggaattatgtctgacagaagggaagaaatgaccacggtggccttcttaggccctgtgggaaaggcatctacctatccagtgaaagtgtctacccagaccaagaggtactttagtgtcctgatttggggcatgtgagtaaagtcaatttgccagtcctggggttggggagattagctggacatgatcagcagggagagcacgtgtgttttcatgaagaactatgcctggataggtaatggatgaagaagaaatttgggttgactgaggtaatgggggctgtccatgaagccttgcggcagtacagcccaggtaagttgctgaggctgatgggtgtcagggtcagtccaagtgaaagtgaagagaggctgggatgaagggtgcaaatgaatagtaaagaaagcatgttttgagatccagaacagaataagggttatggaggggttttggagggaggtattgaggataggagagtatatgggtttggcaccatggcgtggataggcaagacaatttggttgataaggcacagatcctgaactaacctgtaaggcatgtccagtttttggacaggtaaaatgggggaattgtaaggagagtttacaggctttaaaaggacatgttgtaacaggcaagtgataacaggctttaatccctttaaagcctgttgtgggatgggatactggcgttgacccaggtaagggtgattaggttttaatgggatagtaatgagggtgtgatttgttgccagggagggagtagaggtgtcccatacctgtgggttaaggtagggggatatgagaggaagtggcaaaggagttgccacttttgggttgggaagaagggcagcaatgagatgtggctgtagtccaggaatagtcagggaagcaaataatttggttaaaatgtctcagcctaataagggaactgggcaggtggggataactaaaaagaagtgtataaaagaatgttgtttaaatcggcaccagagttggggagttttaaggggtttagaagcctggccatcaatacccacaacatttatgaagacaagggaaacaggaccttgaagagaaggtaatgtggagtgggtagcctctgcattgattaagaaggggacggacttaccctccactgtaagagttaccaaaagcatctgtgatggtccaggaggcttctgaggcgatcaggcagcatcagtcttcagccactaagccaagaagatctgggaaggagtcagtcagagagccttgggccagagttccaggggctctgggagtgggtgctgggcaagttggacagtccgatttccagtggggtcccacacagatggaacatggcttaggaggaatcccaggctgagggcattccttggcccagtggccagatttctggcacttgaagcaagatcctgatggaggaggtcctgtaggaatgcttgaccactgtggcttaggcattttgaagttcttgtgtactggagatgtggctggggtttctctcacagtggaggcaaggaattgcaactcagaaatatgttgctacttggctgcctctactctattattgtacgctttgaaggcaaggttaattaagtcctgttgtggggtttgagggccggagtctaacttttggagctttttctaatgttgggagtggattgggtaataaaatgcatattgagaataagatgaccttctggcccctctgggtccaaggctgtaaaatgtctaggagttgctgccaaatgagccatggagtgggctaggtattcatatttgatgaaaaaaagcctaaatactaactgagatgggagaggttggataaagaaaaaggagcattaaccttgactatgcctttagctccagccacctctttaagaggaaattgttgggcaggtgggggagggctagtcacagaatgaaactgtaagctggaccaggtgtgaggaggggaggtgatagaaggattatagggtggaggagcggacgctgaggaagaattggagcctgattcagcctggcggggagcgacctgaggaggagcagtctggggaagaggggagaggtcagatgggtcagtagaaaaggaagattggaaagactcagcgacacttggggttgggactgaggggacaggcaggagggaaagaaggaggatttgggatgagttgcattgggaacagagactagggagggaccgacgtgtaaaagaatgcccagatgtcaggcacctcagaccatttgtccattttacgacaagaattatttagatcttgtgggatggagaaattgaaagtgccgttttcaggctatttggaaccattgttgagtttgtattggggtcaagcggtattgcagaagaaagtaaggcatttaggttttaggtcagacgtgagttgaagaggttttaagttcttgagaacacaggctaagggagaaaagggaggaatggagggtggaaggtggcccatagtgaaggaggcaagcccagagaagagagggtggagacatggagagaaggggttggggggtacttgccccccaggagaggtggtgcttgccccccaggagaggtggtgcttgccacccaggcaaagtggtacttgccactaaggtgaaggatccaggcaggcgtccctgcagtgatcagacagctctgaaatgtgggtgaataatcaggcaggcatccctgcagtgattaaacatcaagggaagactgtctttccaagtccatgaccagtgctggagttttgggttcacagatagaacacgtttcctctgtctctaccagaaaaagaaaggaactgaaattaagggaagggagagattgaagcgtggtgccaagattgaaaggagaaagatgttgagggatagtgagagaggctggagaagagagtaaaaagaggccacttacccaatttaaaattggtgagatgttccttgggctggttggtctgaggaccagaggtcataggtggatctttctcatggagcaaagagcaggatgacaggggactgatctcccaagggaggttccccgatctgagttacggcaccaaatgtcacatggtctgtgtgaagagaccaccaaacaggctttgtgtgagcaataaagcttttgaatcacctaggtgcaggcaggttgagtctgaaaagagagtcagcgaagggagataggggtgaggctgttttataggatttgggtgggtagtggaaaattacagtcaaagggggtttttcacttgtgggcaggggtgggggtcacaaggtactcagtcggggagcttctgagccaggggaaggaatttcacaaggttaatccctcagtcaaggtggggcaggaacaaatcacaatggtggaatgtcatcagttaaggcaggaaccggccattttcagttcttttgtgattcttcacttgcttcaggccatctgggtgtatacctgcaggcttgggctcagaggtctgacaataatatttacttgacatcttggtttgaagcttgatctggtagtggtgttttcaataccaattgttttaacactggtagtaaccataatgatgataacagtaagtaatgtgatttcttttaaaagtttttaaatcttggttgagtgctgtggctcatgcctgtaactccaacaattagggaggtaaaaggcaggaggattgcttgaaaccagaagtttgagacgagcctgggcaatacaacaagaccccatccctaattatttttttaaaagtagctgggcagagtagcatatgcctgtagtcctagctactcagggagctgaagcagaaggattgcatgaactcaggactttgaggctgcagtgagctattattgcatccctgcactgcagtctgggtgacagaataagtacctatctctaataataataataataataataataaagtttgttaggttaaacttatcttggcatccagttatcttagtaggcatccaaatccctttttaggagaaagctatctttttttgataagcctctaatatagcaggtgtgaccctacagacgtagtgttggcaggaactcaaacaatagtaatatgtaattaaggcactctgtgttaagaaaacttagaggagttaattttctctgctcccgtgagcacatgagaagaaaaaaaaaaagagagaaggtaatgaaagtagagagagaagaactagaaatgtgagaagctgaagagctctgtggcgggaggggtaggggtggcagaagcagcctggcctctggggactagtatggatttaaacagcatgactcctcctctgcatcacactaacctctgtaacatcccactaggaatacaaacccagacctgtatttaggttgctttgaaggaggagtttaaggtgaaggggctgcttctttagtttgggaaagtggatatgaagaaatagccataaaaggcaaaattgggacaaaatattttggtagaaacaaaatatttagaagaaaatcggtgctatggtgagcatgaaaattaagctctctgagaattttgagaactcttagagagggtttgcggccagtatttttaattcattttatctggattttagagagatggtacctgacatctggtttacattcctcatagcatttaatccccggccatagatggtattgtcctcattttaaattttaagaaactgaagctcagagatattagtttgtctaagttcatatagctagacagtgtctatagagttactgaatgtctgtttaatagataacgaaaggtagtttaaaagagctgtgtgtctaatgccatagagaaaagggaataaaaaattacttagaatagatttggtttcaaacactcttgctgaagtgggtagtccaaaagtaggcagccagttctcaattcacaacaaaatcactcttgaaagcaattttgagagaataagctatgtctcttgatttcagcatcctcggaactgacccctatgtcaggaagaaaatagatcaaaatagttgttcaatgacaaaggacacaggcatgtttagcaaaaagagaggcttaaggcatgggacagttgtcttcaattaaccaattaaacatttgctgaaaatgtacgactgcaagacatactaccaggggctatggacacataagggcagagttcctatccctggggatccagcatctggaaggggagggaaggtaaacaccctgaactgcaagctaaggctgtgtgtgctatggctatgctaagtgtgcaagctcagagatgctgcggctcagaggaggaagagatcacttggcaaagggcaacagaattcagaggcaaaattagatcctagatcaggtttaattagaaaccaggaggagagtctagtatctaagacaaaggtattgaagttagagatgttggacaggttatactgccttggcagagacctggggatgaaaaagagatagagtggctttcaactctaaagcttataaagtttgtactctagtttctgggaaaacttgagcaagagtggaacaggatcacaatggtattctgggaagattaaggtgtcagagggtttaggagtggagataaacggaagcaggggagaccagtcagtgaatgtaattattcaggcgtgatgatgagggtggggccaggaaggttcaagtgtaaaccattgtgaaggctttggtctctgactagttggggtcagggagggggggggttggctgggaggaggtgtaacaaagtattcagaaaggaaaatataaaacaacagttctggctaaatatgacttatgcaaatgttccatttttcaaagatcttgtaggaaagtccctcctttgttatatttcctctgcatgaacttagctgtttaattcttaatataagagagagtcaaggatgtggccaaattgcctgtggattcacaaagaccaatagcggagactgggaataggaaaagccccacatctaaggcttttaaaaatgtagatttgaatcagttctgaccccttaaaagaaagcaatctgagtttagtttcagaaatgcagttttgaccaagaccctaacgcagactggccgaccctgtctcaatgtaccaggaagtctccaaaaatgcctctccactgggctcgcctttgactgtataatcagtttcatgtggatttggagtaaacaggcagaatgtatagttgatgatgcacagacttgcacaattgtgctaattacttctggagcattaaatgaatattctagagaaattactatccctttagaaagtatatacccatagcaatggtttccaaacttttctattatgaggaacactcattaaagttaaaaaatattacagaagaaaagttatattttactacccgataattgagaaaaatacagatgtgcatatagattaaaaccaaaaaggatttcttgttctgagaaaagttaaagcctagagatttaaaaccactgttcctatatccagcgatatctttaaatatcttttatcttcagtagaatgtatattcacttgcaattcacatgcaaaaatagctacaagtaactcagggccatcttctcttggactgtaatgggaggaggctgactagataacatctaagattccttctagctctgattcttaaagactctatgacttaggtgtccttcccatccctttgaagtttgagagcaaattgagcaacattgtggcttcactaagctctgtaacttggacaagttacttaaacgttttatgccagttttctcatcggtaaaatggtgacaatgagggtacatccctcatatggcagttatatggcagttgtataatacatgtaaagaatttagaacagtgactggcaaataataagcactaaataaatgacagctactggtataataatggtaatagttattattattattaatttcagaagacctgtgcttgtatctgggttctagtatctagtagtagtgtgctattctagtacccttcttagacttgggcaagagtggcccctactcaggacccatgctttagaagtcctcactctgaccctcctccagcaccctttctactgtgggagaagttcacagaattaagaaaacctgtcttctgaggcctcccttatagaccacactactgaaaccgtcccaagcttgcttccagaacttgtatggacttttccaggttttcctgaggatgggctgtgtctctgtgtatgcacaagggtgtcccattttgtttagggtttggacttggaggctggggtgttcatacatgtatgtgaaaggtgatttagtaaagagaaggtgggtggactgaaggctggggaccaactcactatgtgcctccacatttcagtgtggactctgaagcatcaaagatttctaaattcgaaccccagctcattaggaaggtatgtctgtcaatatagaaattggagcacattttatttagcagttttaaagcttgaattaaaatgcttaaatatctagttataggatatgtgggccttcatttgtatctttgcttcattctttacaaatagtagagctagctttttttttaaccctcaggctcctcatgtgtaaagtggaattaattatggctgcctcatacaattgtggtgaggattaaacatgacaacatataatagcacctagaacaatatattcagtaaatttctctttttctctggattacacttgatttcatagacatatgtgtactttactcaactattagccaattctactacagatgtaacatgaacaaaagtagaccatataatagactatgaagcaaatgtcaataaatttcaatgatgtagaatcatacaggttaactgttctacttgttataagttaataataaaaaggtaaattacttaaaatcccaatatgcttaataatttaaaaatatttaaataactcataagttcaaaagtcacatagctctcaccacaaaaaatgataagtatgtgagataatgcatacattaataagctaaatttagccattccacaatgtacatatatttcaaagccatatgctgtgcacaataaatatacacaatttttatttgtcaatttaaaaagttagtttttaaaaaccaaaaagaaactttaaagtattctaattgaatagaaattagacaatagaaatatcaacaatttggggtgcagcaaaagaataacaaggaaaatttgtagttttaatgcttatcctaaaaaagcaaagcaagctaaaaattaaacacccaacttaagaagttagagaaaaattgaaagaataaaccataaggaagtggaaaaaagaaaataataaacttcagaagttaatagaaacaaggaataagagaagatcaaagaagataaaaaaatagatgaacatctatgacactcatcgaggaaaaaagaaaagtggtataaatagacaaaatctggagtacataaagaatatctctagagtaggtaatttttttaattaagaaaacattaagaataacttaattaaaatatattgggtaatactcaaaatagccaaaacaaattccccaaaaaattacttgccaaggattgtttgccaaatatttcataagtctaaaatatccttaatttaaaaaccagataaaaatcggcaagaaggaaaaatagtccaatcccattcacaaatatatgtgaacaaatcttaaacataatactgtatagcaaccaaatatagaagcaaataaaaaatatagcctcatgctcagtttaggtttatttctgcaatatgagtggaatttacattagaaaatttctaaccattaaatcaccatattaacagattagagaagagaaaccatataaccacctcaatattgcaaaaaggaattcacgatttttaaaatggaaagaaaaaactttcagcaagccagaagaggggatttcccttactaaaaaggagtaccttccaaacattgcaagaaacatcatatttaatggggaatcgtttgcagctgtgtctctataatcaggagtaattcaatgatgctgactgacaatgttggccatgaaaatgcatcactggcatctcctgtgggggagcagagttgactgagttgactgagttgactgacagcccagccccagttgctacccctctggatctaacatgacttttttttttttttttttttgagactgagtctccctctgtcgcccaggttggattgcagtgatgcgatctcggctcactgcaagctccacctcccgggttcacgccattctcctgcctcagcctcccaagtagctgggactacaggcgcccaccaccacgcctggcttttttttttttttgtatttttagtacagacggggtttcaccgtgttagccaggatggtctccatctcctgacctcttgatccgcctgccttggcctcccaaagtgctgggattacaggcgtgagccaccctgccagcctaaaattctacagctctctgtgtgattatagtaatgatcacaacctgtcacacacatcttcctattgtgtatgacccttctaccagatgattaactcctgaaaaatcagtcatggccagatacctaactcctgaaaactgctcacagcttgtgcacaatacatgttagaattaaattaagatcaaaacctaacctatttatgccttgcaaataagtgtaaaaacatactaatacaaaacatttttacttattccatcagccttcattacagtgataatagaacgagtatcagtgtggatctaaaccctgcagtttcagtgagctgcaagatcatttcagctctatattttcttcagaattcttccctgaaaccctacacaattcttccctgaaaaaatagttccaatatgtaattagcctagcattacaggctaaaggaagttatttacatctagcttaaatttgtcttgctgcaacatcagtgtatttttcttcttcaggggaactgatgtaaacaaatgtgattggctgattcttccacagaggaagagtcaatattctagttatagttaacccaagattatttctttctgccaatacttgagtgttattaaaaattttaataaaagctggtggtggtcctgaactattactactggcaaagagtctgcttctctggttagggtttgcatttctctcacctgtggtgctgttctaggctgtgccacttcctcagagcaggagagagagagtggggtggaccaactggcaaaattccctgaggttacaggccaccatttccccttcctgctctattgaaatgtaacgactgagtcaaaccctagccatcccccaggttgacccttttgtgtaccaaactatgactgttcaccagacacttaaagatgatggccataagaaagttctgggaaaacttgtgggctggagtcctgattcatgcaccaggcatcaacaatagcagatgcaaacacagacagcatttgcacaacagggtatgctagtataagtgatgataagcgtagcttttagctttgtaatgctgataaagaacttgccaagaaaatcatttttcctcaaaggcaacttgttattgccaaatatcctgctcatctgattggacattggttcctctattgttcatcaatatgcatacagtacaactactgacattaacttgcttattcagaggcatttacttcccttctccctctctcactgggtatttgttgtgttttagaaaatggtgaacttggcatttaaaatgcttaaacccaggtcccaagtttatagctgtcttctttcccgcggatttaaaatgagaatatcactgcagatggtttctgcagctactgttaatcctaaattgctcttatggacctcaaatacatccaaccttgagagactctgataaagggataatttgtaatctatgaactataaagtatactgtaggtcccctcagggttcctatactgcactgctccagggacaccatttatgttgtattctgcatgaatggtgccccttttgggttatgcaaagcagtggcctggatattatatgtaatacttatacaaaaatagctactatttattgataaacttacacaattgtctcaaatccatacattgcaagaatgaatcactatctctattttatatatgcgaagctggaaattcagaaaagttcaataagttgtcccacacacacacctgccaaaaaaaaaacgtcaataactgaggatgagggaataaggttttaaaacctgtttgactccagagtttgagtttcccccattatgccatcaatattagacacacttgcagtaaatgggtatttcttcactcatttaacagatatttgttaaatgccactagtaataatagtcaacaactattgaatgcacactgtataccaggttggggatgcaatgtggaacaaaaccaacatggtccttgcatgcatgcggcttagtggtaggaaaaacatgagcccaataagacaacagctcgtatatttgtgttcagtatgtgaaggcattgttgttaagtggcctacatacgtatgctcatttaatgctcacaccaatcctatgaggtggatattatttttatctctattttacagatgaagaaactaaggaacaagagcaatttacctagtattgctcagctggtcagtgacagatctgggattaaaatccagggaggctagctccagagttcatgcacttagctattagcttactaacaatgaccatgtaaatcattatctcatgactgctgtgataaatgttataaagtaaaggcaagatgttaaagcatacacattgtatttattttcattcaaagggcattaatctcctagtttttattaaaaactttatatacatttatacaaagaagtttaggatgatatatatgtatatatgtgtgtgtgtctatatatcaaatctttaagcactattatctctggatggtagaatttcaggtaatatctgaaaatttatttttaatgatttttaaatcaaaattttaaaaataataacattgattttatcatataaaatgaatacacggttttcatttggaaaaaatgtccccacttgatataaaaacaaggtttttattttaaaaattatctttcagcgggtctgaggaaaagaaaaagctgatgtccaaatgaggaaaaaaaattacagtgaatctttccataagacttacctttgcagtggaactacataaaaattgagaactactccataaaatttctcaactaagcattgaataagagttatttggcttcagaagatccatactgtactcaaatttttgagtaaaaatttaacagcatatcttgaatatttaaataaatatttgcttcacttaaaccaaacaagacaaacaccagaaaggacctgttcttcatggcaggccatgctataatgtggaaaaaacaaagcctacaaaaccattcagaactgagtttaaatcctgatgcttccagtttctagtcaaatggcatgccccatgcatttaatctctccaaggctcaatttccacatatgtacatacaatggacggttgttatgagattaaagatcattgtgagattaaacatcatgtgtgtaaggtacttggctctttgcttaataaatgttaattactctaatgaggtaaatattttattttaatatgaatgctcagatttataccacaaagtagcttaaccccacccccccaccattaacttttaggttcaggggtacatgcacaggttttctatataggtaaattgtgtgtcacaggggtttggtgtgcaaattatttcatcacccaggtaataagcacagtgtcctatgggtactttttgatcctcaccctcctcccaccctctattctcaagtaggtcccatgtctattgttcccttctttgtgtccatgtgtactcaatatttagctgtcacttataaatgagaacatgtggtatttggctttctgttcctgcattaatttgcttaggataatggcctccaactacatccatgttgctgcaaaggacatgatgatcttgttcatttttatggctgcatactattctgtgatgtatatgtaccacatttttttttttttagctagtctaccactgatgggcatttagacgattccatgtctttgctatcgtaaatagtgctgtaatgaacatatgcatgcatgcgcctttacggtaaaacaatttctattccttttggtgtatatccaataatgggattgctggattgaaaggcagttcggttttacattctttgaggaatcaccacactctcttccacaatggctgaactagtttacattcccactagcagtgcataaacattcccttttctccacaaccttcaccagcatctgttattgtctgactttttaatagtagtcattcctactggtattagatggtatcttattatgcttttgatttgtattcctctaatgattagtgatgttaaacatcttttcatatggttgttggatgtgtgaatgtcttattttgaaaagcatctgttcatgtcctttgcccactttttaatgaggtcatttttttgcttgtaaatttgtttaaattccttatagattctggatattagacctttgtcagatgcatagtttgcaaaaaatttttccattctgtaggttgtttactctgttgatagtttattttgttgtacagataaactatctgttgtacaactaaagagtttcattagtttcattagtcaatttggtttttgttgctattgcttttggtgtcttgtcatgaagtctttgccaggtcctatgtccagaatggtatttcccaggctatcttccagggtttttatagtgtttggttttagatttaagtctttactccatcttgagttattttttgtatatgatgtaaggaaggggcccaggttcaatcttctgtatatagctagacagttatcccagcaccattatggaatagggagtcctttctccattgcttgtttttgtggattttgtcaaagatcagatggttgtcagtgttcagcattatttctggcctctgtattctgttccattgtttaacccctcttttgagtgaaatgtattatgcgcagcagtcagaggttattaaggtgacttccatttgtacatctttgcagagccttccctggctttggtctgcacttctcagggctggctctgcagatgaggaatgaagaaacagtaacagacagaaaagtctctaggggctcaaggagcagatcttgtgggaaaaaagaaagaagcctgtaacttccattctatagcaccaatttacttattttcagactattgccccctggcaagttttaaatactttctactgtatctttaatcccacctattggtcccacttattggtgcctggtaggaaataggcaccaaatttctcctacaagaaaaatgtggttcttttctgtttaccaagtgctggtagatacaatgtatcaggtgttagaagcacatgctgtcttcttgtaagatacatgaaaaagacacaatgctgagacttcttaagaactggaatcaagaaataaacgggctttggaaaatggagagactcttacccagtaaaccttcattctggattttatactctaactttccctgtgaattttcctacttgtaaatgactgatggcttaaggtaaaacaagattaagccagaggcttgctggggctaactgagctactctacagtgacatgagaaattattaactgaacttctttgaagtataatatacacatggaaaaagctagatataaaaaaatgcatttttacaaccaacacatcctgtagccagcatccagatcattaccactccccagaggattccttatttaccgcttctgggcattaaactgtcccctccccacaaaggtagcctctcttctgatttctaacaccaccatgaattggtccacctatttttgaactttgtatatagagagaatctttcagtatatgttctttggtctgatttctttaactcagcattttatgagattcatccatataattgtatgaagactgttcaccatcattgctgtgtctgtgtgtgcatttatatacttatttatatatcaaatgcataataggtaaaaattttgatcagatatgctttttcaacacatagaagttaaaaacagctatgcactgatgtgaagcttttctttttccaactttctaacttcccaaaaagtctcctaaatgagttaggcaaggaaacttttcgctatagaaaagaagatgttggattcctgttaattctagtttgtttagatttttccacagtgggaggtgttaacaggggaagaagtacaatgctgcctgggaaagcctgccactgtttatcatccaagtatgtcaggtcaatctaactgatttcctgtgcttgaagacaggaaaagacgttgctgcctggctgctcctgccctcggtttcaaaccaaagctggggtcaggcccaattgtgaagtggtttaaattggtctctagtgccaccccattctcctttctataccatcagataccctccccctattgctcactaaggagcttgtgattatagccttcctcttcatcagtagataacataccacctaaaagtgatgttttttaaaaaaattacactttaagttctgtgatacatgtgcagaacgtgtaggtttgttaaataggtatacacatgccatggtggtttgctgcacccatcaacctatcatctacattaggtgtttctcctaatgctatccctcccctagctctccaccccgcaacaggccctggtgtatgatgttcccctccctgtgtccatgtgttc

SEQ ID NO: 5626 - DNA, 96238 bp, Homo sapiens
  KIAA1804 gene - 229770249 - 229826486 of chr1; NCBI Entrez Gene ID: 84451; Build 35; sequence includes 20,000 bases upstream of initiation codon and 20,000 bases downstream of termination codon of the gene
aagcacagagaggttaagtaaattgtctgtgtgctaagggattgtggccagtttcaaacctcagcagaatgagttcagagcccacgctccagagctgcatctgaaccactgcattacctccaagcaaaacagtcacttaagcatgaaggccacataacatgtgagaactcagaagacaacattcacgtgagtcttcttggaacaggtcaccaaaggatgaacttctgttaaccaagttatgaattgagaaactgacaaaaagccagatgtgagaattgagtccatatagtataaagactaaaacaaagttatggcttatgattatagaacaaaacacaaatgataccaaatccatacatgaagaaatgatataactaactaaagttatcaaaagacataggagaagaagctgggcgtagtggctcacgcctgtaatcccagcactttgggaggccgagacgggcagatcatttgaggtcaggagtttgaaaccagcctggccaacatgacaaaatcccgtctcttctaaaaatacaaaaaaattagccaggcatggtggtggatgcctgcaatcccagctacttggaaggctgagtcaggagaattgcttgaatccaggaggcggaggttgcagtgagccgagatcgtgccactgcactccagcctgggcgacagagcaagactctgtttaaaaaaacaaaaaaaagaaagaaaaagaaaaagaaaaagaaataggagaagagaaaaggtaagaagccccaaaatatttaattctgacacaccaaataatagatgtataaagatatttagtggtataagagtaaatcttaagaaacataaacttatcagataaagctgggtggtagagaagaaaaagaagtgaaactaaactatttttaatcctgtttatagtaagaaatcaatagagaacatctaaaaagattaaattaacatgttaaatttaaaaagataactctaaagccaaaaactataatccttccaaattttcagaagctgcataaaacaaaataataaaaaaacacaaactacatagtgaaagatattttttaaagtaaaagaaacaaatgaagcacaaaatgtgatataaaatgacacaaaatatgttggtaatatctataagtgtaaatggctttaacttacttattaaaggacaaaaagaatacaaatgagtcttagagaaaatccaagcattggttatttataggagatacacctatgaaagagtgtctcagaaaaattgaaagtaataaaaagaggcaaaagttcctcagacaaacaggaaaaaatgttgggtgggtgtgtgataagggaagctcaaaatcttgttattaaataaaattaatgaaataaaattattaaatgagataatcttcataaggaaagaaattcacaatacaaaatttgaagttatgaatgtccatgatcaaaagaaaagagcaccaacatttatcagttaaaatatttggaatatggccgggcgcggtggctcatgcctataatcccatggctttgggaggccaaggtaggtggatcatttgaggtcaggagttcaagaccagcctgatcaacatgatgaaaccccacttctactaaaatacaaaaatcagctgggcgtggtggcggcctcctgtaatctcagctactctggaggctgaggcaggagaatcccttcaacccaggaggtggaggatgcagtgagccaagatcatgccactatactccagcctgggcaacagagtgagactccctcaaaaaaataataataataataataataaaattaaaaaatatatacaaaacttaatttagccaggcacagtggctcatgcctgtaatcctggcactttgggaggctgaggagggcggatcccctgaggtcaggaattcaagaccagcctggccaacatgatgaaaccccgtttctactaaaaatacagaaattagacaggcatggtggtgggcgcctgtagtcccagctactcaggcggctgaggtgtgagaattgcttgggtctgggaggcggttgttgcagtgagctgattttgcaccactgtactccagcctaggcgacagagtgagactccatctcaaaattaaaaaagaaataaaaataataaaaatttttggaataaataagaaacaaccaaaagaaggattcaattctcctttttctgcccattacacatcaaataaataataaagttattaataattcctaaataacataattgatatgtgtatgtcaactatgaactccacttatatacaatgtaccatcatttcaaacattctcagagcactcacagaatctgagtctatattcatgaaagaaaatctcaatgaactcacaagaggaaaaccaatataaatagtattttctgatcatagtttaataaaattagaggctaatagccaactaggaaataaaccaatatctatcatctagaattttaaaaaatttttgctcaaaacctgttggttcaaaaaataagtaaagatcaaaataatgaaatatctgatgtatcttatggaaaactgatagtatatcagtaccaataggatccaaaaagggaaaaaatactagtgctcaaaggaaaatatacagacccaaataattatgctatcaaaaatatgtagaggagacccctggttgtctaccagaaaccactgtccccttcttgaagaataatgcggaccacatttcccagaacatcttttggggagttgcggctatgcaactgagttctggaacagtagtaggagagatgtgtgtatcctgtcaggcccagcacattcagcttcctggatgttcttccaggtccttctgctggctgggtgctcatgacagtaaagttgctgtgaggtgtctctgtccctgtgtattgctgtaaaggaatacctgaggctgggtcatttataaagaaaagaggtttatttggctcacgattctgcaggctgaacaagaagcatggtgtcagtatttgcttctggtgagggcctcaggctgcttccactcatagtggaaggcaaaggggagctggtgtgtgcaggtcacatggcaggagagaaggcaaaagagagaggagggagatcctcagctctttctaacaatcagctctctcattaccacaaggagtgtaccaggctgttcaccagggatctgcccttatgacccaaatacctctgacattgggatccactttcaaaatgagacttggtgaagccaaaacacatatccaaaccatagcaggaagccgcaagttatgctcagcctgggtctctgactatgaggagaacatccacatggctgaactgagttcctgcccaagtgttctaataagcaagataacatttttttattgtgttaagcaactaaattgtagggatttctttgttaccatagtattacctaccataactaacccagaagctattacctggaaatagtgtactaatataataaaacctaaaagagccaacattgcctgagcagttgttgaacaactaaggaacaaggagtcatggcagcctgcctggaaagatggagacccaagttatgaggtgatcaaagactttgcaaaactcaccttcgggaatttggaggacctaccaacaactaccaagcccatggctccagagcggggagaaatgtttgtttatatgtgttgccagttcttggctccattttgcaaattataataagaagaaagaattaaagtttcaaagcagaacaccaaagctttgaataacttcagtatggaaaaactgagtaatacacacaaatatccgcttctttcatggaaataaattacaatagaaataaatgaatttttactgcattaagtcaccaaaatttgggggatccatttgttactgcagcttagcctatcctaattaatacaagaaacaataaaaataaacatattagacattgaaatcaagaattaagaaaaataataacaaaaaacccagggaagacagatggaatgtattgataactataattgcagtagaaaatacaaaaacaaatagaacttaaaaataattacagccgggtgtagtggctcacacctgtaatcccagcattttgggaggctgaggcgggcagatcacctgaggcctgaggtcaggagttcgagaccagcctaggcaagatggtgaaacccagtctctactaaatgtacaaaaattagccaggtgtggtggcaggcgcctatagtcccagctacttgagaggctgaggcagggagatttgcttgaacccgggaggcggaggttgcagtgagccaagacctcaccactgcactccagcctgggctacagagcaaaactctgtctcaaaataacaataataataataattacaaagctggtgggggtgggcataggaaacaataaaatagataaattaatagccaacttaagcagaaacaaagggcaaaggacaaataggcacaaaggaaatgaaaaggacaaaacaaacagaacaagaagaaatataaacatcgtaagagaatactttgcttttgagtattcaaataaatgtagaatctagatataattggataattatctagaaaaatatacattgtcaaatcataccccagaagatactaaaagtctttatttattgaaataagagaaaaatgatctgtagaagaaatagagaatattattacaaaactataatttcaagaagcaccaggcccaagttatttcacagcagatttttacatcaacttttatgaaatatgaaataggtaattccaatgtaacttaagctatttcagaacactaaacaagacgaaaaacccttccaaattctctgtatgaaggtagcataaaacattccaaaaattcaataaaaatccataactacactcaatcacaattatgaatgatgatgtaaaaatccaaattaggtattagaaacaaatgtagcaacacataaaactccaaagagagttcatccccagagtacaaggatggtcaatatgtaaaggatgtctagtaaaatagggaaattttggatgtccattagtaagactattatttatattgttctgggccatcagtcaatggattagaaaaaaaattcatatgaagaaaaccttaaaatgtaaccgaaagaaaaaaaaaagactaagcaaatggaaaggcatagacactgtgtacccagaagattcagtgtcatactaactcttgctaaactgacttataactctaacattatctcaattttgaaaacctaaaggaagaaactaaaattacacatcacaacacggatggatcttagaaataaaatgttgatctcaataagctcaaaggagtatatgattctgtttatatgaaattagaaaacaggcaaacttaatttgctatgacaggccagcaattagaaggaagcacagggagtttctgggcttctggcaatgctccgctccttgatctgtgaactgctcacatgcatgagtgtagtttgtattcagtatgaataaataagcaaagaagaattgccaggaaaattctagaaaaaaatattagccaagattagtcccagcagacactataatattgtggcatggggggataggtagacagacttgtcagtgagatggaacagagaaccaggaagtggtatggaatagaagaaaacctatggaaaataattttcagtaaatgggaaagactatttgtactacaacttagaaacaataaaggaacagattcaacaacagattcaactatgtagaagtaaaagcaagaaaacaagcaagcaagacagaaaaagagaaagtggggagggaatgaagaaagaaagaggaaagaaagaaaaagaaaaaatctagacaaatcaggaaaaatatgtgaacctcatgaccaagacatataagttagtatacacagacctcctaaacatcagtaagaaaagaccaaccaaaaatggacaaagaaataacaggtagttcacagtaagggtaattaaatgacccaaacataggaaaaaatgtgcaatctcactcacaataagcaacgcactttacaactatgggagaccagctgccactatcagactgggaaaagacaagttgttgctgtgttgagaaaggtgctggtgggagtgtaaagtttcctagctcctgtggaggcccatttagccacatctgtcaaaattacaaatgcatgtgccctttgactcgggaatcccattcgcaggaatttaacctacttgtatgcaggcacttgtgcaaatggcaaattatgaagatatttgctgcagggctgtatgtgataacagaaaattgaaagtagcctaaatttccatcaaaggcagtcattaaagaaacgattatgcagcagacagtgagtactacagaaaagttaaagacaatgaggcaacttttaatgtcctgcctttaaatttatatgatacatatatatttagagagagagagagatgcatacatctatctctggatgtattgtgtacatctatttctggaaagatacaaattaaattcttaagcaagaaaatggatggctggggagtaaacagtgtgggggagaattttaacttttcaaattatccttttgtgtatatgaccttttcaaaatgtgtattttatttcattttatttaaagatatgtatataaaaataactaagagaacacacatacaagtttttctaggttacttctacgtggaaaacatttaaaaatatggaggcaactgatcaagagaataattaacagctaagagaatattaactttgctttcaaaagtagggttagaatccatctaagtaggaaaaataaagttttcagtaccaaagttaatatgaaggagaatcaatattctgtataaatggaagctgtggctcaaaaccataatttgtcaatattttttcaagatgtttaatttgaaatctttgcattaggctgggggcttttatttaaaaaaaaaaagatattcttacgttattacagaaaaccagtttgtccaagataattttcaggtaaggaaatacccctgaaagggatacttactggaaactttcactcattgaaccctcacctttatcaagtgacattgtaaaagattaggaagacttcaaatgaccctgtgattaagtagcaaccacaaataatacttcacatttatatggcacattatagttttcaaagtacttcacattcaccagtgccttcaggataacaaagacgaccctatagggtaacaacaacatccatacattcaggaagggcacatcgtaatgcagattctatgtctttgggcactgaaaattcttacagagaataagtgataaccatgaggttagataaagcagcaacgggaatggattcaaacagagcagtcatagctggtatgttccgcattcacatataagagaagaaaaggtcagataagttaatttaagagtgctttagaaatgtcagaaaatattttaaaatactgcagaaaaaacagagattatttcatgaaagaaaccggaactacacagattgtgctaaattaacatacgcttcatgcattaacaaaataaatgattggatttatttagtctttctcttctgagaatttcaaaagagctgttcaattttatcatctcattacttctcattgtagtcattatatagtattcttaaaggggtatgttaatattagtctaattttatatgtggatgaaaaatttggagaattgaataaaatctcaaggtctctaaaatggtcagtggtgtaagttcagcttttaatgaatgtcgcagtccactttgagggagttacacctcccaaaaatagacctgatatacagaaaaccatcattttcatagaacaaataagatataagtcactacagagtaaatttgcgcagggaaagaaagttaactcacaaaaacaggtagtatgaccaacttttggcatttaaaaaacaaacaaagcaagtataaaccaatttctctatgatttattctctgtgaccttagaaggatgactaacctttttttaaaaaaaaaatctttgtcctctgtgtcctttgtttaatatttctagcaggttgtgaagaattagtcattatgtttgaaaagagtccaatgaattgtaaatacaataaaaccaattttcatcagacaaatgtgcaaaaatggcaactcagggtaaatggcagccttcctatctcaggtccaaggtcatgagcttgatagtttacttcagaaaggatatcttccagggtttacaaaagatctgggctttctggaaccactcaggtttttacattgttgcattattgaatgaagtagctcattgtccatttcagcggcccttgctataatctgtaactttaagcatgaacaggcagggctccagtcctgtccactgattaaagttacaaaaattctaaaaatcacaattactctgtctaaagctgaaaggtagctgaagctatgagaataaagagtaacctaacacaggctgaattcaaagctttgacactaacaacagatgccaataaatgttaacttattactgttaccgtatcatcaccaccatcagcattgttgtcattattcttacttgtttaactgcacttttttttcacttgtttgtttgttttaacctgtcactaaactgaagctcaagaccccacatctttaaatgcatgaaaatgaaccagagaagcagagtcaagagaaaaaggctaatttacaagctcacaagaccttcaaaaagaacttcatgctattttttactaacacctccttcatttataattactcagctgtcatactgacataatgaactgggccttcagataatgtgaaagtcgaaacactcccttgtagtatttgttcacttaaactttctccagataattgcttgccaaacccctcctgtccctcaagtctttgctcaaatcttatcttctcaatgaggctactctgtcctccctactgaataccaggttaaccccctccccattcctgactcatcttacccatcttttcttacactcctcttaatgtttataaagaaattatcaaatctaacatactacataatttacttattcatcctgtctatttttcatctgatcctgctaaaatataagctccatggtaacaggcaactttgttttattcaccattatattccaaataactagaattaatgcttgacgttcacaaaaataggtatcaaatgatgaaactaatctttctgtatattctgtccaatctgttacaaaccaagtgaatattcttattacttggatttattgcagcattgttcatgatgagtaagtcagaatactggtgacaacagggctgggttcaaaggctcaaacctgtaatcccagcactttgggaggctgaggcaggcgaatcagctgaggtcaggagttcaaaaccagcctggccaacatggtgaaatcctgtctctactaaaaatacaaaaattagctgggcgtgatgatgggtgcctgtaatcccagctactctggaggctgaggcaggagaattgcttgaacctgggaggcaaaggttgcagtgagctgagatcgtgccactgcactccagcctgggcaacagtgcgagactctgtctcaaaaacaaacaaacaaacaaacaaaccaaaccaaaacaaaaaaaactgatgacaacaagataaaagttacaattaatctcatatatgtataatttggtttgctcagaaagcattatgtttttagatgtgatatacttgagagtcttggaagttactaatccaacttttaattctgactatcctaaggaaaatgtttaaatttttttggcacagtgaaattgatctttggtgtaggaaaatatactaaatgaggggcggggggagaagggataaatatgccttctattgaattttctgtttcaataagtccttcataaacaatacctaatattaaaataacagctaatatgtattagcactagttaaatgctatgctttaatgcattagctcaatgaatcctcaaaacaacaccacagggcagatactattattccaccattttacaaaggggaataaagacgaggtttcaagtaacaaaggcgaagccaagattggagtccatgtcttcctgcatatgcttgctgttaatcgcagtgttatattcccttgtattgctcagcaactgatggtgggttacaccaaattataccacccaggtaaaacacacacacatacacacttgccctatctcccaagtgtaatccaaggtaagtatgacagctggcatttccaaagtttcaggataccaatccagatgctttttgtctcaagaagtttggcacggggcctgatatgggcaatcctattgagctactaataatctctaaaattgtgtgttttacctctagaaatggaaaggtttggggaaaaataactaaaagttgggggaaacattttatatcccagaaagttttccattttttaaagaattcacatacagtttttgagggactatttttcctcacccctccctttaaccgctgcagtttttcatctctcctcatatccagatatctcagaccatttttaaggtctttctattcatatttcctttctcagctccttccaagaaaatatccttttctctagttgagtgacctcaatggctggtgaacccataatcattgttctgtgtctctatgaatagtttcttcctccatctcctcatgattgcatcactcccccaccatctttttctttttctttttcttttttttttttttttttttgagacagagtctcactcttgttcaggctggagtgcggtaatgcaatctcagctcactgcaacctccgcccccgcccaggttcaagtgattctcctgcttcatcctcctgagcatctgagattacaggtgtctgccatcatgcctggctaagttttgtatttttagtagagatggggtttcaccatgttgaccaggctggtctcaaactcccgacctgaagtgatgatctgtccacctcagcctcccaaagtgctgggattacaagcgtgagccactgcgcccagccattcccatcccttttcacttacctaatcctacccacccagaagtccccacttacgtttcatctgcaagactctctcatactgagggtgaccagccaccccaagacttcagcactgaatgtcctgtgaccaggaatccaggacatttgtccacctcacacaaccctcctcactgatacccaccatctttcagctgctccacaactccatccactccacaaagcctgtccctctctcgggttgctatctccttatactggtttatcttgactctgtaagaccctcgatggcaaggacaactctggattaatgcccaccatctccacttcctcatccctcattttttcactgtaaaccacacccccccatggttttgaactactgaagctgaatttgtaaacgtcagaggtttcttcaccaccaattcccgtggcaactttttcctcttcttcctctctagggtcatgactgctcccgcaggtagattagatctcctatgaaagggattatcttttctggtattagctactgaggctcctttcagacaggaaactgaagtcaaagcaggtgcaagagagaggaaaagcataatcacgctctgagcttatggtcgtcaggtctaagtggaagcccaagagagaaagccaggtgttctgggttaatgtgagggctgaattccatttcgtagtctcatttgcctttagtaacatctttcttaaatgacccagctttgtctgtactgcccgtgttatcacaaggttttgaacaaagggtcttatgccctcacttgaacaagtgctttatcggcagagtttatttccctttgtggacaattctcaaatttttttgatctcaggatctcttaatgtgcttaaaaattattaaaaacctcaaagagtttttgtgtatgtgcttcataactatcaatcacttctgtattggaaattaaaacagagacatctaaaatatttatttatagctttattttaaagataacattaataattccattacatggtaacattaaatacatttttagaaataattcattttccccaaactaaaacatataggtaagttgactggtattgtttcatatgtttataaatttcttttatgcctgggttaatagaagacagctgcattgtcttatatgtttctgcattcaacgtgttgcaatatattgtcctggctgaagtatatggagaaattctagcctcataaagatatgtatttgcaaaaggcaaagcatttttttaactttttgtttggatggagttgtagatttacatgcaattgtaagaaataatacagaggaatcctaaaacctttcacctgattttctccaatggaattatgcataattattatgcaataattatgcaataatcatgcataattaccatacaatatcacaactaagaagtcaacattgataaaatccaatgactttattcagatttcaccagtcctacatacattcgtgtgtgtgtgtgtgtgtgtgtatatttagttctatgtgattttatcacatatgcagatttatgtaaccatcatcacagtcaagacacagtacagttccatcccacaggtctctcatgctactgtttttatacttgttcctttcctccctttctccttcctcacctctctaactcttgataaccactaatcttttctaaggcagatgtatctttaacagccttttcaggtaaccatggatattctttgataccataaaaaagtagtagtcgcttaaagattagttgcagtgtggaatgtgaaaccattgttaatgaacttttctttaatacactttgaatggatctttttgcatactttggagataccaaaatgacattggtcgtttggaacatattggttctctgagctatttagattttccaaatgttgccacatctcattacccaatatcaaaaatctcattaattgatatcactaccaatcttatcaggaaagtcttgtaagtatttgaaaagttgttgagctcatattagcagctaaaagctttctaaaatcctggttgttgcttggaagctcaaattttaacactggtaacaaatactgccagtggttttccacggaataagagattcactttgttcattttcaagaaaatgtcttctttttttttttttttttttttttttgagatggagtctcgctctgtcgccaggctggatgcagtggtgcgatctctgctcactgcaagctccgcctccggggttcacgccattctcctgcctcagcctcccgagtagctggaactataggtgaaatgtcttcttaatatccaagtctgaataattataatttgtctatcaatcattctttcaagtaaaaatggtgttccattaaaaaagcaggtgagatcaatgtacaactcaaagaattacccaagcgctttttatttctttttatttttttgagacagcgtcttgctctgtcacccaggctggagttcagtgacatgatctcggcccactgcaacctctgcctcccaggctcaagtgattctgctgcctcagcctcccaagtagctgggattacaggcgggagccaccatgcctgcctaatttttgtatttttagtagagatggggtttcaccattttggccaggctggtctggaacttctgacctcaagtgatccgcccaccttggcctcccaaagtgctgggattataggcatgagccaccacgcccagtcaagtgctttttctttaaaatgtcatcatacttgggtgtgcagaaatgctttatatgcatttctcattttgtcatatagaatattaatcacctgtactgaggatttgagagtaaataaaatcggtattttttactgctttgtcagggacattttaaagtgaacctggcatttttcttgtactgcatgtgcatgacactgaagaatactacagtttgaagccactaccttggtttgtgcaactcatccttgctttttgcatcatcagtgcaaatgtcaacagagtgaataaaagcaaataacattttcctagaattaggaaaacagttttgaccttgtagaccccctgaaaagatctcaggggtctctcaggggcctcggatcacactaagaactgctgagctaagataataagcgaagcagtaattagttaaagattcccaaacagaaggtggttcttaagggttgattcttctttcaagaccagcattggagaatccaaatacatatataaaagagcaaccccatacagccattccttctttcctggacactaactttttgtcctctttgtctaattcttttaaactctttccttttctcattcttgccaccatctgtttaaatatacatttgccacccgatttctgtcttagctctctgttcttgtgttgcgatatatgtccttggtggattgtgctggactcgaaagagcagatgtggttacagtacatgcctatgagtagggcacgacaccaatgcttttctccaaatgccagatttggggggttaaaaatagcaccgaagcaacaaatgatacattttaggataatcaagcacaagacagactctcatctgggacagtttcctgctcagaggtaccagatggggaacaggtcccagagaatcacactggtcggtgatcaaggaggaggaatctgagttgtggtgtggagggttacagacacttggcactcctcttagtaccaggcgttcgactcaagagaggggtaaagtctacctaacctagaagattctgcagactggattcctctggaacgtgatgagatttgttttggcaggcagcagaagggcagagcacagagtcagccagcatgaatgaaacggatatagtttcagatggacgttctaagtcaaaggcacccccaccctgccccagcacttccccacccttgatctctgcatgacccaagagcgaagtttgcttcagtacctgacatgctgcttaggacacttcttccaaaatacgatttcctctacccttcttcgtctttctgagttcctggttctctcccgttccatctttataatcagttgcctcagagcaacacaccaataaattaccttttctctaaaacaatattccaggtcatttcatatcattaatatccacctagttgcccaagctcaaagcctgggaagaagtatcttgaacacttcccataaacatccacaattctaaaacccaagaagctctgaaaataaaaacctgtttttggaaggtggcaccagaactcatttggcatcaaaacttgacttgaaatgacataaggctgtttgtggtgttgatttatcccacttgctgagaatagtcttacattttaggacagaaatattaatgtgtttgattatagggtgctgcctcataccccactggggaaagtgttaatgtttttttgtgtactatcatactaaagtcccccaaattctaaaatcatcagatgctcaagtcccatatgtaaactggtatagtattttcatataacctatgcacatcctcctgtatacaggcatgcttcaaattatcgtggtttgcagatactgcattttttacaaattgaaggtgtgtggcaacactccaagagcaagtctcttggtgccatcttttccaacagcatttgctcactttgtgtctctgtatcacatttggcaattatcacaatatttcaaactatttcattactatgatatgtattatggtgatctgtgatcagtgatctttgatgttactaattgtcattgttttggagcaccacaaaccacacctatatcagacagtggacttaataaatgtgataaatggctggctccactgactggctattccctgtccctttcccttctcctcaggcctccctattctgagacaggacaatattgaaattagtccaattaataactctacaatgacctctaggtgttcaagtgaaaggaaaagtcatacctatctcactttaaagcaaaagctagaaatgattaagcttagtgaggaaggcacgtgaaaagccaagataggctgaaagctaagcctcttgcaccagttgcccaagtcatgaatgcaaaagttcttgaaggaaattaaaagtgctactccaataaacacatgaatgataagaaagacaaacaagcttattgctgatatgaagaaaattttagcagtctggataaaagatcaagccagctacaacattcccttaagccaaagcctaatccaaagcaaggccttaactctcttcaattctagaaaggctgagagaggtgagaaagttagaaagctagtagaggttggcttatgaggtttaaggaaagaagtcatctcaacgtaaaagtgcacggtgaagcagcaagtgctaatgtagaagctgcaactagttatccagaacatctagctaagataattgatgaaggtggatacactaaacaatagattttcaatgtagacaaaacagtcttctattggaagaagatgccatctaggactttcataactagagagaagtccagacccggctttaaaggacaggctgactctcttgttaaggactaatgcagccagtaactaagtttaaaccaatgctcatttactattctgaaaatcctagggcccttaagaattatgctaaatctactctgcttgtgccatatcaatggcacaacaaagcctggatgacagcacatctgtttacaggatggtttactgaaattttttttttttttttttttgagacggagtcttgctctgttgtccatgctggagtgcactggcatgatctcggctcactgcaacctccacctcccgggttcaagtgattctcctgactcagcctacagagtagctgggattacaggtgtgcatcaccacacctggccaatttttgtatttttaatagagattgttggccaggctggtctcaaactcctgacctcaggtgatctgcccacctcggcctcccaaagtgctgggattacaggtgtgagccaccacacctggccagtttattgaatattttaagcccactgttaagagctattgctcagaaaaaaatgattcttttcaaaatattactactcattgacaatgtatctggtcacccaagagctctgctagagatgcacgaggagataaatgttgtttccatgcctgctaacacaacacccgttcagtaacccatggattacaaagtcactttgacttttaagtcttattatttaagaaatacattttgtaaggccataggtgccaaagatagcaattgctctgctatgagatatgggcaaggtaaataggattcaccattctagatgccattaaaaacactcataattcatgggaggagatcaaaatatcaacattaacaggagtttggaagaagttgattctaaccctcgtgaatgactgagaagttcacgacttcagaggagaaaggaactgcagatgtggtgaaaatagcaagcgaactggaattagacgtggagactgaggccaggcacgatagctcacacctgtaatcccagcactttgggaggccgaggggggcggatcacgaggtcaggagatcgagaccatcctggctaacacagtgaaaccctgtctctactaaaaatacaaaaaaaaaaaaaaccaaaaaaaattagctgggcgtggtggtgggcacctgtagtcccagctactcgggaggctgaggcaggagaatgccgcgaacccaggaggcggagcttgcatgagccgagaagtggagactgagaatgtgactgaattgctacaatctcatgatcaaacttgaacagatgaggagcggagttgcttcttatggagaggcaaaaaaagtagtttcttgagatggaatctactcccagaggagatgctatgaacattttgaaacgacaaaaaggattttgaatatcacaaactcggttggtaaaatagcagcagggtgggagaaggatcactccaattttgaaagtagttctattgttgttaaaatggtatcaaacagcttcccatgctacagagaagtctttcgtgaaaggtaaagtcaatccatgtgacaaacttcatagttgccttaagaatttgccatagccactccaacttttagcaaccactgccttgatcagtcagcagctatcaacatagaggcaagacctctgccagctaaaagattatgacttgctgaaggttcagatgatcattagcacattttacctataaagtacttaaaattaaggtataaacattctttagacacaatgctattgcacactttatacgctacagtatactggaaacataacttgtatatatatgcactgggaaatcaaaaaattcatgtcacttgctttattgcagtgatctggaaccatgcttgcagtatctccaaagtatgcccatactttaaatagttagattacttataatacctaatataatgtaaatgctctgtaaatagttgttatgctgtattttatttgtattatttgtattgttattttttgggtttttaaaaaacatttttgaccagctgttggttgattctgtggatgcagaagacccactgtaaaactattaactcatttagtcttcctaaaaaccctataaagtaggtactatttattatattcccattttatagatgagaaaactgagtcatagagaaataaagaaacttgctcaaggtcacacagccaataaatagtttgatctgagagacaaagaaaactgaaaagacaataaatttatctttatgtaactcagaatgttactgtatgtcctatcctcataatatctaaaattgtcccttctgttattggaagtacaggatccacacgttaggaaattctggcctactacaggataatctaatattttagaattttaataactaagctcttctatctttttagcctcatcacctgccacagtaacctaccaacgtctggcacccagccattgccaatgcttcctaaacccaaacctgtgggtttccagggagactggggcattttccatctgagtagacagtaaaaataagcaaaggatttaccatcatggagcttctgggactataccgaccacgggtcactctgcgctgcgatctgtaacctagtcagttctgagatgcacggtggctcaaacgcacttagcatggtgacttgccactcgcactggcccaggtctggcaccgcgctacaatttcttctgtagcccgttctgagattctgtcactctccctgaactgcaactctctctctccccgccacaccctaaagccccacatcttctcaaccctctcccaccgcttcttggagaagcgtcccctccctcagtcttacctttggcttaatttaaactctcccgaaaatttatagcggatgacggccgatcccgcctcccagaccatgtgggcgcggctcaccattgctccggagcacctgcggcgggggcggggtgggaccagccaggcgggcccagggggcgggcccggcccaaggtggtgggggacgggcccgggcgccaggggcgggacgaggctctggggactggcacagaaaagggaagtgaacctggcgagggcggggcgggatggtgcagttggtggggaagggtggggcgaacctaggaaggcggtcccatagggcgggcgcagactgggcgcccgggacgggtcaaggagggcggaatgaacctggagagggcggggcggctgggggaggggcgggaaggccctggggactggcctaggggcgggcccgggggggtgggggggcggtgcggaatggagccggagggggcggggcggccctggcgcggctagggtggggtggggcgtcccaggctctggctaaggagcgcgcggcgggcgggccggccgcagggcctgggcacgaccatggtgggacgtcgcccgcggcttcggggaccgctgcggcagcagaggcggctggccaggaacgcgggccgaggctggaccctttgggcagctagcccgtgatctctgccgtcaccgatcgcgattcctaccccctcgccttcccccggcgccgacggccacaccgccggacgatgcgcgcccgcggccgcccgggaggctgagcccagcttcccgctccgccttccccgcgcagctgcccccatggctttgcggggcgccgcgggagcgaccgacaccccggtgtcctcggccgggggagcccccggcggctcagcgtcctcgtcgtccacctcctcgggcggctcggcctcggcgggcgcggggctgtgggccgcgctctatgactacgaggctcgcggcgaggacgagctgagcctgcggcgcggccagctggtggaggtgctgtcgcaggacgccgccgtgtcgggcgacgagggctggtgggcaggccaggtgcagcggcgcctcggcatcttccccgccaactacgtggctccctgccgcccggccgccagccccgcgccgccgccctcgcggcccagctccccggtacacgtcgccttcgagcggctggagctgaaggagctcatcggcgctgggggcttcgggcaggtgtaccgcgccacctggcagggccaggaggtggccgtgaaggcggcgcgccaggacccggagcaggacgcggcggcggctgccgagagcgtgcggcgcgaggctcggctcttcgccatgctgcggcaccccaacatcatcgagctgcgcggcgtgtgcctgcagcagccgcacctctgcctggtgctggagttcgcccgcggcggagcgctcaaccgagcgctggccgctgccaacgccgccccggacccgcgcgcgcccggcccccgccgcgcgcgccgcatccctccgcacgtgctggtcaactgggccgtgcagatagcgcggggcatgctctacctgcatgaggaggccttcgtgcccatcctgcaccgggacctcaagtccagcaacagtaagtggggccagagggaggtgggggaagactacctccgtgccagcccaggcgggctccacaggacatagtaccagatggaaagaggtgggagtcagccttagggcgccagcagcaactcatgcccaggccttcagggctcggaagtccagctagtccttggttacttgctttggggctggtgacacgcttaaccttgacttgcctttgggtgctttttaaaaaagttcagaccagacttgcttgtagaggaaacatttgtaaaatacctggatctcctagaaacctcagggggcagtctggcctttcaataccagaggtgattcatctgggtaggactttgcaaaccgaggccttctgcagattatatggaacccatgaccgtcttcacccggtggccttcatcaaagtccccgaatgcactcggggacgtcaactttacaagtgctgtattgaggttgctgtttgcctattcaaaatatgacttcatgtctcttaccttttccaaagactgttttcattcaaatgtctctctatgggccaggcgcggtggctcatacctgtaatcccagcactttgggaggccgaggtgggcggatcacctgaggttacgagtttgagaccagcctggccaacatggcgaaaccctgtcgctactaaaaatacaaaaattagcccggcgtagtggcaggcgcctgtaatcccagctactcgggaggcggaggcatgagaatcacttgaacccgggaggcggaagttgcagtgagccaagatcgcgccactgcactccagcctaggagatagagtgagactctgtctcaaaaaaaaaaaaagtgtctctacgtgaaatatgattttattattggttcaatggcttcttttctccagacaagaggcactggtgtgcaccgtaatgcacttttgggttaataacaagtgcattgtccttgcacaggtacttgaaaccttgaagacctggccagtgtcattgactttgtttataaatcagggtggattttccagatgtcaataaagaactgacaaatgacttaaatgcaaatcctatgaaactttgctgtataaaagagcctatagaattgctgtttgatgttggttctttaatattgaagatcgcttcatattcttataatgagatgaaatcccagggaaggttaaaggatgcagccagccctggcattggcctacaacagctggaggtctttcaatcctgtgaaacctgctaggacaggagctagctcaagtgaaaacattgtccctaaagaagagtgacaagaagaaatttacttgaaaattactaatgtagcattttcactgggaattgtaaataattggaatgttgtagctaagcataagcattaggttttatttcatgatcctccttccccccaagtctctctataatttagattgcatctgcttaggtgatgagagcaaagtctaacaaaatatgttgttactggtagcggtgtattcttagtactttgacagaccacatgaaggactatagcattgcttgcttttgaactgtgttacagtaaaaacagagcgcaatttcctaaaatatacttttctttcgataatatatatatatttttttcaataaaagaaacgtctgaccaggtgctgccatagaatgggtgacttgtccatgtgttccataagccctatttccaatggtgtcctgaaagcctgcgtctgttaggagttttctgcagaaccaggtattttaaggacatcaacagcaccattcattctttcccctgcctcttggcagttgcagcaactctgtgacaacacagaacccaacattctgcaaatgtatccaaatcatcaacacaagcaaacacttgggttgtactggtccttaggctaaaaagttaaagggcctatagctattacttttacactgcacttagttttgtttggttgcaatacttttcaaagttcatacaacacagggtagagaatgtttgctagtgtttttaaagcatgttttaaaggatgtttatccattcctatgggttaatccataggatttatggatcaatcaacaatccatagcaattattgcaaatagtaaatttttataaagttttataaagttttataaacttttataaaatataaatgtttaaagaactcctaatattattaaatggtaaaaagaaataacatgaccctggaataataactatggccgaacagtttttactgacaccagaaaaacttgtatagtggagtatagactactgtgtattcagtagatattacataatttgatggtgattacatgctgctacttagtttttgaaagacttttcagtctcagaataaattgccaaacttcccggagtattttaatttctataattgtcaggcaggattccctttgctttaaattgttgcactcttataaaagacttaattagctagtcactagcctggccaagtatttgttacaatatgaccattatcatagttatttaattactataaagtgaagagtttgactggggtctagaatgtgcaaaccatggtgcctcatacatggtctttatcctgaatgtctgattttatttgttcaatgaataaatgcagatttgaaattctctgctgatatatgaagctatgacttcttgtttagacttttaagtataacagatactctattgcagtatgttttgtttgattttattggatatttgctaatggtggtagtgagttagtgataacgtaaacaaggttttaaaaatcaatattgaattttattttcactccgaagtgtactcatgtaccaaagagctaatagaagactacttggagccaattcagtggaaattactgttttaaacaaatatttaaatttgtctagagaatatgttactcttgacagattttcttttatcttttctagtagatcttctcaagttttatcatatcttgtgagggaatgtctgtgtctagataatagctgatatgttgtgaatgatataaacaactttgtcccttttctaacaggtagcaacaggttgaaagttgtgccaagttagcaagctttaagcaacatttatgttttaaataaatactaggccctgtaactcccttctggatgcaaaataagtagaaaatactttatataagtctacctataggcaccccccagagaacaatacaaggcaactttgagttactgtgaaaatcgccagtgttatgcgcatttacagaagagagaaacattgtggagagctggaactcattcaacactgttggaatgcccaccctgtgccagtcacttctgggcctcagggacactggcaagccagacatcaatgacaacaaatctgccatcatagagcttagtctaacggggaagatagatggcagtcacgtaataacaaatagattagaaaatgccatcaagaaaattaagcatggtaaggggtggagagtggtagagtggaggatgggggtgctgtttcacacaggggctctccagggaaggcactccgaggaaggaccacgaattcgtcaagcaaagacccaggcaaaggaaagaggaagcaaaaatgagccttccatattggaggcctaaggagaaggctggtgaggagaggcatgcgtggggcaggcctggcaggcctccctctgctgtgcacatggaggtttcacttggagtgatggtgctggcttctgtgaagaacggactgcagtgggctcaagtgatggctttcaaggttgtctatatgagaggaggcaccgactctgcccagagtggtagcaatggaagtattttgcagggaggttaccagggggcagtgaagataaaatactgcaatataagaattcccaaggatggtttgaaatattagaattttgtttaagagttttatttatcaaattgcagaagtgcaagattgaagtaagattatgtggcatcatgtatggtttcctttttcttttttgatgttgcttattgtgttctattttttttttcttaagaggaaataaactttccatggggaactgagccacaaattatggtagctacttacttttatactttttatgtcagtgattaagcatttattatctcaatttttttagtcttttaggaataattattatctatctacagtattatttacaactacaatagttgtatttattatgaaatgccatttggagctcttactatgacaaactgcaaaaggaatataaattttgttttagctttttttcattagtactgtgtaaataaaagaactatctgagaaaattatggaaaatgtaatctccagataagatgtttaaatagctcatcagagtgatttggggaagctactaatttcactattatcagttgtaagacataagttccttctctcttctgttcttatactcaggacatgtagcttcatgctatagctgcttcctattccaggaggcacagagaagtcagtccagatgtcccaatggtaactgagatctacatctgcttttgaaacaaagttagtgaaagattagacttttagaagaatggcaatcacaaaagagtcaccacatcttcccccatcattttcatgtttgcgtattaaaaagtaagtagctggccaggtgtagtggctcatacctatctatcatcctggcactttgggaggccaaggtgggaggatcgcttgagcccaggagtttgagaccagcttggggaacatggtgagaccctggactacaaatattaaaattaaaaaaaaaaataggcaatgtcttatttttttgtagttgtgaggggtatagctagttagttctgaattatgcaaagtatccgtatttgatcagttttgtaatcattatcaagtatatcaaagcagggtaaaggagacagaggaaagtatttatctgctctacccatttaagaaggtcatttgtaagccctgctttttcacactagcatttaagtgctaaacctaccagaatagtgcagctaagggaaacagcattggcttttttgtgtgtgtttttgtttttttgagacggagtctcgctctgtccccaggctggagtgcagtggcacgatcttggctcactgcaagctccgtctcccgggttcacgccattctcctgcctcagcctcccgagtagctgggactacaggcgcccgccaccacgcccagctaatttttttttgtatttttagtagagatggggtttcaccgtgttagccaggatggtcttgatctcctgacctcgtgatccgtccgcctcggccgcccaaagtactgggattacaggtgtgagccaccgtgcctggactttttttttttttttttttttaatacaaggtcttgctgtgtagcccaggctggtctcaaactcctggagtcaagccatcatctttcctcctcagcctcccaaagtgctgggattacatgtaagagacaccacctctggctctatctagcattgcctttaaagtcagtcagatctggatttgaatatcagtgtcctcatttactagctgtgtgaccttgagcaagttatataacttcattgagactgattgtcttgatttctgatactgtattcgtttcttgggagatctgtcagaagtcctgtagggaaaatctgtttaatgtttcttaacccattaaagccaattaggtaaatactggcataaaaacatatggctttttcagggaacaatgagtagttaggtgtaactagaatgaaaagtggagaaagggtttttttgggggggaaggaaacaggcatttcgcatgtggtcaggcagtgagtgccatggatgccatactaagatgtgtggactatttaagaggcaagggagagccattgatggttattgaggagtagtgtagtatgatctgctgcaagaaaacacatctacagagagagaaacataagcttgcggtcattgctttatgactgtactatcatagattgtcagaatggcaataataaaaactaaaataacttacttagacattggtttgaccacattgtttatcatttacaattcaagcctagtttttagcatcacaatttgtttactgaattaatttagactacattttctctctgatttctttctttcttttttttttttattatactttaagttctagggtacatgtgcacaatgtgcaggtttgttacatttctaactacttccaaaattggaaaatattctctagctttaccgtgtcaggctgatgatcttaactccaaatgttaatgactgtccccaaactctctgaggctccccaaaccctctgaggcaatccagggctcccgaaaaatagaagcaccccaatgaaggaattttaatgggcagagggttttgtgggggacctgggagagctgtgatggctttattttggagcctgaaacttaaatttgtacagttgaccccttggcagtgtgaatttagtttttaaaattcatcttctccaaatattgcttcacgttgagtgcttttaactaaataatagtattaataattgcaaaaccacgattacttgtacaccaacctaatagtaacaagatgagtttttaacatttatttagggcatattagatgccgagcactactcacaatttatcctcatttatttgtcactacaaccttttgaggtggcgctctaattatccccaatttacaggtaaaaaaaaaactgaactcaatgattaactgacttgatcaaagtcattcaacccatcagaggggagtgctaagaattaaatctgggacctctgatcctggaacttgtgttttattgtctccgtatattgcctggattaacagttctcaaatatttgctttcaggactcccaaagagctttggtttatagcaattaatatttatcatattagaaatttaaaatgatacattttaaaaatgtttaataatatgaatataacaatagaccccattacatcttaacgtagcatttgtaatgggaaaacccccatattttcccaaacaaatttaatgaggatggtggcatttatttgcacttgtagagttcactttaatgccagactttgggagaagacagatggatgttcatatctgcttctgcattcacactgtcaccatcttagggaaccccagggatccctagactatactttgagaacctctaggctaaatgattagttctgttgatccagaatgacactctttagcagtagttcccacacctattgtggcgtcagaatctctctgagaactttttaaaaataacatgttctgcctcatttttggatattctgcttcagtgaaccttaggaataagcgatgcattttttccctaatattttatttggaaaatcttggaatatatagaactgacatagttttaagtgaaaattaaaattttacttaaggctgcgtatggtggctcacacctgtaattccagtactttgggaggctgaggtgggtggatcacttgaggtcaggagttcaagatcagcctggccaacatggtgaaaccctgtctctactaaaaatacagaaattagccggacgtggtggtgggtgcctgtaatctcagctacttgggaggctgaggcaggagaattgcttgaatcaaggaggtggaggttgtagtgagctgaaattgtgccactgcactccagcctgggtaacagagccagatgccgtcaaataaataaataaataaataaaataaaataaaataaaaaaatcccttaaaattattcacttacaaaaattatttcacttataatcccactgcctagattctaccattaacatttcactaatgtgctttaacatagatttaacccatatgcattcattagtctatcttactttatgaggaaacaataatttttctttgaagattccagatgattcagcaaatatagatatacagcaaagtttgaaagctacagttctgaggaccagatttatggattccttcttatatgttatctgggttgatatagaaattcttccatggctacagactatatccaaatcaagtaactgtctgctgataaatgtatggtaagtcatagcaggagccaggtgacagtatgcctgatgtattctggcgtatgactctgggaaaaggaacatctcagagcgtttgttcctttcacattggaggacaaatggtgttatttgtggtagtaggtttgagctctgtctgactccactagctttttgaatagggtgacgtgaggattaagtgagacagtgtatgtctggggtcggcaaatttctcctgtatagggccggatagtaaatctttttggttttgcagcccatatggtctctgtttgcaactatgtaattctgctgttgtagccaaaaaaaatccttgacaatatgtaaacaaatgaatgtggcagtgttccaataaaactttatttacaaaagtggcattgtgctggatttagcctgtgggctctagtttgccaattcctcatatatgtcaaagaatttagtaaactgtaagacaaaatttaaatgcaagctgttgactatattcattttaatattttacttagaaacacttctaagtgttttacatttaaaatatttgtgctttaaatatttcctaatgttgtgtgtgtgtgaactcattgatacctaaacattttctacaactctttacagcctaataacgttactatttttattctttctgcaaaatcaggtgtcacttaatcaggtatttgttcatcttggttggaggtgagggtctttttaatttggctaacttgggtgattccaggcagcctgcagtatgaggaaacagttctgagccttgttccctgcaggtgtgctgagatctgtacactttggcaggcctgctggtgacttgggttgataagttgggtcaaggtggaggcataaagtattaaattgctcttgtaactgtttcactaccacggttcattactagtttgtgcattttttaagctattggaaaaagagcaaatcacattccatttcgggaagtatcttgatggcatataggatgtttgaattgttacttctgaagatttggcttcacgtgattttaagtggtttattttgtttcagattttctgcaaataatgcatctggttgtattaaatatgttatgttcttgctaatatattaatgtagaatattatgaaagatttctgcctcagtatgctttattatgtaccttgactattaaaatactaacatgatagaaatttagagctagactttacatacaatgaaatgtaagtgattttctcattaaaactgagtatactacatgtccatgtaaaggcttgtcccatgaaagatggattttatttcagtatatgagcaatgtgaagttctgttttagcttatcacatctgttttttctttacagaagcctgtcttcttgtatttggtatgctagctctttcatttatacaacagttacttgttgatcatatattatatgcggaactctcctaggcgcttggtattgtgtagtgaacaaagcagacacaaattcctcccttaaggatcttgtattctagtgagtgagacagacattaagcaaaataaataatgtgtagtatcttggagagtggtaagtgcttagtataaaaactaaagttgcaaaggaggatggaaatgttgaagtgagcagtcaaagattgtgtgtctaagcaaagtcttgcagaaaagatggattttcagcagtatctaagtaagtgaggaaatgggtcatctgggaaagaacatgcttgttacagagaacagaaattgcaagatttctaaaacaagaggccagtgtgctgggagaaaagtgaaggtgggcagaacagcagcacatgagggagaagcagggatccctcagactatgcagtcttgggggccctacagggtctttgacttttactacgacgcaagagacttttgaacagaggagagctgtggtctgatttacatattaacaggactatactggcagcagttttgaaatttgatgaaggggaaccaggttggaaatatgaatgtgagagtcatcagcatgaaaaggtatgtaaagccctgagattggctgagattatctagggagtgagtgtaaataagaaaaaactagacagaggtccacggactgagtcctcgtagtctccagtctttagaggtcagggagacagggaggacccaagaatagctagaagtaaagggtaaaatcaggagtgtggagaccagtgaagaaagtatttcagggaagaatgatcaaccgtatcaaatgccactgatagatgaatattcaaataactgttttgctacaattatttttaaaacaatcatttcttcttcttcttcttcttcttcttcttcttcttcttcttcttcttcttcttcttcttcttcttcttcttcctcttcttcttcttcttcttcttcctcttcttcttcctcttcttcttcctcttcttcttcttcctcttcttctccctcttctccctcttctccttctcctccttctccttcttctccttcttctcctccttctcctcctcctcctcctccttctcctcctccttctcctcctccttctcctcctccttctcctcctccttctccttcttcttcttcttcttttttttttttgaggcagggtctttctctgttgtccaggctggagtgcagcagtgctatcacagcccaggacagccttaacctcctgggctcaagtcataatcctacctcagcctcccaaatagctggggctatataggcgagtaccatgatgcccagccactttttaagttcttttgtaggggttggttctcactgtattgcccagattggtcttgaactcctgggctcaagtgatcctcccgctttagcctcccaaagtgctgggattacaggcttgaggcaccacatctggccaagagtcttcatttcttaatgtccagatcctaatacatttttaggagggtagaggtgaatcgattttctgtaattagcagctgacttaacatgaaagaaaaagcttataataattcatcttcttcatattcattcttccctaagagtattcattattaatttcctcattcattcagcaaacacttgagcctgttaaaatgccagttgctgtgcagtattaaaaaaaaagattaattaggcacaagttctatcctcaagctgcttacaatttaataagatgaaattgtaataaggaagataaggcaggatttaagtgtaacgggcaaggtacagtctaagtgtattagaatgcagagaagtagctgaggttaggcaaaaggcaatggggagatgttgcttatagactcatctaatattggagcaggaagtgtccagattccaaaggccagtggacttgtaagtggcttcacagttaatgccatggcagcctggactaagagctcagtgctggtgccctgattgagtgggaggtccagtaggaagtgtgagttttatagagggcggaagaggaaggcattccattctgtaaggaggcacagggcagtggggagacagaaaaaggcaatgctgtagattttagaaatggcacacagaattgttagaatatagggttcattcaggagagtacaaaagagagctggaaggatcatttagaatgagattgagaagggacggaggccaaaatgaaagtgtgggctttactccctaggctggatagtgagtggggtatgtgtccggggtgggagtcaggggaagggggaggcagatggtgctaggggtgaaggggaactggtgccactaggaaatgggtgaaaagaaatatgagaaacattctatgctatgtgataaattgagaaagttatcattcattccatataaattgtggattgtcctcaaagttgaaatttataaagtttcatgaagttttttgttaatatattctttcacattattgcttttctcaacttgttttcttgcttatgactttttttggataatacatttccagttaaagattaatcgaaactcatttgactcattaaataatttggacacagtgatcccatcaatgttgagaacatgatgtacataataattgcttttttaaaaatatacattatatactataattctgaaaataccaatgtgaaacttcaaaggagctgaaaaaattctgtgcctcatggttgaataagtaggctaagtacaaggttgtagaggccaattgttaaagaatggggctaacgagggtcaaaaatctttactgaagtcacaggaaagggtgctcaaacagttgttgctaggatactcacaagaatttaccatttctgtggccaaaaaggttagtttgcctggtttgtacattaaaatcagtggtgaccagctagtgcactgtggttcttcctgcgtgaatgacaggaagcggaagttggctgccaaccatgtgtctttaggctgaaacctggcagtgtgccccattatattacctgttgtgagatgggctatttttggtttcagtcactttgtccaaaagatatggaattccaggaattctgctgaacacctctgagatggaatccaaaacaatgggcttttcatggtaccctaaagggttgacatttggagtgtgatttgaacttgttttccgtgagcctgcagtgtggaggtgcctggctcctatggaaactctggacctggggaatgggggctggtgttctgaaactgtcagaaccaagtctgctaatatcatacgctgccatccgtttatttgggaatgaagtttgttagtgtttggtttttagttctcacttttgactctgtttttattatttagagcagactttctttgacctttgcatcgcaagggctgccagcccttacttggggtctgggtgtggataaggaggcaaggaagtgttttgaggcctattttcatcagtcgtttctcatgtctgcctgcctggaggtttgtaagaatgaggagataatgtgtataaaagtgctttgagaaacaaagttttatagaactgcaagccattttgatcattaatttggggtcttttggtgataggaacaattattgtttaaaggtgaaattaatggtatttctagaaggaaaacataatgcagctgatgaaaaaaaaaagctaattaattcccctgtattttgttgttgttgttgtttcagctttctgtggtttcagtatgtagggtttaaaggattggggatctaaatctctttttctgtaggtatttatttttctttatattcatagggaataaggactgagaaataaatatacctttaactgatgtggatggaacattcaaaaattaatctcacagaatgagatttctggttgctttgccctcttcttataaccaatagcttctgagcagaacagaaaagggctggggatgagctccagctctgtgtttcagccctttgatcttggataacatttctaggctctgagctggagattatattcctgcctggtagactagtgtcacaatcaaatgaaatattaaatgtgtggaaacaactctgcatagcagagggttggtaaatggtgggcaatattcttattatttgaattggtgataagtatcattaacaaaagatattccattgaacattgtgatgtacaaggaactatgttaggcgatatggaggattcgcagaatgctataaaatacatttcctgcgattaaagtagcttgtacatagctttgttagagaagtcttaggtaaaaagataactgacaaaataatgtcatatgtgagtagcaaatgatagggaagataaaatcattcacaattttgtggaatgcttagggggtttttctaaggaagctggtccttgaaaattgggacagtatagatggataggaagaatgaaaggttatttcaaatggaagtgggtctctgatttccttcctccctgcctctctcaccctccttttctccatccctccccatgtagtatagcattaagagtaagaatggtagcatgttggccttactgtttagccactgtgtaaccatggacatatagccatcctaaatcggattcttcatatctataatggaaataagaatagaagagatggttcttgctctctaaatttcagttacaagatgacacggggaaaaaagttgtaacccaacagtatttattcagtatcaattacttacctaataagcccctactcaaataaccctccacatttaaacctagtgttggtttcctccaattgggttccctccaattgcattagctcctatgactgcctgatattataaatgtttgacaatgtaatacaatcaaaatgcacatccattgtgaaatctcaagccttgaaaaagaggcaggatttcctgaagttcatgaaattgattttgaaggcttgctaaaaacactttcaaacccattaataaaagtgtgtgtgtgtgaaattcttatagagtaattaccatgtctcagccactgttctgagcacttcacatgtattcatttactcctccctacaatcttatgatgtaggtactatggtaattcacaagacaagcaaggaagcagaagcacatgggatccaaaccaggcgggttggccctagactgcatgcatttcctcaccactctacactgcctctatttagatcagttaataattgaccaatggcaggaaatcaaaagggaggagaatgggcacctgagtagagagagatttccaaaggataaataaagattttgtgaaaaattagtaaaagctgtcaactaaatgagtacatagtggttaggaccataggctctggagtcagactgcttgagcttcactgctccttagctctgtgaccctggacaaattactgaacatctctgttcctcagtgtctttatgtatgaagtggagataatagtatctacctatagcattgtcgtatgggttatgtaattaaaatacctacaacctcacctgacaggtagaatatactcaggagtgttagtttttactaaaactaacatttgaaaaaaatgaccctctttatgattatgttctgcaaaccagataccctctcctctttctatagaagggattagctagaggagagggtggcagcctccagctgcattagagcctcgtggacaacctagggaacatttctgcatggttctaggcagaggcagatcagccaaagggagaggagctgaaggtgcttggaagggccaggtaggagggtgcaggtgaggagtgaatgaaatgctcatggatacgaagagtcaaaatcatgaaaatggccatactgcccaaggtaatttatagattcaatgccatccccatcaagctaccaatgactttcttcacagaattggagaaaactactttaaagttcatatggaaccaaaaaagagctcacattgccaagacaatcctaagcaaaaagaacaaaactggaggcatcacactacctctcttcaaactatactacaagcctacagtaaccaaaacagcatggtactggtaccaaaacagagagatagaccaatggaacagaacagaggcctcagaaataacaccacacatctacaaccatctgatctttgacaaatctgacaaaaatgagaaatgagaaaaggattccctatttaataaatggtgctgggaaaactggctagccatatgtagaaagctgaaactggattccttccttacaccttatacaaaaatcaattcaagatggattaaagacttaaatgttagacctaaaaccataaaaaccctagaagaaaacctaggcaataccattcaggacataggcatgggcaaggacttcataaccaaaacaccaaaagcaatggcaacaaaagccaaaatagacaaatgggatctaattaaaccaaagagcttctgcacagcaaaagaaactaccatcagagtgaacagacaacctacagaatgggagaaaatttttgcaatctacccatctgacaaagggctaatatccagagtctacaaagaacttaaacaaatttacaagaaaaaaccaaacaaccccatcaaaaagtgggcaaaggatatgaacagacacttctcaaaagaagacatttatgcagccaacagacacatgaaaaaatgcttatcactactggtcatcagagaaatgcaaatcaaaaccacagtgagataccatctcacaccagttagaagggcgaccattaaaaagtcaggaaacaacagatgctggagagaatgtggagaaatagtaacggttttacactgttggtgggagtgtaaactggttcaaccattgtggaagacagtgtggcgattcctcaaggatctagaactagaaataccatttgacccagcaatcccatttctgggtatatacccaaaggattataaatcatgctactataaagacaaatgcacacgtatctttattgcagtactattcacgatagcaacaacttggaaccaacccaaatgtccatcaatgatagaatggattaagaaagtgtggtatatatacaccatggaatactatgcagccgtaaaaaaggatgagttcatgtcctttgcagggacatggatgaagatggataccatcattctgagcaaactgtcacaaggacagaaaaccaaacactgcatattctcactcataggtgggaattgaacaatgagaacatttggacacagggtggggaacatcacaaacgggggcctgtcatgggatggggggcagggggagggatagcattaggagaaatacctaatgtaaatgacgagttaatgggtgcagcaaaccaacatggcacatgtatacctatgtatcaaacctgcaccttgtgcacatgtaccctagaactcaaagtataataataataataataataataataataataataaaagcacatttgttgtagttgcagagctacacaagagctcagggacagatgctggcatcagcttcactcccgggagttccccctgtgcatcctctacattggcaggaggctggcattgagaaaaccagcaactggatgaccactgtgtttactttttgctacattttgagctccagtaaagcaattatatctcctacattatctttatcagttaaagaatctataagcactttgcaaatttaatgtaagataatgtttgataataatcagctatggtaatatatcatctaatttcaatattctccacttcagtagaaaacattctgtacttaggtcagaaaataatgtattttttcatatcaggtaaatttttacagacttctgatcctacttgtgatatctcaggaaatgtttcttgctcttagaaatcatttactttctcagaaagagaactactcataaagagctctaagttgtgtcttaaaataacttgtaacttcaggcacagataacccactaaagactacaaaatctgtgctgtaagtaaaatggtaaaatgcaagtttattcttgtttattctgccaactacagtgaagattgtgttttacatgccacagaaaaattgtgacagaaaaattaaaagaatatgcaaatgtctcacttttgatttttctttagttttgctacttgagaagatagaacatgatgacatctgcaataaaactttgaagattacagattttgggttggcgagggaatggcacaggaccaccaaaatgagcacagcaggcacctatgcctggatggcccccgaagtgatcaagtcttccttgttttctaagggaagcgacatctggaggtgagcctttccttttgcaaacatcggcagaaactgcttgctatgctttatttcagtaagtcccaaagtattcagtaattctcagcataaatagtcgaggcctttttgaatgaatttttatggttttgatcaaaataattgtaatgacaacggaacagataatttgatgtttgcattgtcatatgactccatttcagaggagaactttctagttaaatcacaagtttagttaaaactggttataatttgaattaacactaaattcccaagattttgtaggatgcgccagtaaattaaagtgaattttccgtgatgcaatcatggctcattgtagcctcaacctcccaggctcaagtgatcttccctcctcagcttcctgagtagctaggaccacaggtgtgcactaccatgcctggctaatttgtgtgtgtgtgtgtagaggagcgggggtttaggagggagagtgtccactatgtttcccaggctggtcttgaacttctagactcaagtgatccacccacctcagcctctcaaagtgctgggattacaggtgtgagccactgcacccagcctgaattgacatttttaacaaacttttgattccttgtgactcacaggcaatattagcatggaaggaatttaagaaaaaaatttagacctatccttcattttatagattgcatcatctaaagattaaagtctcctatttgaagactgggagctgcactcaaatggattaccaggttattttgactttccattcagctttgtctcattagaaggatgctaacaattacaaaataacaaagaaaaatcacactgtttaatagttatgatgcacctagaacttacttgccattgtttagtgctcataaaatcctgttaataaagaaaatgtggtgcacgtacaccatggaatactacacagccatgaaaagagtggaatcacgtcctttgcaacatggatgcagctggaggccattatcctaagtgaattaatgcaggaatagaaaaccgaatatcacatgttctcacttataagtaggagcttaacattgggtactcagggatataacgatggcaacagtagacgctggggactaagagaaggtggagggaaggagcggggaaagggctgaaaaagtaactcttggatactatgctcagtacctgggtgacaggaccatttgtatcccaaacctcaacatcacacgacatacccaggtaatacacctgcatgtgtactccgtgaatctgaaataaaagttgagaaagaatttaaaaaaggatagatgtaaaaaaacaaaataaaatcctgcgttaatcattaaagttccatttttttctgtttttaacagcttcgttgagatatgattcacataccacgaaactgatgcatttaaattgtacagtttgatggcattttgtatattagtaagttgtgtgtccatcatcccagttgattgtagaacattttctttcatgcagaaagaaaacctgtcaccccttacctattgtccccaactcccccttccctctcagccctaggcaaccactcatttatgttctgtatcttgacttttgtttattctgaacattttatgtcagtggaatcttagaatattcctttgtgactggcttctttcactgagcctaatgatttgaggttcatctatgtcagagcatggatcaatacctccttcatttttatggcttaatcatagagtattactgtaccacatcttgtttacccatttatctctggatggacatttgggttgtttccaatttttggcgactgcaaatagaactgataacaaacattcctgaacacatttttgtgagaacgtgtgttttcagtttccttgactatatatctaggagtagtagtgagattgcttggccatatggtaattctgtgtttaattctttgaagaagcattagaccattttccaaagtggctgcaccttctttttttttattcccaccagtagagtgtcagggttccgatttctctccatcttccttgtcacttgtcatctgaccttttgattcgggccgtccttgtaggtgtaaagtggtatctcatggttaaaattacaattttaggattttgttattacttttttttccctttttttacataaaagaaaactgggaatgagagagagaaatacttgctaagagtccagtacttgtaagtgccggaaccttttaagaacccaggtctgcctggctctcagattcatgctccacaaaaattgtttttccttttaaatctttggaaacactagaagttagtccctcaaattcacagctgaagtcagtggcagagacccctgtcagtaaaagttccataaaactgccttccatttaaagcttatcttctgcatttaaaattatgatttaattgttctacttaaagcttctaagaaatttatcagttggatcagggttctatagtgtcttagggccagtctgaaaaatacaagtgcttgagcctcaccccttgatgaattagactgtctactggtgaaggctgagcgtgtgtgtttttataaaccgttaaatgtgttttcattgagttaatgactaattttagtaatttagtaatttaatttagtaattttctaaccatatgaaaatatcaaattacataagtgacattggctatctttttaagatattatacttcaagactctaaaaactattaaaatacatcgtaaatcaattacattcaaaataatgtatcttaagactatgagatcttattacaaactatgcttttattagaaactatgtaattaccaggtatacgaatgctgtgcggtcatgctctatagcaaccttgtctatcataaacaggggagaatcaagaagtaagcagaagagaaaaaaaggaaaagaaagttgctaaaaccaaccaaaatatgggcctttaagccccacacattctctagagaagtcacctctcaaaattgatttatttacaaagtgcgatgatctgattttcattaaaagcagaagataccagccgggcatggtggctcatgcctgtaatcccaacactttgggaggccgaggtgggcagatcacaaggtcgagagatcgagaccatcctggtcaacatggtgaaaccccgtctctactaaaaatacaaaaattagctgggtgtggtggtgcacgcctgtagtcccagctacttgggaggctgaggctggagaatcacttgaaccctggaggcagaggttgcagggagccgagatcatgtcactgcactccagcctgatgacagagcaagactctgtctcaaaaaagaaaaaaaaaaaggcgaaagatgaaatacagaaatggtcctctgtatttaatatgtttttctttccattacctacttttcacctgaggttttttcccgttactagcttggcatccctctcccctcttctaattagctcaagtccctgatataaaaaggcatagtgtttgcatatagcctgtgcacatcctcccgtgtactttaaagcatctctagattacttattattacctaatacaatgtgaatgtggtgtaaatggctgtcgttctgtattgtttcgaaagttgtattgttattttttgttgtttttttttctgaatattttccacacgtgattgcttgaatctgcagatgtggagagctgactgtattattaaaaaaactgagaaactaccgatccctggcgctgcttagttgtagggtcaaacatttctgcatatctccggaacccattcatatacaaaagcacattgtaggatatccggatgggcaaaagcagggcaggtcatctctttgaattatagataccattgctgtaaagtctctttcgatgatatttccataaaaaaaagtttcattcaaaaagcatggctttacctatgcagtgctagggattggtgattttatatttcttgattttcttctcttctcctcccttccttctaacagttactgtactacagagtaattgtcttatgcacttagatattgttatctaatttttacagctcttattatcctggttttgcaggttaagtagccgaggcacagagaagttaagaaatttgcttagagttgtaaaactactaagaagcagattttaggtccagggctgagatccatgactcccgactcacagccctgagtcattacaattctgagttctcaggagagcgtttcattatactatcttctacctggtttaagagaacagaaaaatgtgtactatactttagaagtagttccattgaaaaagttacatttcttttcacattggtttttcatgggataagccctcctctctctggaaagatgatccatcctagattattcatttcctgaaacttgcaagaagcagagttatattgctatttttttaagttttgttatttgttaataggaatttctttgaatttagacaattttagttattctatgtaagttttttttgtttttgttgaatgatctatgagttaagtttacttatttttgaaattatgaagatgtctcctataattaactataatatagatgatttttaagaaaattatcaaaaggaaacacataagctttggaaaataatgattttaactttagctaatagttacagcattgtataatttacaagtagtacattaaatatattatatatttcctttttgagataaaacaatgttttgagatggtagagtggatctcactattatttgatagaagagttcactgaagatcagctttaagggccttgttagtggagaaatagcttgtgagcagtaataccagcacttttggaggccaaggtaggtggatcacaaggtcaggagttggacaccagcatggccaatatggtgaaaccccgtgtctactaaaaatacaaaaattagttgggtgtggtggcgggtgcctgtagtcccagctactactcaggaggctgaggcaggagaatcacttgaacccaggaggtggcggaggttgcagtgagctgagatcgcgccattgcactccagcctgggagacagagcgagattccatctcaaaaaaaaaaaaaaaaggttatgtataaccaacacttaagaaataattcagtggcttctacatttcacattttaaaaaaagttaaagctaatgaggttttaaaagattaggaaagtgaatagagcttcactagttatattagtagaatttaaaaggaaaccaaatatgactgttccttttaattaatttttattttatttatttagttttgaaacagggtcttgctctgccacccatgctggactgtggtggtgcaatcacagcgcactgcagcctcatccacacgggcccaagtgattttcccacctcagccttctgagtagctgggactataagcacctgccactatggccagctaatttttgtatttttttagagacgagttttaccatattgcccaggctggtcttgcactcctgggctcaagcattctgcccacttcaccttccccaaatgctagaattacaggcgtgaactgccatgcccagctatttttattttttaattgaaataattgtacatatttatggggtacatagtgatgttccaatacatacaatgtgtggtgatcggatcagggtaattagcatatccttcatctcaaacatttatcatttgtttgtgttgggaacatcctctcttctagctatctgaaactatatgatatattattgctaactgtagccatcctacagtgcgttaaaacaggggtacttattcctattatctggctgtaattttgtgtcttttttttttttgagtcttgctctgtcacccaggctggagtgcagtggcgtgatctcggctcagtgcaacctctgcctctgaggttcaagtgattctcctgcctcaacttcccgagttgttggggctgcaggcacgcaccaccatgcccgggtcatttttgtatttttagtagaaacagggtttcaccatgctggccaagctggtcttgtacttctgacctcaggtgatccacccacctcagcctcccaaggtgctgggattacaggtgtgagccactgtacctggcaattttgtgtcttttgacaagacagtgttacttatatgcttatgtgtttcaatctgaagtcaagtgaatcatctggagtgactctcattctttaaatttacttaacaaaagatatctgcgtgtactttatgttttgaagaagaataagagaaaactaaggtactgacttggatagcagaagagaataaatatatacaatgcagaagactcgtgcctatgtccctgtgtactaaattgaatttgggctatcagtctgtggtatggatgtggtatggatatgtagtgaaattcggctcttcatggtaaacattcatgtagaaatcctcttctgtgcctttgcttgttcttgtttgtggctgtatctgcatcacatgtgatgatgctttggagaactcagggactgcagttgtgccttattttttattcccatttcaccctggcttcctccattacaaaaaagagacgtatgtcctgccagcaggtgtaagggggcccacactgatgtctttctgttctttactgttcagcaatatggtagaaacattagtaacacatctaaatatagagaggcaggaagataaacagtttcaaaaaactatttaaaaatagttaatcaacatgattccatgtcagccctgtggcatgcaccatgagatctctgtggggctgtgctctttggtgtcctaataatcctcaagaggttttatttaagtgtgggaaaaatgagatagaaagagaaacagaaaacagccacattactcctaaagtgtgacctggttctggaccctgtttaattcaattgtgtactactcttacgctttcctattcatgaagtagttttaattcctagaatgaatgcatactggatttctgggatggaatgtatttacatgtgtttgaattgttgatgggaagaatccacctcccaccttgggatgtcagccatttaggggcttttctggaatagagtgtcctattaggaatggatgaaggtactgaagggtttatctcactaagtgtgtcataaggaaaagacactgtttagcccattgagcatatgaaatccttgctttctagctatggagtgctgctgtgggaactgctcaccggagaagtcccctatcggggcattgatggcctcgccgtggcttatggggtagcagtcaataaactcactttgcccattccatccacctgccctgagccgtttgccaagctcatgaaaggtattgtgtgtgtgtgtgtgtgtctttgtgggggcaagaatttctcattagaatatcattttttaaaaaacagaaaaagcattttctgtgactctaatttccaagtacttttaagtaaccctagtattttaagaattggaaacctagtctttgatctggaatgtctggtaaagttttgaagaactaagtagcttacctacaatccagttttatcagtgacttatttatgtataaaactcaactgaaaagtagtaacattttcactaggtacatgagtagagttcaaatacagtattgaattggctccaaatctgctattttaaatttgaattagtgatcagaaatgccttatggtcttaacaggtgtgattttgccaggatcatgtctattttatccttatctttaaaaattgttaactaactctttttgtaagccgcaagttgccttccttcattgttaggctatttttgatttttagaacttctcatgtggatataacattttagaggctttgtttgagttacatgactccatatcagtaaatgatctggttatggtggcttaaccccctgaaacatggtatccatagtaaagcatgggaagcacacgtccatttattaaatgcggtataatatagacagcaacagccttctctaatggtcattattatgcatgcctgtgacatggacactatgtaaaataaactattcaaactattaccaatggattcttaaaatcttcaggagcagatactataaatggaagcttccagtttggaatgacaaatgttaagttgaaatacacttcagtgtaaaacatttcttagcaactctaaactgcgttgagagatggtattaatgtgatttttgtttattttagaatgctggcaacaagaccctcatattcgtccatcgtttgccttaattctcgaacagttgactgctattgaaggggcagtgatgactgagatgcctcaagaatcttttcattccatgcaagatgactggaaactagaaattcaacaaatgtttgatgagttgagaacaaaggaaaaggtgagagaaatttttaaacagcataatgtactcaaatttatgaaaactatggaaaatatgaggcaagaagcactgttagcattattcaaaaatatctttagatatcaatatttgttgattctcaccttctttcaggttaaaaataaaacaaaaataaaacagaagggtactcaatatgtataattggggaaaatacccttttattagaggaattttcaaagtaaaaaagagagagagagcaaatagcataatggacactttgtatgcattaatcagcttcatttattgtcattattttatcattttatttgtctcccttccccattatctcttggcatgctggcatagaaattaatacaaagtatgtcataggcattccctgaaatacagaatgttttcttaaaaatgcgatttaagaacgtgtctgttggagattgttttgagtttcagtgttatgccatttttcttactacatgctgggacagtgccagagtcctagaactcagagatggatgtggtgtttgtacccttgaatgattctttgaatgccaggctagtgatttggaccttgttgacaagtttttaaaaggggctgcatataatctcttgaagccagacattgaagcagaagctcccccgactcccgctgtgccttccctccttctttcccttatttgtggtaatgggatcactgttctcccaggtacccagtctcaagggtctttttgcagtgttcctgtggtcttctgtgtgacaaagaccatcagtggcaattttctgccctaatccctgccaacctcactcatcaccagcatggctgctggaccatccttactgggcactctctgtgcagcctttcttccctcatctgtccccttctccttctaaaatgcaaatctgatcagccttgtttccattgcccacttttttgccatgttcactccctttctcctcacatattttgccttacatctccaccgcccctgtccccagccatactgaatttcttccagtccccatgatgtcatgctcctgacctgtaaccttggcacacgttctttcctctgctgaggatcctgtttcctccctagcttctgtgcccatttcatgaatggtggcccctccgttctcagtccctgatagctccctcccctactctactccatcgggtaaactgtgggtgatcagagtgtcttgtgcttctcttatcatggcataagtcatactgtattaatacttgctgacgtaattgttcttgatctgtcctttctgctagataataagttcatgaactatgcttttacattcttcttcatttgcatacacagcattgaacatgggactcagcacatggcaggcattaatgaacctaagtacagtttgttaatatatgcctgatgtctattttaataattgagatagtggccattatcattattattactgttttaatgagcaattattattattattattattgaaagtgaacaatgaattttatagtatatacatattatgattcctgttatgaatcttacgctgtaatagaggcatatgactcagctgttccacttccgcttacagattcttcagaaactcacacatgtgcccaaggaaacgtgcttaaagttgttcacttaggcatcatttgtaatagtgcaaagcttaaaacaacctgaatatccattaacaggggaacagatgcctaacctattgtattcttacgcaatgcaaaaatgtatagttcagtaagtcctcactcaatgttgtggataggctcttggaaactgactataaatgaaatgatgtataatgaaaccaattttactataggctgattgatagaaacagttaagttcccacgacatatttctggttgcaaacacatctccaaactttgaaataaagaccaaagcccttctaatattaaacattgaaacaaatgtgagctatacgtaacatttaagaaagactaatgtccgggtgtggtggctcacgcctgtaatcccagtgctttgggaggtcggggcaggtggatcacctgaggtcaggagtttgagaccagccttcttctaatcaacttcttctaaagacattttttaaagtagacataaccatcattctcagcaaactattgcaaggacaaaaaaccaaacactgcatgttctcactcataggtgggaattgaacaatgagaacgcttggacacaggaaggggaacattacacaccagggtgtgtcatggagtcaggagaggagggagggatagcattaggagatatacctaatgtaaatgatgagttaatgggtgcagcacaccaacagggcgcatgtatacatatgtaagaaacctgcacgttgtgcacatgtaccctagaacttaaagtataattaaaaaaaaaagaaaaaataaaaataaaaataaaaaaataaagtagacatacaggtaattcactctgtcccttagatttttcagtatttggttacattgaaaaatgcacaacaggtaaatgcaacgtaagaccatgacaccactaatgagtacttagagttcatcaaggagaggcaccaatcccacctgccctgttctgctcaaacccatggagttgcgtctgactgcgagcatcatgtcctaaggagcctcctggcatgcatgggagaggatgggggagcctgggagtccaagaacaggaagaacacacagcacacaagggggtggggactgctggggctgcccatgcatggggaggactttcaagtagggagagaagaaaccagttgcttgttattccagagttacgcagtaggacttctgggtgaatgctgcagggatggcaatctggtctccaagtcaacgacttgctagcacttggagctggctgacagagaaatagactgcttgggtgactgcctgtttccttctccaggacaagactgaatgggaagtctttatgggattctgaaaaatatgatagacctccctcaccccccaccaggaactctgagtcagacagccctgttggcattcgggctcttgtgcctgatgggttttttttttttttatactttaagttctaggtgtgcctgatggttttgaggcctctgactctgttactctgtacctcctcatcattggagccatcactgtaaccctgtgtccctcagggcttgggcggggcttaagtgagtcctgtatgcaaagcagccagagccctacctcttagtatgtgctaaattaagtgttagtctcaggaaaaaaaaagaaagtggtgacctttcacagaagctgagtttccctagcccaggctttcttggaaaactggctggagcaccactgactggaataggtttgacatcctgcagttctgtgaagcattactaccagtgatatcattgacatgtttcttggaaacttttatgcactttgttgacttaaaatgatacaggaaagactctaatttgttttttttttttttaacacttccccaaattgttttcaggaattctaaaattaggtgtttaattacaaaaatgaaaaagattttgaagagcaggaaaagcgtttgagaaagaaataaagcttcaaatcatagaatctaaaatttggaaatgatgttactcacaattagttactggctgggtgtgatggcttgcagctgtagtcccagcactttgttgggggccgaggtgagaggattgcttgagcctggtaagttgaggctgcagtgagctatgactaaactgctgcactccagcctgggcgacagagcaagaccctgtctcaaaaaaaaaaattattattattgttattatctggagacagagtctcactctgttacccaggttgcagtgcagtggtgtggtctcggctcactgcaacctccacctcccgagttcaagtgattctcctgcctcagcctcccgagtagctgggattacaggcgcccaccaccacacccggctaattttttttgtatttttagtagagacggggtttcaccatgttggccaggctggtctcaaactccagatctcaggtgatcctcccacactggcctcccaaaatgctgggattacaggcatgagccaccaggcccggccttattttaacgtattttaattattgacaactatttataaaactggaagatataggcatctctagtgagttcataattatatgttgtattaaaataaaagcatgcttcaagggtggatgtcagctctttctctactttgcgatttgtagtaatttattttttggttgatttttgagctaccatgtagtagtgtctatttttactttgtgttttatttttgtgcattgttccttgaaatacagcatttatgttaccctgtaagcctttggatttacaattaaagaatatataatgcttttttttggcttcgaagtttccagctgcatcttttttgatgaagtaaaaagcatagtgtacgtgccctatctccctttcttgtccacagattgcttaaggtaggaggcatcagacttggaattaatggtgagtaacttggctgtggtctgtgttattcagtaagccgtagcctccgtagatactgggtcctccctaaactcctggctccttatctctgtgtgtctgtatttgtgcattttgtgcatgcacctgtctgtgaccccccacacagaggcatgccaccgttaatgattaacagccactgccagggatctggatttgccattaccagagtggcctgtgccaagcaattcaacaaatattactgctagtaatctcatcaaccgaaagaatgtttttgtgcttcatacttttgaagtattcaaagggttctaataccccagttttaaaatttacttttgaatgtgttcaaatttattcagaaggaagattacttttgctgctttctcttcaatcttatttttttcttttctgaagtcttaggcaagtgattttttgtttattattcacaaatttgttcacagggattcatgatttagcttgggacctggaattaaaaatgtttttttattcaattactatcgtagcaacacacaacctacttggatttgctgttctgatcgctttctcatgccatctcatttaacaatagctaattggattgatatcaacatcactgaaaagtaatatcttaacaaaaagttttaatgagttagaaattgaaaggtgactggaaattatcctctgcctccaaatacactatagtaaaatgtccaatttggacaaactagttgaacaaaagtcactagttaaaaaatggattacagattttttaacatgtaacattttcccctttttttcaagtagtaaataataatttatatctgacacggtgtaatgaagaaacacccacctggtctataaataaaaaccaactgataggcatattagctgaagtgatttaaacatcatttggtctaaaataaatcatttctcctgcagtttttcttgtgaaatttgtttcaagaaataaatttaaagaaagtttcaaaactgaatttcagtccactttggttagaatcaccccaaattcgtaatcagtttgacctgaataaatacatttctttattattagctctccctagtctcttcgtgatattgtcccatttatttgtgggaggatggtcttcctgtttattttctttacgataattgtactgataggctcagattactctttgagtccgtctgtaaaaagtccaagtattagtagatttgaattgcattctagtcccttggtttgggtctagtttcttccaggagccctaatcttactgtgttttttcatggatcagaatcgttgaggtgggcctatttaaagtgtggcctgtttatataaagtaggaaatgtttgcacagtactcatagctctcaaagctcagagcccaacactccacctgagaaggcatctgcagtttccaacaaagattgtggtattagggtattctaagattaagtttatctggaacagtgtaaataaaagcttgcagatgcgttgatttttatgtgagtgcttgatttcttagcagagtaatttagaatagaaactggttcagcactgcaaagaatatttatgtctctggtaaagaacagaacactttatggaaatgaaataaaaatggggatataattttaaaactttgtagagtcctcagttttactgtttaataatttttcctaataggaataaaagtatttttaattcttagattttctctttcttagaagttcagtacttcaaaaaccaaaaccaagatgaggtctaactttaatcagtatcataagagaggaacttttgttagctaactcctgagatgtgtaatgaagtgataatttccatgtatcagcgggatctgaaaagttctttgtatacagaatatattttcctttggcttgcaattttagaggtggcttcattttcatttccagcaggtcttcaacagactcctaacaccttagcttgattttctcccttactctctccaccaagatgttttattccttaagcaaagttgtaaataccctaaagaaattctaagtcgtctgaactgcagtcttgtgtaactaaaataattatgctttaattaattgagcttgaacttttggctttattttgaaatgggtcattcacatctgcactttgttgccctgtgttaatgcatattttatgtgtcaggtgagagatgaagagggagaaatgtgaaaaaccaagtgtagaaaatttatgatgcctcttttaggatcataaaactaacagaggagactggcgtttgtgcagaggcctgggctgtcatctaagtgaataatccgctgaaaaggtttcggcttggattgtcctgactgcaaagaccttcgtcccatgaggacctgagtgaccagggcttgagcagaggaagagggaatttcagcttctccttgtgcacaggaggagcccgtggccgaggggtcgccagtgtagtgtaatagacggaattcccttcttcctgctgggaatgattccggtgggtgtgaatctgtgtcgcaggagctgcgatcccgggaagaggagctgactcgggcggctctgcagcagaagtctcaggaggagctgctaaagcggcgtgagcagcagctggcagagcgcgagatcgacgtgctggagcgggaacttaacattctgatattccagctaaaccaggagaagcccaaggtaaagaagaggaagggcaagtttaagagaagtcgtttaaagctcaaagatggacatcgaatcagtttaccttcaggtatgatcttgtttttatgtttttgaaagatttttgtgtgtcctccttttaatcagttttctttgttcatcagaaccaggaaagagatagggaagtaactttgtaaaacagtgaatgaatgagtatcttcagctgtaggcttagattcatggttctaatgtaatggcctaatgagattccatgtaggaaacagcattaggagcacgtggtagtcacagcacacgaggatctaaccctcagcgtactttcatattgatggattaactgattgactccttttgaaattgaagcagaaccattttttagctgagcgtactgagccaatgtcatgtggcattgtgaagatgcaaaacaacgaaactgttaatatttcatcattacgttcattgcttccacaaggatctaggatgtcatctggtatctgggacactgatattgttgtcagcactttcaataaaatatatcaagtaccctgaggtactttcccatgaaggtttaaaatccttcagacacaaaaatcacccagtaaatctagggaagcttttttaaacattgtgataacaacatacaaggattactaaatcattttagtaatgtgttaggagaaactaaagggaatagaaaatatatcaatcaatcaatacatatagatattattgactgataatcaaaatatatcgatcaatatagcagacatagcttgattcactaaattaagttctttaatattatatattctacttgttgtaaggaaaaaacaaatacctccatggtattttgtgattctttctagtaccagagcaggatgatgacagagcaatgcagacttcacttttatagaatctgtatgaaatatctctatgtctatgtctatacctgcctatgtgttatatgtattatatattagagtgctcggacggattctagtgttttcctaagatgtttgttaatggcatggtaatttgatttaaagtgcaacagtgacagttttgttttatgtcgagtgtgtataaattgccttataaaatatgtattatgaaacactggaaagcttgcagaatcctgtgactaatttaggttattgcagatgtcctcagttgatcaaaaaattgctagtatgacatctgggtgcagtggctcatgcctgtaatcgcggcactttggttagctgaggtgggtggatcacctgaggtcaggagttcaagactaccctggccaacatggtgaaaccccctccgtctctatgaaaaatacaaaaagtagccgggcatggtggcaggtgcctgtaatcccagctactcgggaggctgaggcgggagaatcacttgaacctgggaggtggaggttgcagtgacccgagatcacaccattgcactccagcctgggtgacaagagcgaaactctgtctcaaaaaaaaaaagaaagaaagaaggctgggcatggtggctcacgcctgtaatcctagcactttgggaggctgaagtggacgggttgcctgagatctggagtttgagaccagactgggcaacatgatgaaaccttgtctctactaaaatacaaaaaaaaaaaaattagctgggcacgggggcgggtgcctgtaatcccagctacttgggaggctgaggcgggggaatctcttgaacccgggagctggaagttgcagtgagccgaaattgtgccattgcactccagcctgggcaacagaatgagactctgtctcaaaaaaaaaagagaaaaaaagaaagaaaagtgctagtatgaggtggtcatcatgagagtccagtatatgttattgattatttggtttgatggggtgagaatagactgtggatccttatcacttttaccttcaacctctctggggttgggtgttgggggaaggtccttttccaggctctcttctgatgttttccttagctggagtgttgcttgcagggtcactgactggtctgtcttacgtgtcagtcagccatagagaatagactatttatttatgatgaggcttctgccttcacacatagaggaaagaaaaatccagaggtgcactagatgtgagttttcttctccatttttcagttatgtcagttttcttctagctgtgatttgattgtgttatccaaattaatatttattgtttcccttgggaaactttggggaaggtggaaaggattaagaagctgatggaaagggaagtaaatttgggataaaaaatgaaaatcgttccaatgattctttcctcttcagtggtaaaatgattaaatcaaaatcttagcattcctgaggtcagattttcagtcttgcttttcttctcaaatgttccttggctaataccctgagtttattcaaagcagactgaatattatttgactatttttacctgagttgtttttttaattcctgtattgtattatacagcttttcttttcctgagaagagaggagaaattttagttacacatttatttactttttggcacttaatgaaagattccagttaaaacataaccaagaaatctactgctataatcctgacccatcaccaaggaatgaaatttggtttctggaatttttagcatgacagttacctcttctgcccacaagatggcactacattatcatcttaatattaataatactggtaccaatatggaaatttctattagaatgctccaaccctaaactcacacacatgcacgcatatttacttgtacaatatcctagaatgggacagacatccaaaaagggaaatgataactataaaaataattatttttttcttggagaattccgcttagtatagaagagaaagcaagcatgtgtaacttaaaatccagggagttagttgcattcaatattatctgctagaaaattctttaagttagtattgtttaataggggaaacaattcaggacatgggcctaggcaaaaattttatgacttaagacttcaaaagctcaggcaacaaaaaacaaaaatagacaattgggactatattgaaccgaaaagcttctgcacagcaaaggaaacaatcaacagagtgaagagaccacctgtagaatgggagaagatattagtcaactattcatctgacaagggactagcacagaatatacacagaactcgaataactcaatggcaaaaacacaaataatttgatttaaaattggacaaaggaactgaatagacatttctcaaaagaagacataaaaatggccagcaagcatatgaaaaaatgcttagcatcgctaatcctcagggaaatgctaatgaaaatcacagtgagctagctcaccttagttagaatggctgttatcaaagagacgaaaaatagtaaatgttggtgaggatgtggagaaaagggaactcttacacacattctcttgtaattttgtctttgagaattattgctgatcattttaaatcttatggctatctatagctaatggaagtgtaagttagtacagccattgtggaaaacagtatggaggtctctcaaaaaaaaaactaaaaatagaactgctgtatgatccaggaattccactaccaggtgtttactcaaaggaaagaaaatctgtatatcaaagggatgtctgcaatcccatgtttatggcaacactattcacaatgacaaagataaggaatcaatctaagtgtccatcaatggatgaatgaattaagacaatgtggtgtgtttacctgatggaacactattcagccataaaaaagaataaaattctatcttttgtggcaacgtggatgagcctggatgacattatgttaagtgaagtaagtcaggcacaagaaaataaatactgcatgttctcacatatatgtgggagcgaaaaaaattggagtccgtggaaatagagagtagaattgtggttattggggtgggaagggcttgaggggaggggaggttgcagagaggttagttaatggataccaaagtacagctaggtaggaggaatgagttctggtattctgcaatactatagggtgaatatggttaactgtaatttattgtatattttcaaaaagccagaagagaggatattgaatgttcacaacacaaagaaatgatcaatacccaaagtaatacatatgctaattactctgacttgatcattatatattgtaaacaagtaccaaaatatcactctgtaccccataaatatgtataatttttatgggtcaacaaaaagacgaagagaaacaaattctaatactgttaaatggcacactgttcagggagaaacgtgataagtggtagatggaacagcgatgctgtcctttcatggagttaccaacttcttgaactccttttgcaggatttttccctatgcataataagcttagagaatttctccgaaacatattctagagtcctccaagctgacctttaatatttgtgcctgcagatctttcaaaaacttggtattaaatatgaatcattacattctcttgtaactttgtcctcgagaattactgctgatcgtttttaatcttatgggtatttatagctatggtgatttagtgatagaaacctcaaaagtgatttttttttcctcctggaatttcttcatggctggctaccaaataaggaagattaatgcttaaaaagtaagacagtaataatctaggataataattttaaaacaatactttgtgattatgtagtatttttcttggaatttgcaagagaaaaaagcatggtcacagtgcatctttttattttgtgagtactctatattgattgctccttctgtttatgtttacttttaactgaagttgtgttttttggacacgttaatacaagacaaaagctttaaagcctccaaaagttggtatgtcactaaagcagtggcattctaactttgattgcttcagaagtgtccaaagcctgcaaaaaccatctacctcacaggtatgcgagtgagtagaagggtggatgggagagagcatataacctcacctggattctttagagaatacattccttttcatctgcaaatggaagcctcccactgaggcaattagctttgttagtgaaatattcatattgccagcaaaaatactaggataggttttactcaagcctgtgattgaactatagctgctatgaccaggcatcttgagaaccattattctagtgagtacaaagaaaatctgagcacaggccacaggcattttaacaattcagctttagttttcccaaatgtttagctggcacagactcaacctttccctacttcaaagggacaaggatgtttacgataaagaatgttggctgggcgtggtggctcatgcctgtaatcccagcactttgagaggccaaggcaggcagatcacctgaggtcaggaattcgagaccagcctggccaacatggagaaaccccatctctattaaaagtacaaatattagatgggcgtggtggcaggcacctgtaatcccagctactcaggaggctgaagcaggagaactgtttgaactcaagaggcaaggttgcagtgagctgagatctcgccactgcactccagcctgggtgacaggagcaagactccgtctcaaaaaaaaaaaaaaaagaatgttttctttctgtttacaacataaagtatgcttttcaagtggaagtatttaggtgtttttggaaggttggaagcactctgaatcttaggtgttgttaaaatgcagccttgtatctttgctgctctcacccgtggctttccacgtgttccatgttggtttcctgatctgtgcttagtatttattgtcccatcatttgttccaaataacttgtcaatcagatcctgtggcttggttcttggctttcttctgttattgacaggagggctcctcttgctgtaaaagttctcagagcatttgtttctgtcgtgttgtaacaatcaggtggctagctgaacatttataaatgactttagtctaaactgtttcctttctatggttaagaattttttttctttgaccacctctttcccccaactaccaccacctagtctagtcaattttttacctcaactgctctgccctggtcaagtctttcaaaaggaatgacttggggctaggtgcagtgactcacgcctgtcatcccaagcactttcagaggccaaggcaggtggattgcttgagcccaggagttcaagaccagcctgggcaacatggtgaaaccccatttctacaaaaatatacaaaaattagctgggcatagtggtgcatgcctgtagtaccagctactcagaaggctgagacaggaaaattgcttgagccaggggaggtcaaggctgcagtggactgagattgcaccactgcactccagcctggataacagagtaaaatcttgtctttaaaaaaaaaaaagtatgactcagcagatggaggagcctcccatttggtctttcctttccgtttggtttgtcttccaaatctcctccagcctgctgtgtattcctcagcaactcacttcaagcaccagcctgatcctgtagatgaaccctgcataactttctccgtcaacaaacacctgaggatctgctgtgtccccagtactaggggtgattataaaacatatatgcagtctctgcactcatgtttcccacagagaaagtactcattcagcaaagttttctaagtacctgtaatgtgcaaggcactgtgccagtctgaagtcatggagactgtcatggtcactgcccatagagcacttaccttatattgagggagggggcagaacttaagctaataattcaatacttatttgcttctataatcattagctgctgtgagggaaaagtcacatgacagtgactagtgcagagatgtaacctggtctaaggtgatcatagaaggcttcctaacggagttcgaaaccagcctgggcaacacggtgaaaccccgtctctagtaaaatacaaaaaaaaaaaaaaaaaaaattagccaggtgtggtggtgtgcgcctgtaatctcagctactcaggagggtgaggcaggaggattgcttgaacccgggaggtggaggttgcagtgcactgagatcgcaccattgcattccagcctgggtgacagagcaagactccatctccaaaaaaagaagtaacatttaaattgagacgtgatatgggaatttaccaaatacagaagatgaagaaagagaataggctgagagcacatgtggaggaaacttggtttcttccaggaattgaaaaaagttcagtgtggtttgaacagggttcagcacactgccctatgggcccaatcccgcctctacccgctttgtacagccatgagctcagaatggtttttacacttttaaatgcttgaaaaaaatcaaagaggaagaagaatacttcattgcacctgacatgatatgaaactgatatgaaatttcaatatccataaagatcattttactgggacacattcatctttgtgttgactgtggctgctttctctcacatcagcagagtcaggcagttgttacagagactgtgtggctcacagagcctaaaatggggcattttgcagaagaagtgagctgacccctcttccaggctgtgacgagtgagaggagaatagggcaagatgaggctggagcagaaagaagaactcaggctcaggtttgcagggacttccagaatgtgttacagttttaatctgtaacttaagaatcatgagaggcctttgaaggattttaagcaggggaatgacatgtcagtcaggcatattaaaaatgcatctggctgctgtgaagtggacttggggggccaaatgtggatgcaggaagatggacacaaggcattgtagcaggctagggatgacatggtgattggccgtgcagatggagagaacaaaaggaaaaaaacatttattgagcatttattatgtcccaacccctgtggtaagtactttttatacttctttgcactgaatttttcatagcagtcctgtgaaataggaataattagttcttttccatttttgtcagtaaagatactgagacttcaagaccttaagttactttcttgaaattcatatggctgtggtagaaatgggattcagatctaagtttgctaactccataacctggaatataaatttctctactgcagaaaaatatatagcacagaatttacctgatattttgtgcttggtggatatgtagggtaacagaaaagacaatatcaagaaaagtattcagatttctagtatgaataattggatagctgtccttgcctaccaacttccaaatcctcttcatctcaaatagcagttcattcattaaagttctttaaagtataacttccaaaaaggtaagttataggtctcttgcaaatatgaaatgaacatatgtcaaagatttttattaaactcattaatcgttgaggaatcaggtagaaccagttcaaatgagaatttgaggagtgagatatttatgggcaaattaatagaggaatgcaggattagattgctgggttaaacgcagacctggttgatgtctaatatggcaatgaaccatttgggattgtctttttctccagacggaagttatttgcatcatcaccagacaaaatctacaagttaacctctgctcttacctagttataaaaataactcagtccatagaaaagcaatcaatcaaagcttaagctcagctctgcactgaaagaatatccagtaatgtcttttacctccttccaagttgttaatgattttcctgatagtttataaagtttccccagacacacccctctttcctctggtaatattgctttctcttccatatgaacctatagatcttggtatatctctaccatattacagttagataataagagccagcatttgtagaatgcctagagcacaaaatgcttttaatttacattttctgttttattcaacaccacgaccaccatgtgaaatattgttgttcactttagcaggtgaagaaacaggctcagagcagttccttactggtttgaggtccatagcgtgttatgttatgagaaccaggactcatttaaatccagggccatttcaatttaattttatttatttatttgtgtatttatttgagacagagtctcactctgttgcccaggctggagtgcagtggcacaatctcagctcactgtaccctccacctcccaggttcaagtgattctcctgtctcagccttccgagtagctgggattacagatgtgtgccaccatgccggctaatttttgtgtttttagtagagatggggttttgccatgttggccaggctggtctcgaacttctagcctcaagtgatctgcccacctcagcctcccaaagtattgggatttcaggcatgagccaccgtgttcagacttaattttaactatctcagactgaatgcagataactcttttttcccaggttataaattcttcaatgattcgtggctttcatattttcctttgtgtgtgtgtgtgtgtgtgtgtgtgtgtgtgtgtatgtgtgtgactatatccaacatataagctctgattcattatttgtgtgactatatccaacatataagctcagaatcattatttattgacctgaaccccgagaagtaagaaaccaaaataagaaatcgatcctgcaatattctttgcagttagggtctgaccatttttgtttttattgctgtgtgctaaatacatggctatgaagataaaggaaaaccatgaaataccagttctccctttttgcctccaacagatttccagcacaagataaccgtgcaggcctctcccaacttggacaaacggcggagcctgaacagcagcagttccagtcccccgagcagccccacaatgatgccccgactccgagccatacagtgtgagctttctgcactgccacgggggctcctgtgttgacttctctcctttcacttgacttggattcaaattgagcagatgtgttttcatagcaggttgtagatgagtgtaggacatttcgtaggtgccacaactatttgagaaacaaaacttgagcataggttccttagtctaattttcttctactcacaaaaaatgaattttagatgctatgcagttggtgatgcgacctggccccggagtagaaagtgaaacaccacatctcgagacattctgttaaacacttgcacgcaacgttagcataacctaattctatcatcagccatttgtgtcagggtactttgaaaaatgaaatcaggaattcaggattacttctgtttctttctttgtttcgtgaggggaaaaaatttttgcttttcaggatttaactttaattcactttaggtttgaccaacctaatacttaaaaattccttgtagtgttttggttttagaacaagcattcatcctggaggagacagtacagacagctgattcgcctggcacctttgcattgtgagagtttcagttaggctatgaatcagaatgtagcggatgaaataaaattactaatttttttcaaaggtgagtccagataaacccctaaaagtaggctaagcgaaagaagaatgtgattaatgcgtatgtctgtaagtaatgtggtaattagcctaagtctgtggtaaaccattcatttggatcctctccttcctccaccaaacttaattccctgctgtttactcatccttatttggagaaaaaaaaaatccaaaagaaaattttgtctaatgaggcttgcatggaatctcatttttttttcctcttttgataatgaaaaccttggcaccagcagagatttcttttgcaagttctcggacaccaggatccccacagagaaactggatctaaatgaggctgtagttttagagcttaaaggactgtcatttattataactgatttggttttctgagaatgcattttgcataaaaccgtacctcaaaccttgcctttgcctaggcaaaggcctaattaacggagagagaaagggtcccaggctggtctcccagctccacgaagggatgagcagatgggacaccgtgccacccctgcttttgcctggccactcctctgccctctttcctgtgtcttcaccttctgctctggggaaaaccacctcacagaagccaggaagtggtactgggaaggcctggctgggcccaagatgtgtaccagttaaagtaaataatttgggacttcaaatgaattccaaccctccaaagttgaaatgcagccagcttagggaggcgcatccttggcgctccttctcagaagtaacatggtggaaaggttctaatcgagacagtccacacagggccagctttgtgtgtggcagctgttggctcaagttctccagcctggatgttgctcatcttcattgtgaccctgggtgctccaagaatgcctcttgtcttcatgtgtgtgcacacccccattcaattctgacagcctcattgagtggacccttttatgatccccaaatgcgggacagagaagttaccattaagctgacccaagttggtagctactaactggtgaagctggattcagacacatctgagtgtagatttcaccatccgtttccggcctcttagtacaggaaaagttcaatcaatgtggaaacaaaagagaaaccagaggagcaaatcaagaggggaaggaaagtaggaagggacgaaggtgaggagactaaagccgagagtgtagatagctctgggagtgtagatcagtcagtcagtcatatagccgagatgaacttgggtctaataacccccagctgaaagcttttccggttctgctgccctcacttaaatgaaaactgctgatccgtttatctgtcattctactgtaaaactcttttaataaaaagaatgaacagctgattcaagattgttacacatgcacacttacatttaggcatgcatctacatttttttttttttgaaatggagtctcactctgttgcctaggctggagtggtgccatctcggctcactgcaacctccgcctcctgggttcaagtgattctcctgcctcagcctcccgagtggctgggattacaggtgcccgccaccacgcccggctaatttttgtatttttagtaaagacggagtttcaccaccttggccaggctggtcttgaactcctgacctcatgatccacccgccttggcctcctgaagtgctgggattacaggcgtgagccatcgcacccggcctaagcacatttatatgcacagacacgtgtatatacacacatatatgtgtattttaaaatttggaaaatattgaaacacatgtaagtaaccaaacatcatccacaatgtgtccaattttacaaagtgatataaaggagttaaatttccctctacatagcaatcctctctattaaatttaaacactttagtaagtttggtatctgtgtttagtaacttctcctctgtgtatgtatgtgtgtatatacaggcatctataaacacataatttttaatgaaaatgtatttattatatgtaatattaaatataatataaacattatgtatcatctgtacctcatttttattatggtcacagagtattccattgtatatcataatatttcaaactgtttttagaacatctagtatgtttcagatatttttcccctaagtgtgtagtaataatagcaattttccccagtgatttccaaatcccttttttttgttgaaacggagtcttgcactgtcacctgggctggagtgtagtggcgcgatctcggatcactgcaacttctgccacctgggttcaagcaattctcctgcctcagcctcctgagtagctgggattacaggcgcccgccaccatgcccagttaatttttttgtatttttagtggagaccgggtttcaccatgttggccaggctggtctcgaagtcctgaccttgtgttttgcccgcctcggcctcccaaactgctgggattacaggcgtgagccatggcgcctggccccaaatcactttcaagtgcacttaaattagagggacagcatctaagtgtttagcaaaatgtggatattaaagaggaatatacatcgtcctgtgaggtagtgaaaaaagcaagacatggaaaactgttaaatattttcaagttttaaaaggcaaccgtaaccaaagtgttgtcatgactgagcaaaattgtgatgaccaaaaaataaagaaagaaataaattgtgacgacttatgaaaaattagttgaaattacaatttaaaaatatatgatgtttgtgcctctaggtcaaaactttaactgatttggttaaaaaattagagtactaagttcattttaagttacatgtttagtttggtgatttccctcccaattacaatgaaatcctaattgttgcaaaatgctaaataaatagattaaaaagtaatcaaatctttgctgctaatttacctcgaatttgtatcttttctgttaacttactccatttttcttgatgtttttatgatcagagaaagaaacttaccagagattgggtgaaataaataattttctcattgttttcatgttttgagtaaggtagtttcacaactgatatgattcatttagcttttttaacaaagccaatattggttaatatgattgttgtggttaatatggttaataatgttctttttagtgacttcagatgaaagcaataaaacttggggaaggaacacagtctttcgacaagaagaatttgaggatgtaaaaaggaattttaagaaaaaaggttgtacctggggaccaaattccattcaaatgaaagatagaacagattgcaaagaaaggtacgtgtgtggtatctggtggtattcattgtgtaatatgacaaatccattcctgtgttaatatcacatcagccagactttcaaaaagcaagtaaattaatagagagatttataaatatcaacaattttctaggatgaatttatcatgctaaattaactattatttagttaagcagttagaatatttctgagatttttcctgtctcactttcaggtattatttgtactttgtcagcccttcaaaactgagtacaaatgtgttctctttactaccttaaaaatattgttggtctgtatccaccaaaacctaattggtgtgttgtgtgcttctatcttatgaaaagaaacatttttctcttgtaggataagacctctctccgatggcaacagtccttggtcaactatcttaataaaaaatcagaaaaccatgcccttggcttcattgtttgtggaccagccaggtaaatgtgtttcaggaggtaggatttgcttgagcagtccttggcatctgattgtgctgaagctttgcttttacagtcttacgtggtcattaaagtagcagaggggagattagcaagtaatggcatttcttatagctttacttaaattcagaagttattttccgtcaagtatttatggcaggaagtaattaggcttcacgtggttttgggaatttgtaactcttcttccttaccagaaacattattatcacaattaattatgtaaaaccaaatcaatttagtatgggaaatattagatgtaaaaatatagacccccctgaaagttctgctgagattaaggggtatggcttcttgctatagtgccacctgttgacatgaggaaatccaatgaaacaggttaactatgaaaaacacaaaaactagccggcatggtggtgcttgcttgtaatcccagctactcaggaggctgaggcaagagaatcacttgcacctgggagccagaggtggcagtgagccaagattgtgccactgcatgccagcctggacaatagagtgaatgagactctatctctagataaataaataaataaataaataagaaaaatgactccttggagagttttacactggaatttctatttaatttaaatgaatcataatgatttactttcaatattctatatttgtattcagtattcagtattaaaagattgaagagatggaaatcgttgaaaaacttcaagcacggttactaacacagaaaataaaattggtctttatacttgaccatttaggcagactctttggtactttgatcaaattaaagatgccttagcaagacacaatgtaaatgtattgaatttgttattggtactgtgctcaatttcacaagcacctttgcactcactacctgggttcagcttctccttctgaaggttctcctttatgaaggaaaagggagcttgggtcagcaacgtcagggagtggaaggaaaaagagggtaccccaaacaaaaggcaccacagggaagagcacagggttctttggagaaagaaagctggcaccccaaattgtctacatcagcagtccccaacctttatggcaccagagaccagtttcatggaagacagtttttccatggaccagtggggtagggatggtttcaggatgatccaagcgcattacatttgttgtgcactttattattattacattgtaattcataatgaaataattctacaactcaccataatgtagaatcagtgggagccctgagcttgttttcctacaactagatggtcccatctgggagtgatgggagacagcaacagatcatcagatcctagattctcataaggagcaacctagatcccttgtatgtgcagttcacaatggggttcatgctcctatgagaatctaatgcttctgctgaactgacacagggcggagctcaggtggtaatgtgagcaatgggcactggctgtaaatgcaaaagaagcttcactcgcccacctgctgctcacttcctgctgtgcagcctggttcctaacaggccacggtatcagtccatggcctggggttcagggacccctggtctagatcatcaagcatgtttaggtatactaggatgtagtgttggaaaaaattagagatgttatttggaaatcagattaatgagtttgttgtttaattatgcgctgtcacttttgtgataagaatgttagcttcctcttaagcgggtataatttgtaacctttgggattctgtaacctcttgggagaatcttctattttaatggtccccaaacttcagtaaaggctagctgaaacacagactgctggactccactcttcagaatttctgattccatagtctggggtgggccaataatttacatttctacaaattcccaggggatgcagatgctgccagtccaggccacacactttgagaactgctgatctgctacagaacagttagtttatacacaggaaagctgtagataatggagcctgatgcatgtatttaggtgaagtgaggaaaagagcacatttggtgacatatttagtgattttgtgcctatggttgtgcgtttttgtgttttgatgactgtttctacaatagtgtctattattgaagctgatgaagaacagcttcccgaagcataggaaacagcagatggctagcttgctggttcatctgcagggaacctgaagttgtagggccctagactcttgctccatggagccctcctggatgaatcatttgcagaaatgaaaagggctgcatgtgttttgatttaaaatatgtatttattatattttagctttattttacaatcttgtttaaatgacttttgctgtaaaatgatactacagtgtatgtacttatacctttatttagggtcctgtgaagagccaaaactttcccctgatggattagaacacagaaaaccaaaacaaataaaattgcctagtcaggcctacattgatctacctcttgggaaagatgctcagagagagaatcctgcagaagctgaaagctgggaggaggcagcctctgcgaatgctgccacagtctccattgagatgactcctacgaatagtctgagtagatccccccagagaaagaaaacggagtcagctctgtatgggtgcaccgtccttctggcatcggtggctctgggactggacctcagagagcttcataaagcacaggctgctgaagaaccgttgcccaaggaagagaagaagaaacgagagggaatcttccagcgggcttccaagtcccgcagaagcgccagtcctcccacaagcctgccatccacctgtggggaggccagcagcccaccctccctgccactgtcaagtgccctgggcatcctctccacaccttctttctccacaaagtgcctgctgcagatggacagtgaagatccactggtggacagtgcacctgtcacttgtgactctgagatgctcactccggatttttgtcccactgccccaggaagtggtcgtgagccagccctcatgccaagacttgacactgattgtagtgtatcaagaaacttgccgtcttccttcctacagcagacatgtgggaatgtaccttactgtgcttcttcaaaacatagaccgtcacatcacagacggaccatgtctgatggaaatccgaccccaagtaggttgcattaattaggtaaaagcataaaacactgctgtagagattagtatgtgaaacagtatggatttatgattttatcttttcctggtgatgacatttaataatttgtttttactgttcatgtagatctttgaaccttacccttctcttatttgattttaactatgatttggattctgggaaaagtgtaattgaatttcagtaactgaaacctataatagcatatcaaagcagaaagaacacatggagaataaccacccagccccctcacgttacgggaaagacaagccagctgccccagttagaaccacggatgagtgggagggctggaactgaaactggcctctcgcctccctgcgggccttgtctcctccactgctgtacatgtcattgttctgtttctgttgggactgtgtgtagcaggtgatcagcctgctagggctgccataacagagtgccacagcatggagagatgttcagcacaaactcattgtccagcagttccagaggctggaagtcagatcaaggtgtctgaagggttggttccttctgagctcagcctggctccttgacttctagacggccgttttctccctgtgttctcacacagtcttcactctgagtgcatctgtgtcctaatcatctgtgtcctaatctctttttaggacatcagtcacattggattagggcccaccctaatgacctcattttaccttaatcacctctgtacagaccctattccacatacagtgacatctgagggacagagggttagggcttctgcttaggaattttgtggggacacagttcaccccatgacagcaagtattaccctgttgatgtatgttataccagacagttccatgaggtttatgtccagatgtggaatctctgaaagaaaagaaaatcaaatttttaaatagttttttagtctattcaacaagaggggcttgggcagaaggcaaccagtggtatttccacagcactttatagatgttaaagcacttggacataaattgtctcttagtttttatggcaactctattatatgcaagagaattcaaacttacggaaaattaatgttattcaaggtcacacaattaggaagtagtggtgtcagaatttaaacccgggatccttctgctgtatcacagtgtctcactcctcctcactgcggtattttttccattcctaaaattcagtgagtattgatgtgactggatcatgctatcatgtgctagaatgtactcagctttgagatttctggggttaagtggcactgaaatactgacatttgaggagataatatgggtactttggaagaatgggggattttgagtcatagaacaaaggttcaagttctagttgtactatttggtaagtttgtgatgctggggaaattacgtagactgctttcttgtttgaatgtcttaaaaagcattgtagtgtcatggttaatagtatggaagctagctgggctcatatctctgcttatatgctgagtgaatttgggcgaatcacttaaacattttgtgcctcagtttcttcatctataaaatggggacagtaacaatatacatacctaatactatacttacctaatctgtacaattgagatcgtggtaaaagtcagatggcacactaagtgctctgtagagcttgagtattatttattttgtatgtgaacataattgcaataaccttatatacctgtcatgaatattaagtgaggtaatatatacaaaaaatgctttctaaattgtaaaatgctatgctagcattggttataaagctatattaagacaaactgctttcatcctttttatcttttcctttacttctttttaaatattatatctggatatgatattttctatattattgttcattgcctttagataaattggtttattatctttctgtaggtcaataagtattggtaatttataattgcacaaggagaaattctagcacagtaatcccatatgaaagcatatttttctctaacttataagccaataattatttgctaaagtggtaataacattattcagttcttcagtacaaacaagaaaagaggtgacgtgtaaaagtctaactgcttttccattttcatcagttttgtcaaatcataatctacagtgaagtttaatcatgttgaccatcatttttaaacctcttaaatttattccagtctagtccattttgaaagctaccgttataatatcattataatgactcataatttttattggcctaagcactgtgaggattatttagctctgtttacaaatataatttccataggttgaagtactctttgcaaacttgcaggacttcagccaggtgtggtggcacatgcctgtggtcccagctactctagaggctaaggcagagttccttggtccttaaggccaagagttcgaggctgcagtgtgctatgatcatgcctgtgaatgcatgttttttgttgaagctcattttaaagctatcactttgttgaattgccatcataattatttttcttgatattcattgttttagaactcattttctttctaactgcatactgttttggctttctcaaccagctggtgcaactattatctcagccactggagcctctgcactgccactctgcccctcacctgctcctcacagtcatctgccaagggaggtctcacccaagaagcacagcactgtccacatcgtgcctcagcgtcgccctgcctccctgagaagccgctcagatctgcctcaggcttacccacagacagcagtgtctcagctggcacagactgcctgtgtagtgggtcgcccaggaccacatcccacccaattcctcgctgccaaggagagaactaaatcccatgtgccttcattactggatgctgacgtggaaggtcagagcagggactacactgtgccactgtgcagaatgaggagcaaaaccagccggccatctatatatgaactggagaaagaattcctgtcttaaactaagtgccttactgttgtttaagcatttttttaaggtgaacaaatgaacacaatgtatctacctttgaactgtttcatgctgctgtgttttcaaaagctgtggccatgttcctaaattagtaagatatatccagcttctcaaaaaatgtatatgattgctgttagccatgtctattgtttttcctctggattcttttcttataacttggaatacacaaaagtgtaaaacaagagatgtgcaccaatgaaaactatgctgggtcgaattaccttcagcacaatgttaatgtttttgttctcatttatgcctttgtccatttgcacacaacagaaattgtaatgagcttcactatttttgtttctttccttccttttttttcttttttcctttctttcctttttcttgtcttgtttcttgtttttttttcttgtagtttcttttcttaattgtcatttttgcaacaaaaagccaagaaagagctttagtttcttggcaagaataatgtgatattagtaagtaaaggtcttaaaagtctgacgactggaatagatataaagtcctgtttaaactacctaaccttggctgtgggccgataatgcatatgtccagttctcacttaaattatgcaatgatatttctctctgaggaaattatacggaatgtaacttataaaagctttactgaatataagttataagcattttattcattagaactccaaaatagatgttcaaagttcagtccttgccatttgactgagaccacatggtgtgccccttgagtgaggctaatctttaggtttttcctatagaaaacattcttcctccatcagtagccctttatttgatattcagaagtggaaagctttttcattctccagtagaacttttaaaaattgttacagatacctagctcttcacagatatcatgtactgtaaacagtcatgtgtcttaattttattttctctatttgagtgcataattatcctaataatcccaaagacactgacaactcaaggaacagcagtacagtactattagaagttaagtatgttgttgttatttcacatttcatttaattgtggataaatgttagacatctgttgaaataagctcatatggtggaaacgacaactatattatgaattattttcagaaatggatctttgaatagcagatcaggatttaaataataaaattatctatgaatcacttttatggtcatacatatatgatacaaatccagagttattggtgcagaaatggctacccgagagcttggtaaatttgccttggtttcttatgttaaatgtattgtgcttcccttctgtctctagaatgtggctcttcagaagacagacaatcgacatttaaatttttccaaacaatgaaaaactaaattaaaaacattgcttgatatttcatttaaaattgcaccttgcttaaggtttactgaataactgaaatgtcagcaatttaaaataaattcaattgtgtgataaaatatctcacctataatagaagaaaaggaaaatcatattatttggcaattttgcagcattgtggttgcctaacaggtatatccagcagatgagaaacagtatgaaaggattgtattaacatggtaagttttgccctaaggaaaacgatcttgcattctggattcttgcagcaaagtctcagatacttaatacgttttcttgttttatcatctgttctatgattcggcttcactttgtgtggttattgaattatgtaacagagatttggttttcccaaaatgttatcacatttgaaactatgattgctttgtgttcagtccttttggaacacgtagcttccagcttaagggtagagaaatatatacctaaaatcatcaatacatgaaagaaaaaggatggaaactatgtcctcagttttacttctaccaaaacatccctgtatgtgtgtgcatgtatgttggcgtgtgtgtgtgtgcatgcatattagtaaatgtgtgtttgcatgtgtgtgttggggagtgtatgtgatctgggtgtttgtttatctctgttattattcccctttagctttattttagtcaactctacattatgatgaatttcaaaatgaagctgtattaaaataattgtaatataacaattcaatctcacatgttactgcagatagttaacttttgctgcaatctattgtacatttgcaattttctgtgttagtaaacttagcagaatctggttatttatttttgtgtaggcttaatgttcactgaaagataagtcaattactgttagtaaaaaattaaggtactctcactgcagagatttaaggcctgggcctaatgtgctgtattatgaagccttgtgactgaaaaatatgtttacatatgttgtctatttttttaataaacttttatagctggtctatttgctcagtagctttgatcctctcttgattattgtgactatagtttgcaatggtttattttgtattcaataagaaaaattgtgttaataaagattattgtttaataagccaggtattaacctgctaaatatattaaactgaaaatcactaaatgagtcattcaattaaatacatcaaaaaaggtagaatgaaatgttttatttcaaatttttttggtttacatatgcattgaaaagttatatttcatggtgagcgttttgcaagtccagcttttcagaagacacacttttgcagagtgaaatgagtatgagaaaaaaatctcagtgattaaggagacatgttgattttattgtttaattttatgtttaaatcagaggaatttcaaacaccacttaacatgtagaaattcttactaagtgataaaagcttgagtgaatgaggaaagcagatcgcaggacttcatggagatcatagcattaccccaccacatgggagggagcaaaacgtaatgtgcattgaatatctgttaagtatggggaaccctcctaggtgcctatagaagacaactcctgtaattctctttaataaaaattgtgagagaaagccaggcatggtggctcacgcctgtaatcccagcactttgggaacctgaggtgggcggatcaagaggtcaagagatcgagaccatcctggccaacatggtgaaaccccttctttactaaaaatacaaaaaattagtctggcatgatggtgcccgcctgtaatccaagttactcaggaggctgaggcagaagaattgcttgaatctgggaggcagaggttgcagtcagccgggatcgcaccattgcactccagcctggtgacagagtgagacttaatctcaaaaaaaaaaaaaaaaaaaaacaaactgtgagataagtaatactactcctatcgcattagatatgaaacagacacagaaaggtttggtaaatttccaaagacccagtctgagtcaagtgatcaccatctacctgttcacacctgtggttaatagttgtaagcatggtgtagaagatgaggacatcttgcaaatgagctttgtaaatgttatctaaagctaaggtagtttctctctcatcaaaaagtcaaaagtctaaaaatgtatgagtaccattgaagttaaataagatatagagataaatattgaaatttgaaacattttatttaggaagcaagaattgcaattcaggacatacacagagaccaggtgatcttcagtatgtccaaagaacaaagagacaggagttttattaaagaattgttacatattgttttgaaagaaagctcattggcactagagaagcttttggactctggcaagctctggttggtgagtcatggcaggaattaaaacaagtcttagagtcacaaattgttgcttcagcagctaccaggtaaaactggccctggggtgacagcaggccatttcagcagctgggcttggagaaaatacattcgtggagtaggtgctatgtcccccacgtatgttttcctctctggcccctcagttctgatttaactgagtatgtatgacaagaattgcccaatttgtattattaactttcacagtacttatttaaaaataaaacactattagctaataacacttaatacaatggaaaatgcaatagaaaggagtaaaatatgcatatctgatagatcaactcagagaaatgaggtattctgttcaataggttcataaatgccatggtctgaatatgtccctcaaaattcctatgttgaaatcgtaaccatcaaagttttggaattaagaggtgggaggtaattagatcatgaattctcatgaatggggttaatgctgttttaaaagaggcctgaaggaagctgttatccctttacaccatgtgaggacacagtgagaaactgctatatatacactaggaaacaggcccacagcagacacagagtctgccagcaccatcatcttggacttcccagcctccagaactgtgagcaacaaatgtgtgttgtttagaagccacctactttatgttattttgttataacagcccagatggactaagacaataaatatggtgaaattatgtaagaactgcaatatacacataaaataatttaattgggcttaagctgtctctattctttacttctgcaaagatcaacatgctgaaacatagtgaaagatgaagtatttgtgaatgaaacaatgtaatcggtaccagagagtggaacaaaaactagctattgtttgtggtggcaggcgcctgtagtcccagctactcgggaggctgaggcaggagaatggcatgaacccaggaggtggagctcgcagtgagccgagattgtgccactgcactccagcctgggcaacagagcaagactccatctcaaaaacaaacaacaaacaaacaacaacaacaacaaaactagctattgtttttacaaccaagcaaaatatagcaggtccacacataacattttttcattcaatgtcattctgttataatattaacgaggaaaaaaatttgattcccagccagggctgctgtctgtggggtgtgcactttctccccatgtctgcgtgggttttctccagggactctggtttcctcccacatcccaaagacatgcatgccaggttaactggtgtgtctcaattgtctgagtgtgagagtgtgggtgtgtgagtgtgccctgccatagaatggggttgattcccaccttgtgccttgagctgctgggatgggctctggccacctgcgaccctgaaccagaatcactgggtatataattaccttaaattgttttcattaatcttagatgtatgtatagataacatttatttcaatgtttagtgttagaagtgtttggggtctttatttagcgatttagtggtgttttcgtgaccagaaatatgccctaggaacttaactgctgtttttattaattcacctgtagtgaaattggttttgtgttaccttgttttgcttaaagtcacagtttccaaatacctatagacaatgttaagtgaggacttcctgtaagtagtttagattgaggagcttccacacactgacaaactcgtttagtggctactgtgttaggcaccacgaaagagacaccagatgtagcggagagcaaggaagatgaggcttgtcccctgcctggatggttttaatgagaaactgtgctcagggcaactgcatggacatcatgtgacttgtgcagtcacacagagcctcacactcagatggtccctgagcctgactttcatgctctgtgaacatcatcttgaaattcttaataatttttaaagagggagccctcatttttatctttcacagggcctcacaagctatgcggccaattctgacaacaagcgaagggagtgttaaaaaaaggtgaagtcactggggctttgatagcattaaaggagttcatctaatcttgggtgggtgggaggtgtcagggaagtgtctgaggaagccaggatgtccactggatgaggaatgctccatgcagagttgctagcttgtgaaaagtcctaagtcatttttcttgtgctgcattccatattttctctttgtttttggctcttagcatttttgccatgacacatctagttatggatctctttgcatatatacttcttggagtttgttgaatttcttgaatgtgtagatccatgttttcagcacatttgagaagttttcagccattatatcttcaaatatttttttcttcttcttttcctctcttcttctgctactcccattacacatgctggtgtacctagtgaatccagcatttgtctgtggctctgcttattttcattcattcttttttttccagattatatgatctgtattgatctgtcttcaaactctgattcttgagttcaaatttagtgtcaaaacattagtaaatttttcatttgggctattacattttcacctccatgatttccatatggttctttttttatctctgtgttggtatttctctatttgatgagacattgtcaccagaccttcctgtacttctttaaacatgttttcctctagtaaattgaacaattgataatggctgcttggaagtctttgctattaaatctgaaatctgggccctctcacaagctatttgtttgctttttctcctggtgtatgggttatgctttcctgtttctttgtatgactcacatttttttgctgaaaactgaacagtttaggtaattgtgatattgtgaaatatatatttgttcctcatccctgtctccctgcatacaacttttaaaatccttgcagtctccaaaatgttaactgcctttttgtatgctaatgagttgactagcggctgtcagcccctagatggcttcaagatggggctggtcactggaaagaccaaggcatgattagagggttgaggctttcagcctcaactagtgctgaaggttaagttggttgccagtggtcaatgatttaatcaattatgcctatgtaatgaagcctccttataatcccaaaaggacagagtttgggagcttccagaaagctgaacttgtggaggtttctggagggtgacaaacccagggagagcatggaagctccacaagcctcccccctgacctccccttaaacatgtcttcatctctctcttttgtaatatcctttacagtaaacaaaaagtgtttttctaagctctgtgagcagctctagcaaattaattgaacccaaggaggaggtcctgggaaccctgatttatagctcctaggtcagaagcacaggtgaaaaaaaccctggggcttgctattggcaccaaaattagagagcaatgttgtgagactgagccctcaacctatgggatctgatgataggtatgatagactgagccctcaacctatgggatctgatctccaagtagatagtggcagaattgggttgaattagaggacacacatctggtgtctgctgcagaaatgattacttgcttgatgtgtcagaaaatccccccaagctccatctggtgtcagaagcatgttgtgagtgcacagtaggaaaaattgaatttctttcttcaattcagtaatacagttgacccttgaacaacagaagtttgaactgcgtgggtccattttagctcagatagttttcagtaaaggttatacctagtgcacctgcctctccgtcctccccttccacctcctccacctcttccgcctctgccacctctgacacagcaagaccaactgctcctcttgctcctcctttccagcctattcaacatgaagactataaggatgaagacctttatgatgatctactgccacttaatgaatagtaaagacattttctctgccttatgattttcttaataacattttcctctagcttactttattgtaagaatatagtataagatacatataacatacacaatatgtgttaattgactttttacactatcaataaggcttccagtcaacagtaggctattagtagttaagtttttgagaagccaaaagtcttgtgtggattttcaagagtgttgggtattgctgctcctaaccttcatgttattcaagggtcaactgtataatgtagcagctgtggatactaattcccttcaccctctctccaggtcttgtttttgttgctgtttgctcatttgtatggtgatttgttagactattttagagaaatctatttccttcaccaagtgaagcctttgaagcctttggtgtcacaccttagaaggttcaggcttggccttgcacacaaccccctgggatgacatggttttagcacagctctctttaactgtctctttccgtgatctctctgataagctgtctgcttcatttgacatcacaccaagtaattgctggctgattgctctattatttttgcttatgccctggggcatatcttgctccacagtctactccaattaatttcaggcaggggtagttttgggactatctttaaggcttgttctgacccaggaggggtcctgttaactttcttttttcacaattctctctgataaactccatggcctatggtttagcttgttgctcttaatgaacagcatggtttttgagactgttctgaggcttgcacgtcaccacactttcacataaaatcagttcctttggtgacatctttggaactctctgttcctgtgaaatatctttccctctggccaaaatatttgagccatatgttgagtgttgggtgggatggcaacttctaatcttcttggcttgcctctcccagagtggaatctctgctctccaagtgagctcatgtgaggacagttgggaaaccaggattcttcctgggatagagcctccaccctgtgagtagagcctggatggaggaaaggagactttgacctcttggtcacactcaccagaaatttagcctcttaaatgtggagttggaagagataagaaatgctagtgtcctgtgtcacccagtgaaataccatatcccatggttgcgagctgagggaacagctttgtctttttgtccaaatctgtctggagtggagtttctgccaagctgagttgggattgggggtggggatgtagtgaggaagattgcaaggatttcaggagttgtatgcagggagacagggagtagaacatagctcaaatgtcatggactcttgctgtttttaccaagatttagtaggtttaaaaaataaataaataaagatggcttcttttgctatatgtgcttaagacaatttccagacgctttaaatgtgtttgttttccaaatagttttttttcttcttaacgagttatgcttgtttcccaggagactgggttcagagctcctcacactgccatcttgtaagttggtaatatttcacaaagctgatcacaaatcctttttgaagtttttctttctgattggcccatgttaacatcacacatctaaattcacattttttatcccataggctttaaatacattttttcccccaaatttctgtctctcgacccatcctattcttagaactccacttgtatatatcctgctgcttagccgttgcctcttcttggatgtctaaaagacatctcaactggacacagcccagatgaagttctggattcactcccaccagtgaattttctcttccttcagtctttttagtaaagagcaacagcatctggaaattacaggtctccctttaccaagtcactctgaagttgcaatatcatgaatgtattggtatcattaagagttattcagtaagtttttgaagaatgaatgaatgaattattcccattttatagatgatgaaatggaagcttagagagatcaaataaattgctggatttgaatccagcctgagaagcaattattattattattttcttcctcttatccttcttcttcttcttcttctcctcctcctcctcctcctcctcctcctccttcttctttcttcttcttctccttctccttccccttccccttttccttttccttctccttcaggggttcaagaccagcctggccaacatggtgaaaccctgtccctactaaaaaatatatatatacaaaaaattagctggtgtagtggcgggcctctgtaatcccagctactcaggaggctgaggcagagagctgcttgaacctgggaggtggaagttgcagtaagccaagatcatgccactgcactccaccctgcgtgacagagcgtgactctgtgtcaaaaaaaaaaaaaaaaaaaggaaggaaggaaggagaaagaaagagaaagaaagaaagaaacaaacaaagaaagaaacaaagaaagaaagaaaggaagaaaacaaagaaggagagaaattagctcacatgtttgtggagcctggcaagtgtgaattgtgcagggcagggcagtaggctgcagacccagagaagagctgctgttgcagatagagtccgaaggcagtctggaggtgagagatccaagatcaacaagatcaaggtgtctgcagagctggtttctcctgaggcctttctccctgtcttgtactgtgtcctaatatagttttccctctctatgtgtctgtgtctacatttactcttatgaggtaattaaggtaaaatgaagtcatatcagcccacccatatgacctcatttttccttatcgcctctgtaaaggccctatctccaaatacagtcccattctgaggggctgggaattagaacttcaacagataaatttgaggggtacaaaacttagtccataaaaaacaacgcagcccataacagagtgccatatatttagtatgtcaagtagatctgagaagggaaaactggagccattgaggaaaagattttttttttaatcagcttttctagcaagaataaagaggactggggtatgtgagaggaaccgctcaatctccaaacagcacaactggctgtggaaagcaaagaacaagaggttcattagggcagaatgctgagtcagctgggagattctgggccacccacaggaaaggaaacatgaggagattggtgctcggttttggacaggcaacgtctgcagttctgaatggtggaaaaagttacaggtatccaacgagcaaattccaggtggagctggaatttgagacagaagtcggacttggacagagattctggagtcatcggaattttggtgatcgttgaagatgttaaatagctcagggaaagaatgtaaagagaaaaacactgaggaaagctcttttggaaagagtaaaaagaaccagaggagatgcaaagaggaatgataacttgtgggtaagaaagactcagaaagtagaaagcagtgaagatcacatcaaacttctcaaatacttttcttaattcatagcaaaaatttttgggctaatattatctaagaattatgccactccctggagctatcagcacttaatgtccccgctaagtggaagtgggaagagaagctaggtgtgcatcgggtttattaaaagcagcagccctatggagctccacctacctacaaaatcccaagggggcaatgtcaatccagaaatatgacaccatgatttagatcatgctatcactccttactttttctccttcctgttcttttctcaagtgtacagagagagcgagcatactgcacacaccatatttaaaattccccattccccaaaactataggtcagagaaccaatattttatttgatcatcatttgacctcagacatagtgattaattttccaggcctcagtggccaccttgccccaccccatctgctgcctacagatggctgcaggatctctgtcagcaatgtcatgtccctcctggtgttagtctagcctggcagtagttgcttagtagcaagagatactgctatgtcacatctataaaaatagccaaaatctggactactgacaaggacccaggagttacaattttatcactctaaatgtcaaaaagccagaacatattctaatataccctctccaaaaagttttagtgtattctattaagaaatgttttctacagaaaatacaaatttaaatgtattgcataaatctataggaaaatgttatttgtttgaaaaaaagattctgtcaaaagaccaataagtttttttacttacatttgatcatgtgagccatagtgacccatggttgtgtaaaaactggaaaaatgtgtaggtcttattgcttaacaggtattgaatttttcaaatagccaagtctttttctctgaaacaggtaggcatttatagaacggcaaacatgatttcgtgaatttggtaataattgttcctcccatctctttatcacccaaactcaacatatctgtttgcaaacatgaaagactcctgtggaaccctttgggctgggtttctgctgtcttctttctgatcactagatggcactccattcatattacttcacagacaaggaagcccaacacagtggattatttgaattgcagccgaatttatagccttagaagaaaagagcataataacagtggaagtgatttagaaagatactggaaagatgaggggagcaaaggaagtggtttttcagtaatatttacacagaaacaacagggaggtgtttataaacgtatcttttctgtacatctgttctgagtagggaaggagtttcccagctaggttagatctccaaattcagcctaggtggaagtgaaccaaaatgtttcaagtagtaggtggcccatcaccctcagacagaggatgaaagcggacttccctgctgcactcaacaacccatctaaaaatagtacctgcttaagaaatgtcctctaatagtcattttataaatgaaaactggtcacaggctgtgtcttatactggacactgggagcacacaacacacactctcaacacgctatttactcagtggcaatgtgtctggaattagttccttccggtgggttcttggtctctctgacttcaagaacgaagccgcaggccctcgcggtgagtgttacacttcttaaagatggtgtgtccggagtttgttccttcagatgttcagatgtgcccggagtttcctccttctggtgggttcatggtctcgctcacttcaggaatgaagccgcagaccttcgcagtgagtgttgcagctcttaaaggtgccgcctctggagttgtttcttcctcccagagggttcgtgatctcgctgacttgagaagtgaagctgtagaccttcacagtgagtgttacagctcataaaggtagtgcggacccaaacagtgagcagcagcgagatttactatgaagagtgaaagaacgaagcttccacagcatggaagagaacccgagcgggttgccggtgctggctctagtggccagcttttattcccttatttggccccgcccacgtcctgctgattggtccgtttttacagcgtgctgacaggtgtgtttacaaatctttagctagacacagagtgctgattggtgcgtttttacagagtgctgattggtgcatttacaaacctttagtgagacacagagcactgattggtgtgtttatagtcctttagctagacagaaaagttctccaagtccccacccgacccagaagcccagccggcttcacctcccagcaagagatacccctacttcacatctataggcacagccaaaaactggttactgacaaggacccaggagatacaattttatcactctagatatcacacacacatacacaccacacaaacacacaaaagacacacacaatgcataatatccataacacatatacataacacacacctatacacacacttatgcacacaccatgaaaacacacagaacacactcacaatgcacacttatacacacaacacagtcataacacacgtaaacacaaacacacacataatacacacttatatgcacaatgtatacgtaaacacatacaatacacaaacttataacacacttatacacacccagtatacacaacacataaatactcatacacatacactcacatacactcacaccccaatatcaagattatttagcttaccaaaatgattcactttcaaaggaggatagcacttaaaatgacagagggtggagaagggactccttagacaacaagtctccttcgcctctggtcatcatctcctgcttacagaatatggaaatttttctcactaacagaagactaacaaaattaaagaatgcattaatattttatgtagtttaaagatggcaatctgtcttgtgcatcataaaaatatatgtgagataatggtagaaatctccctcaatttgcttgtttcacatcactgcatttacgattctctttggtgcttttaattattacaaatcatcctgaaatgttctgggcgggtatagttcctttccttctgaagtttctttttttctctcttttttctttttttgagacagagtctcactctgtcaccaggctggagtgcagtggaaagatctcagctcactgcagcctccacctcctgggttcaagagattctcctgtctcagcctcccgagtagctgggactacaggtgtgcaccaccacaccaactaatttttgtatttttagtagagacggggtttcatcatgttagccaggctggtctcgatctcttgacctggtgatcttcccgcctcggcctccgaaagtgctggggttacaggcgtgagccactgcacctggccctgaaggttctttataaagcgtgtccagtgttataacaaggcctgttacatttggtgtccaaggatgtgtgaattggtggcatcactgttttccatcccaacaccccatgtcttactgatccaggtctgacagtgcgtcagttcttttgattccgttatatgtcatgcagaatttcataattattaacagtaatgcaaaacaacacaattcttcttttaaggtaaagacaggtattggctttatacatggttattatgcctgaggatactcactttcctgggaccaatatcacatattaaagatccatgagcacacactccctccaaaataaataaataaaaaattgagaggaaatgaggttacataaactaccttttatttttatttttttttgaaaaggagtctcgctctgtcgcccaggctggagtgcagtggcgggatctcggctcactgcaagctctgcctcccgggttcacgccattctcctgcctcagcctcctcagcagctgggactacaggtgcccaccaccacgcccggctaatctttttgtatttttagtagagagggggtttcactgtgttagccaggatggtctcaatctcctgactttgtgatccacccgcctcagcctcccgaagtgctgggattacaggcgtgagccaccgtgcctggacaactaccttttaaatgtgacattttgtccacacatctcactatccactgaaatggactgaaataacagtactgctgtgttctatacgataattacaaaagagataaatctaaattgataaaatatggacatggcagtaaagcacaaaataatgtgaaattatatcacctagagataaacactgttaacattttaacattttggtctacttttttccattttctttctctatgtatatagttacaagaataggcgtctaaaagcaaaacatactgctcttgtttttcatgcagccatctatggagaacattgccattgtcaatcaacatttttctacaacaagagttttaatggccatatggtaccctatcttatggttgtatcataacttagcatttatcaccattgtataaaacagtctgataagcattctttttccgcttcttgcaattgttgagtccagatctaagtcagattgcctggattcaaattttcacagtgttatgaccctactaagttctgtgtctttgggtgagttttataaactccaaaagcctcattttgctaagatgatataacaataataatagtatctatcttatacagttcaaatggggattaaataagaaaatgcatgcctggcacaatccctggcacacagtaagccatcagtcaatattaaccattactatgattaaatatctatctgcttacatcaaatattacctttggatagattcccatgcatgataattacttggtcaagggtatgtgcagttattgatacctatttaaaagttatccctttaatgttaaaaagtgagtgacacctaacactttgggggcactgacttctttgagtattcaatggaatccatgggccttctcccctagagaaaaatatttatgtacgcaaaatttcgataccattttgggtgatccatggaacccctaaagtccgtttatggatcatttaatatttcttggatctcacattaagacacactgatttcagtgggtaatcaactaccttttccatgttgtaatatatttatagggaattgtatctatatttattgtctgaggacatttatacagcatcaacatttcctttggtcatgcagtcccatcagtgatattttcctcttaatttcagatgggctttttatgacaatagaaaatgagatcaataactttacattatgtataagtattcaaatcatggcacttaaactttttttctatttgttttccaccagttaggggtgcctagaacctttcttgaaaccaaatggtcagaaattagagctttctaagaaatgaattgaggtcccatattttctaacttttttttcagctgtaaaacctttttataaaatgaaatctttggtaaggcaaataaatttttaaatgctttttttaatcagtaaaaatattagatatgtaaaattacaacatgtatcttttataaaactgatgagtgagaactatgtcttttttaaagaacataacattttaaattgaattagtaaataaaagttgtggtattaaattagtaataacacacaatttatttcagtagtttttggttaaaccagaattgagaaaatcctcattcaaacataagtaacaacgaatgggaagattttgccaaaaattagctttgcaatctcaaaacacattttaagttggcttaccagaatgaaaaaggaataagaattatttttctttagatttgatgtattaattatatctaatgattgatgcatttcatatcataaatataaaagtcagcaagaaacctaaaacttacaataagtgccgaagttatcatactttctattttctcaaattgtgctgctgaaccttatctttaacaagagcatgagccatgcagagactcacctttctctagcaattatttgagaataaagcatgtgtaccagagtaataacttgcacatgcaattttatgtaagaagttatgcagaaatctgttttttagatacaaagtacaggactttactcttcaaatggtacaacaattataataaattcaagaacagatacatagatgacaggagacgtttgctaccaagcgcaaaataagctaacttacataggtggtctccaaactcctgttgagtttttggctaaatcccaatttgcacgtgcattggaaaagtctccaaggaggccagaggaacaaacaacttccaaggagatagcacttgctgggagctgtaggcctactcatcccagacacacaaggttatgagctgtttacattcaccaagctatagtagagagaccttactgaaaagaagatagtcagtagagaccccagaagggccatctactaagagaggagctaagccagcccctgaataaaagctactatagatccactgtaaaaatgattaaaaatgagtctctaaaggaccaaacacatctgcaaataatgaagtggcctgccaggaaaaagcccaatattgcttaaataaatgcaacaaaatttagaattcatcaatgtaaaattcacaatgtccagcaccaacaacaaaaattagtgggtatgctaagagcaggaaaatacaactcattattaccaagagaaaaaaataatctgtagaaatagattcatagatgacagagatgatagaatcagaaaatgaaagttaaaaagctgttatgaaaatgctcaaatatttaaaagaaaacatgagcataatgagaacagaaatggcagatataaaaaacacaatggggccgggcgcagtggcgcacacctgtaatcccagcactttgggggactgaggcgggtggatcacctgaggtcaggagttcgagactagcctgcccaacatggagaaaccccatctctactaaaaatacaaaaaaaaaaattagtcggggctggtggtgcatgcctgtaatcccatctacttgggaggctgaggcaggagaatcatttgaacccgggaggtggaggttgcagtgagctgagatcgcagtactgcactccagcctgggaaacaagagtgaaactccgtctaaaataaaataaaatacacaataggtactatcaacagagtataaaggtaaccccagaatgggggaaaatatttgcaaatcatctatctgttaaggggttaatacccagaatacataaagaactcctgcactcaacaaaaacaatatactgacaatttattttttataatgggcaaaggaggagaatagacatttctccaaagaagaacacaaaatgccaactggccaggtgtggtggctcaggtttgtaatcccagcactttgggagtccaatccaggtggatcaattgagttcaagaccagcctaggaaacatagcaaaaccccatctctaccaaaaatacaaatacaaattagccaggcctggtggcgtgtgcctgtggtctgagctacttgggagcctgaggctgcagccaggaagctgaggctgcagtgagccgtgattgcaccattgcacaacagcctgggtgacagagcaagaccctgtatcaaaataaataaataaacaaaaaacaaatggttaataggcacatgaaaagatacctaatgtcattcatcattagagaaatataaatcaaaaccataagatatcactttgcaaaaactgggatggatattataagcaagcaaacaaaaaataacaagtgttggcaaggatgtagagaaactaggaaacttgtgcactcctggtaggcaatggtgcagccactgtggaaaacagtatggcaattcttcagaaaattaaaaatagaattactatatgatcctgcaactccacttcttgttatattcacaaaatatttgaaagcagggacttgaacagatatttgtacacccatgttgatgccaatgttattcatgataggcaaggagtgtaagcaacccaagtgtccatagatggatgaacgtataaacaaaatgtgatatatccatacaatgaaatattattcagtcctaaaaaggaaggaagttctgaaacatgctctaacctggatgaaacttgaagacatttagttaagtaaaagaaggctgtcacaaaataacaaatactgtatgattccactcttaagatatttctaaagtagcaaaatccacagaaacagaaagtagaatggtggttgccaaaggccagaggggaggaggaaatggggagtgagtgtttaatgagcatagagttttaatttgggatcatgaaaaagttctggtggtggatagtggtgatgattggacagcaatgtttaaaaccattgaactatactcttaaaaatggttaaaatgctaacttttttggttatgtatattttaccacaactaaaacaaagtacaacataaaatgtctaaaggtggaaaatacaataatctaacttgaaaaatatattgaattggattaacagtcaattaggatgtagagaagaaacgatcagtgaacttgtatttatggcaataggagctatcaaagagagaaaataccagaaaaaatagagcctccatgacagtatcaaggagcctaccatgtaaatggagtcccagaagtaagagaaatgagaggacagaaaaaaatatttgagaaaaaaatgggccgaaataaaggctttttcaaacaaacgaaagcagagagaaatcactagcagatctgcactacaagaaacattaaagcaagttgttcactgaaaggaaaccaggtgaaaatatgaatccttagaaagatatgaagagcatcaaagatagtaagtctcttgcaaataacccatatattaaaaacatttttctcattcaaaaaaacttttgaaaggttatttaccctttaaagtaaaaataataaagttttattttaaaatgtttttgttatacattttacttctacatgttttgtaaaggtttcacaaaacatatagaagtgacatgtataacaatgatagtgcaaaggattacaagaagaaatggaattataaagttataaagtatttagattaaatgtgaaggggtataatattatttaattatagaccttgaaaatttaaacacgcatatagctaaccatgcagttatcattatgaaagtaaaacaaagaggtataactaataaaacaatagctgcaatagtcgaatactaaatatcaatcaattaattcaacaaaaggcagaaaaagaaaaaaaaaacaaaaaggaagagaatacagatttattttaaccatactgatatttgcaataaatagaaatattcaaaacgtattaaaaacagagattgttagtctggatttaaaaaagtaagtcttcctgaaaggaacccagttgaataaagatctgttacacaaatataaggatgctggaggaactgcaataatacaagcaaagtaaactttaaaacaagcgatgtggctgggtgtggtggctcacatctgtaatcccagaactttgggagcccgagaggggggtggatcacctgaggtcaggagttcgagaccagcctggacaacatagtgaaacccaatctctactaaaaaaaggaaaaaaaaatacaaaaattagccgggcatgttggtgggcacctgtaagcccagctactcgggaggctgaggcaggagaatcacttgaacctgggaggtggtgattgcagtgagccaagatcacaccactgcactccagcctgagtgacaagagagaaactccatctcaaaataaataaatacataaaatgaaacaagggatgttatcaggaatgaagggagacattccataataataaaggaaacaattcatggaaaagacataaaaatcctaattatgtatgtgtctttgatatcctttgaatatttgtcccctccaaaactcatgttgatgttggattcccagtgttggagttggtgcctgatgggagctgtttaggtcatgggggtggatccctcaggaataact

SEQ ID NO: 5627 - DNA, 502509 bp, Homo sapiens
  FMN2 gene - 236502010 - 236964518 of chr1; NCBI Entrez Gene ID: 56776; Build 35; sequence includes 20,000 bases upstream of initiation codon and 20,000 bases downstream of termination codon of the gene
tcaaggaaatgatctgacaggcggtgatggagtggggaggtggggatttcagggagaaggaataacaggagcaaatccaaggaggattgaaggacggggcaaggctgttgtgctgattgcctcctggggcgtctgcagatggaaagagtgacagaggagctgctggggagccaggggaagtggcagggcaggaaagcagccctttttctgatatttatgccagcttcagaaagctactgtggggtgaggtcgattcggcacattgcatccctattttcaaagctaacttaagggcaggtgggacaccattcaggagtaaggatcttcaaagcctttctttcctttatgggacttgttagtgtgctctactgggcactgccagcttctcctcaatgtcccatgagctgagtgtttaaggccaggcaattccaggctctggttcctcaaagtctgaatgtacctagattactaaggtccttaaaaaatagagatacagggccaggcatggtggctcacgcctgtaatcccagcactttgggaggctgtggggggcagatcacctgaggtcaggagtttgagaccagcctgcccaacatggcgaaaccctgtctctactaaaaatacaaaaaattagcctggggtggtggtgcctgtaatcccagctgctcgggaggctgaggcaggagaatcgcttgattccgggaggcggaggttgcagctagccaagattgtgccactgcactccagcctgtgctacaagagcaaaactccatctcaaaaacaaaaaacaaaaaaccacagatacagaggtctgaagtgaagcctgacagatggtaaaacaatctccaggtggcctcggtgctcagccaggtctaggactttaattcccccatggcatttggagttagctagcatgtttgagaaggcaaagggacgtgagcatctgctgtaaatttggttacaaagttggccaaataagaaattgcttatatgaattatggaatcctatagtcataagatttttaaaatgactactgggaaactgaaaatttatagtgaaattctctctactgctcattttagttcccttcttttctcaaagttaaattataactcaatgtaacccatgaaaggaaaggctgtttgtttcctgtgcaagtctaagattttggggaagggaagagtagaaaaaaaaagatagggaaatcaacatttaatttatgcctactaccatgctagaaactaaagatatataaattacttattataaatatcaattacaacttcagtgattaattttagaatctaaataaaacctgacaaaacttacagtaattaaaaatgtatcaacgaaagaaacagaacagtcaaaataatctttagatggacatgcttagaggatcacattactttcaggacttactagaaaactatagcaatcgagacagcgtggtattgacataacaacagacatatagatcaaagtaacagaatagaatcctgaagtagatccacacttatccatgaactatttcctgacaaagacaaagacaatccagtggtggaagggaaatcacaccttatgtgctctttagtgtcttcttctgcagaacacgatgcttttcaaattcattaattctgtcgctttatccatggtttgtctttcattgctgaggagtattctactggacaaatatactacatgttcgtgttgatggatgtgtgtgctgttaccaatttggagcagctgtgaataaaatggtggtgaacattctgataaaggtctctttgcagacatgtgttttgtttctcctgggtaaatgctgagagctggaattgctgaattataggtcaggaacatgtttacttttataagaaactgccaaagtgattatgccattttaccctctcactagcaacatgagtggtcttgctttgcatcctcactgacacttggtcgtgtttgtatttttaattttagccctgttcagtattgtgtgttggcactttattgtggtctccatttgtttctctcgtgattcattataatgagtactgtgtccctgtggaatggccatctgcatacttccctttgtggaaggtctatttaaatcatgtgtctagttttctatattgcagacaggatattctctaaattctcctcctaaaaactttataatgtaactttcatatttaggtctatggttcatatcaaattaatgtttatgtatgattagtggtagggaggttttttgttctaatacagatgatgaaactaaatcctgaaattgttttacaatctttccctttttttttttttttttttttgagatagggtcttgctttgttgtcccagctggattgcagtggtgcagtcatggttcacagttcactgcagcctcaaactaccaggctcaagtgatcatcccgcctcccaagtaggtgggactacaggcgcctgccaccatgcctggctaatttttgtattttttgtagaacagggtttcaccatgttgcctaggctggtctccaattaatgggttcaagcgatcctcctgccttggcgtcccaaagtgctgggattacagacatgagcctgcaacagcacccagcctgttatataatcttggtagcctctgctggaagaagttatagaacatttctgtcactcaagaaatttcccttgtgcctcttcactttcccacctgtatcagtcaagctcttcctccgacacagaactagtaagatacatatacagcaagcagttgtgagggttcctgggcaagtctgaaatccacagggcaggccacaggaggtcaggctggaagtctgggtaggagctgacccacaatccagagaggagatttcttcttcgtcagggaaacttcaattctttttaaagcctttcaactgattggaatggcccagccagattatagaggataatctcatttatctgaagtgaactgtagatgttaatcacatctacggaataccttcatggcagcacagtgttcgaataatcagctgagactagagcctaatcaagttgacataaaaaccatcactcccttaatccccagaacatctaatgacttctgcctgttattggacttcaaataaatggcatatagaatgtgttttcttttgtgtctggttttgttctggaaagtgctattacttgacaaatttcaaacagctgcagaggaaggatttacttgaggcgatataacttgaaatcttgaagcttaaaccaatacactaatgctcttggctggaaaaagggattagagtgccataaaagagaaaatgtgcccatttgtaaaatttggaaacataggtagaaataggattacagaatgagttcaaaataatacatttgataaaaatgcatagacaaaattataaaaagtatgatacataaatatgtgtatatgatacataaatatacacattttacattcagttgcataacttctgagcatatgactattttaataaaaattttacataaattaaaaatagcatttatagttctgcctagcttataccagacagaatgtcaaatccaagactgactgtccagttcaaaatcagacacgtgctaatcttgctgagaaagtgtgtcagtcaggatctagccaggaatcagaaacacacccataatttgaataggaacaatttaacaagatgagttactaattggcaagaggtgatgagctgctaacagagtaacttaagtgaaagagaactcaagaacacaggaattgcagctggagtgtaagttccaccaatcagatccatgctcagaagatttcaaatcagaagcaagctacttaagcaaggacgctctgcactttgctgccaaaggctgatgcacaggagtctggcttttggaagcatccagggtggcaggaacaagttgctgacaccggggtgtcactacaaatagtgtcagtagaagtaaagtctggagatgtgacagccatcgtctgcatgagggaaaagccaagagaatcaataaaatgcaggacaagtcactgttgagctgcttaaccacgtaccgttgtctatgctgattctctgggcagtttcatgctcctggacttccctgatcattatcatccctacccatatttaatctttttttatgtgccaggtttttgtttgtttacaaaaaatcatcttactagtttttccaagtaccaacttttacctttgttaatttttcatatagtacatttgctttcttataattgatttctgttctttgttatctagctgcttctactttcttctgtttaatttgctattcctttctagtttcttgccacagaagctttgttaagtgattttcatcacttcttccagcataggcatttgaagcaataatgttccttgtaagcaacatcccactagtattactatactgtattttcattaccattcagttagaattattatctacattttactgtgatgtcttctttaacacatggatcatgtagaagtatggtgcttcatttccaaacattatgaattttctatttctctttctgttactgatttctagtaggagtccacttttagcagagaacatagtatgatttcagtctttacaatttgtggcaacttggtttcccctttacggagagtaacagaaaatcaagagacacacaaatatatctgaaaacgagaacaaaatgctgctgggtggtgcggggccgagagcagaaatccagaactgctcaccgcagttctccccctgcatgaaggcctgaacccccttgctgaggacactcaggtggctccggtcaccacctgggccttcagaggggcatctggagccgcccacagaaaggggaggggcgagtggctccttcccgggctcgcgccctctaatttggcggcgtcttctgggaaggaggtggctccagagtgggggtcccgcgggcgcgcagggactggggaggctccgagggagcaagacatttaaacccgggcggtgggggggcgggcggtgtcagacgcccaacgaccacctccctcccggcccgcgccgagcccggccacaccctccccgcgacacccgcgatcgccccccaggactggcggccccgggccccgctcccacccacccacctacgcagggggcgtcctgctcaggcaattcctcccgcgcgccccgtcggggaccgggcggggacgggagaaggaaaagggcccctggctccgggaccagggctccggagggtgccgggcggggagcggaacagggaacgggctggtggcggccccaagcgggagggacggaccgacacgcggccccctggcggccttgcgactcgccgacctgcggaacctcgtcgccgccctcacagccccgcggccaccgccgacccgggccggtccccggggcgtcgcgggtgttaaagggcgagtctacgcggatgtcacggtcgccgcgggcaaggaccgcgaggttgcggccctgctccgaatcccggctgcgctggccacgctcctccacgcgcggggcggccgctccgccacccgcacggcgccccgcagctgctccggctggggattcgcggggtgcagccgcccgggccgcaggaggctgatgtcagcgttccgccgtgaccgcgcctgttctccagataattttaaatcattccattttctcctctgttaccctttataatatgtcagctctctctaataatcatataattattgtttggtaatgacatgacacttgagatttgcttcctctcttttgggttggtttgtttgttttagaattccacttttcactcttttagttatgtgtataaataaacatttattcattcatgtccataatgtgtacatagatatatataattattttaatttgattggtggttgccctacagattcagtatttatccttgacttaatactgtcgcttaaacaaaagtcccacttctagtgtagcttcgagaagcgatccggaatcttcactcattgactccgtttgtcatcctacttcccttttcacaattatttccatgttttacctctacatgtttccaccctgctagctattattataattgttattttttaaaagtagatgttaattcagtgtgtatacgtatacatagtatatacaaaattttgtgctcctcttcattccttcctacatttctgcaccctcaactattaattaaaaaaatcttcactttgaaaaattccctttaatatttctcatattgcagatctagtgatgaattctctaggattgtggaacatagatttccataaactgctggttagaaaacctggccaaaaattaccaaaaaaatgagactaaaggggaacgttttaggcaatctaggaaactattggataagaattttgaattaatgggaatttgaccacttatcacatcaccctggtgtgggcaacaatattttatctgtatgtacagatgtcaaacatattggtcacagcttctcttatgataactaaattagctttttctaaggcttgatatctttaactctaatataaatattgatttagttagctatgttgtttgtaaggtaattgtaacgtagtgcatggcttgcagtgactacacaataaatatttgctgaatggatgaccatgaaaagggtcttttacaaataacaatcactaaattgtggatctaaagataaatataagcatatgtcatcacttgtcagtttcccaaaggctgtttgaaaagaaagcatacttgatgagcagagcagccagcagtcacccgcatgctgagtaatggtgaaatacacagcatcaaaccagatactctggtgacactgcaaaagagatctccaagtacaacttcagacatgcaggtttttatcattttacattatcacaaaagtcacactcttctgattctgatgaaaaattatattaatattgtgaatgtagatgccattataaattgcagatcaagcctatgcagacaaacagaaataccctcatcttggtaaagtcatatctatggagaacacattttagatttagaaaactggaattatcaaagctactcttcatttgcccccgaagtatgttaaaaggcaagtgaatcatgtcaagataccttttctctcactaaactaggtaaattttcagaattcaacccagggacccatgagcccatgagatcttcggccttcttggttttttttgtttgtttgttttttgtttttttatggattttgctcttgttgcccaggctggagtgcaatggcgccatctcagcccaccacaacctccgcctcccagatcaagtgattctcctgcctcagtctcccgagtagctgggactacaggcatgcaccaccacgcccagctaatttttgtatttttagtagagacggggtttcaccatgttggtcaggctggcctcgaactcctgacctcgggtggtccacccacgtcggcctcccaaactgctgggattacaggtgtgagccaccgcacccagccaagatctgctttctttatggtaaacaaatacgcaatgtgacttctgagtatggaaagtcattaaacacagacacatacttattactgggtcacagaacagtttataacttcgtagttttccttttattatgacttttttcatttggtgcaaaaataagtgaggagtcagatttttttttccctaaaaccattaacaaaattaaactttaaaagttgctatcaggctgggtgtggtggctcatgcctgtaatcccagcactttgggaggccgaggcaggcggatcacctgaggtcagcagtttgagaccagcctggccaacatgctgaaactccatctctactaaaaatgcaaaaattagccaggtgtggtggtgcacacttgcagtcttagctactcaggaggctgaagcaggagaatcacttgaacccaggaggcggagcttgcagtgagctgagatcctcccactgcactccagcctggtcaacagagcgagactccgtctcaaaaaataaaaaataaaaacaaaaaagttgctattgctatcacttgtttgggggaacttattgtctattgactgtagtagcaaaatgactcagaatcaggcatgaaatgcccatatttcattgcgtctgagtcatcatcaactgtaagaacattgctttatgtatcactaaaaaagaaacatttattcaattgtactattacccaatgtttctttttaaaaaaaaaactatattacaacagttttaggtttacagaacctaatgctttttagtcatcaaaatcgttacacatttagtgtatacacagagcttttggagtctttacacatggattttaaaatatatatccctcttatgaatgtgtaaaggagaaaatacaagcaaaataaaaggcttaggtattttcaaacctttttggtattcagtgtccatcttttcacagtcagtggtgtccttttgggttttctaaatactcaatgttctacagaaccctgggaatgcagccgctcttaaaagcgtgccacagtttagttgctggagttttcttcttggattatatactaagtctgcaagttttactactgggcctgtcttgattttatcagatgtcaaagataatttcagacaaccagaacattgacttctttctgcaattgtgtccataatttgttgactcagacattaagtggttgccatcatccagacaggtccgcagtaataacaaccaaagacacatattctcaggcaatgataaccgcaccacgactccatggagacaccagtgttttaagatattgtcaattccagatatgtgtaaaagtgtgaaaaacatgagtcatagaattaactcaatgcagttattcttttctcatcacaaacagctcttccccatcccttacgcaaaagggctgagaagatacataaataaaacaatgcaacacatagatagatagatagatagagagagagagagagagagagagagagggagggagagatagctttgatctcagggagagaagttgtttcaatcaacgttttcatacatttggaaatcatagaatttttatacactaaaggaaaacgtgttgttccaaactttaccccataccactcctcctgtttaatatctagttagggtcaaagccagcaccaggcactcaggggcagacagggcggggaaggcaagtcctccgagttaagttataattcaattaacttgatttactggatgcctactatttaaacgcactggcctagaatctggagatactgggtgtaataagatcctatttattttctgcaggtaggtggaggaattggtgaccatgagcattagggaagacacaccctctctctgggccttagctgcctcacctgcaaaatgcaaggatgtgacccactgaattctatggttcctactgaactaaaaatatttgtaaaggcaaacaaacaagtaacagaacgttcccattctagccatccctagaaagcagatatagctttactttaagtcccgtatttttttgagacggagttttgctctgtcgcccaggctggagtgcagtggcacgatttcggctcactgcgagctctgcctcccggattcacgccattctcctgcctcagcctcccgagtagctgggactgcaggcgctcgccaccacgcccggctaattttgttgtatttttagtagagacagggtatcacattcccattttttaataagatcataaacaaaagaaagaaaagaaataggaaagaaatattcacattgttaagatattctttaattgtattaggacatcgaactttttttgtttataccaagttctcttattgcatgaaggagaacaaataaatcacacaattgtgtagtaacttatcggaaatagggaatcattttctaagtaagatggcatgagacccttttcttcccaacgtatctgtagacatttgaatcccctatccctaatgcggatgttggaatagattgggagggggccttctttggctcctgtgggctcctgggctcggcatgctgggagtgtcttctaaccggagtgtggatgatactgcaatcaaagtcaagtgtagaaccagctgcaggtgatggcaggtcggccagaaatgggagattcattagggtatccaagggtgtcagaggtgtcctcggagacgtagagtgaagaaccacccagtaggacacaagggagaccaaagtaagcaagagaagtcaaagcagggggtgattctgggaaatacctggggccaggtaggtccaagctgggggttgctgtggaaggacaatcaggtttaaagagcctgtcaggttatcaagtagtatgtttatggtgacctcatatctgagctgttttaaatgagagtcccaatgtcaaatgctcttctccaacctgtcagatcttgtgtcccaagttcatttgctgggtattctaaggcacctctccttggccaggtactgggctaagaaactctggtatatggtcagaaccaaggtgtagaattactcctctcaaattaatatcttgtgaggctgaccaatgattatgatagaatactgagggatgaactgtagaagctggagcatctggtgattaaagtagtaattttgtctttttcttaaaattgttatgactacttttgttattataacgtgatgttcttagaatataaaggattttagcaaacttttagagggaaagtggaaactcactgcgttggagatagcagacaatgtataatggatttttgctatgctaacatgagatttcccctctggacagacttccactgagacctcctgccaatttcctttatttggtcttcctttatttcatattctactctcttatgaggaagacccctgttaccaaaagattcatatcacaaagaaggggttgctgtgattggaaagtgtctctagtacattacgtccaattgtcgaaagatattttgtagagacagaggtttgtagaatgaatggatggagaagagagcggcagatctggacacaggtctggggttagacgcaattgtccatggctgcctttgtctcaaggtacatttccagtcagaggattatcttatatttgttccttatagggaattttcattagcttccaaatgataatagagatataaaaaaaagtttattgaagacattctcagtcaggtgcagtggctcacacctgtatgtaatcccagtgctttgggaggctaagtctggagaatcacttgaggccaggagttcaagaccagcctgagcaacatagcaagactctgtctctccaaaaaattttaaaagctagctaggtgtggtggtgcatacctgtagtcctagctactagggaggctaagggcagggggcggtgaaagttgctcgagcccaggagtttgaggttacagtaggctatgatcatgccatgcactccagcctgagtgacagagcgagaccctgtatcaaaaaaacagaaaagaaagaggaattccctaaggtcatgaacacattctgaagaaggccagcttggacaactattgaaatgggcaatatcatcgtcaaaagcagtcgcacacacactgccctctggtggccatatagaaaatggcatgaatgctgcagggctccaaaacttcgtctccaaaagatcacattaaaagtgcggtgtgttgtttttttttttttttaataaataaataaaaataaaaggtgtcttctcaggattttgattagatcgcaaacaaactgtgtaagattcagtgctttgggggtgcttcctagtggaagtctttgttttgtcattgcacgttatgaaaaaataagtctctccccagtacaccatttcagggagtattaattgagcagttgaatgaggcttcggattctaggacagaaaatggagacaaggttgcagtctcacagcgttagcagggtgaggggtgggacagtgttgagaataactggtttacatcaaagctatgtacgtctggtttaaagataatagtaaaccaatcaaagtatattgatggaatccttctgattttatttatttatttatttattttgagacggagcctcactctgctgcccagactggagtgcagtggcacgatctcagctcaccgcaactttcgctgcctgggttcaagctgttctcctgcttcagcctcccgagtagctgggattataggcgtgagccaccatgcccggctgattttataaacaataaaacatttcagagaaatgaaaactatcactcaaaagagttgtatactttcatctaatttagatatagagatttttttcaaaaacagtgggagatcctgtattcccagttacttttgcacttagtatgagcacttattcgtgccatttaatgtttttgaaaatctgactttaattgccgtctagcgttccttaccataacttgtacataaattacatgcttctgggctaggcacggtggctcacgcctgtaatctcagcactttggaaggccaaggcgggcggatcacctgaggtaggttcgagaccagcctgaccaacatgaagaaaccccctctctactaaaaatacaaaattagccaggcgtggtggcccgtgcctgtaatcccagctactcgggaggctgaggcaggagaatcacttgaacccgggaggcggaggttgcggtgagccgagatagcgccattgcactccagcctgggcaagaagagcaaaactccatctcaaaaaagaaaaaaaaaaattacatgcttctgtagctccccctgctgtctccctctaccagccaaatctagtttctctacaaaaatggagctcagttgctgtcatcttcaggcagcttcctatgctggaataattcactagccttctagcactttcactttatccttcttaggatagcaagcacttcataccacgtctgatctccttctgcagactgggagcttctctcaggctatggtgcagctctctgtccagctgttagctcagggcctagcatacagtagacactcaacaaacatttgagaatcacgtttggtcaggcatggtggctcgtgcttgtaatcccagaactctgggaggtcgagttggtggagggattgcttgagcccaggagctgggggccatcctgggcaacatggtgaaatcctatctctacaaaaagttaagaaattatctgggtgtggtagcacgtgcctgtggtcccagctactcaggaggctaaggtgggaagatcatttaatcctggaaggtccaggctgcagttagccatgattacatcactatacttcggcctgggtaatagagcaagaccctgtcttaaaacaaaataaaatgagaaacacaattaatccaaatgagttactcacagttgcagagaactctagctgtccagcaaaatccattctccccttctctgcacacacagctgtaccacatttcccagactcccttgtgttatgtgtagtcacgtgaccagttcttgccaagggaaggggagtgggacttatgggagccactgccagtccaggcccataaaatccccccacgggtatttctccatgcttcttctctttcttctgctgaatgcagatggggttgaagtcccagggatggtgaaggcaccaggtggaagaattcagggttcctcagtgaccacagggagaactgcctccccaaactgagtgcacaaccagcaaagccagggggcagtgaaatacagtgttacacccctggaatatgaacggttatttggctattaccgtaatctcactaataaacctgcttaaaaatttcattgtgggattaacttacatagttattatctctgtgtcacatttaaaatgacaaaagtccatttggccttgcaagtgctgccttccatttgactctgctattctgaccctgccactaccttagagagattcgatccctcaaaatatttttattctgtgctcagtaacctttgaaatcaaaattattgtcaacacaggccgggtgtggtggcttatgcctgtaatcccagcacttggggaggctaaggtgggcagatcacttgaggccaggagttcaagaccagcctgaccaacatggtgaaatcctgtctctgctaaaaatacaaaattagccgggcgtggtggcgcatgcctgtaatcccagctactcgggaggctgaggcaggagaattgcttaaacccgggaggtggaggttgcagtgagccaagatcgtgccgttgcactccatcctgggcaacaagagcaaaactccatctcaaaaaaaaaaaaaaaaaaaaagaattattatcaacagtttaaaattttgttgacagcaaacttcagtaagatattttaactcactgattttttaacatacagaaagtaaaccaaagtcgtttactcacttttatttttaatttactaaaatttgattttttatactttagaaaactgaaattgttatcaggatcaattaagttttatgtaagtcatttgtccacataatttactgactatatattctctctttttaagtttttttggaatcattctttctaccttttcatgtgcccggggtcaaataatacatgtcaaaatgttttttaagtatttttttctttcatcagttctttgtcagtgataaattttaccatgtggagttttcaaccattattagttgtattttgtgtggactgtttttgctgtaatactcacaatagaggtcaaggtgttccgggggccatggtgaggtcaaagcattccacttcgttcatttacagagcttcaattgtgacccggtttaggaacatgctgcttgcccaaaattctccacaatcctccacctccgctcttccatttaggatataaaagagggttttctcagaccttctgccaatgcgcagacagatgaaagacgacacagaggttctcatcattctgctgaggaactgaaagcgggtttcccactccaatgtcttagtttggaatcacggcttttgtcccctctccgagaatgaataatcaccaagaaaagagaggccgtggtaggtgaaggaatgcccaattcagccgaaaagaagtcaatccctcctgcctccttcagcttggagtttagggtagggagagagctttgttcgtgtacacgcggttttcattcttgtctctttcttcgaaacagagactcagttttattaggaaaacaatttgccaaacaaactaaaaggctattattcctaacttctcctgcagctaagagggaccagacaaagttcaagctgatgagctgtgagcagaaggactgagagggtctttggggagggtgcttaggtggaactgacacagctgtgcggcccctttgtccttctttcctcctcctttccctctgaaaagcagtcaccgtgggccctgagacagccttcaggatggaaaccagctatgaagatgctggggcagaaagattcatgctggctgactgccttggggggccatccaggagcagcagggagcccacctccagagctcctttattggagaaagaaataactctttctctctcttctctgtggtgctgttattctgggttttctgctatgtgtaggcaaaactaatcctaaccaagataccagcttttcattgaatctgtgtgtgaacttgaaccagacgattttttctctggaacttatttcctctacacaagaggcaggggtgtgggtgctttgtgtaattctgaagatccggagctttttcctggcccacatccatgttcacttctaattgttatagtgcctacattaccatttagggaactagccactccctgcaattccatatggttaagtgaggctaataccactttctggctgcaggggacaggacaggtgggaacagatgttggaggaaccattggtgccttgagcatgttctgtgcagggggtctcccgtgtttgccctgtctgcatcccacgtgggccccgtgtgtgtgagcattgacagtaggcacagctgctcgggaaagggtccacctgtgtcttccccaggaagacagtcccaactggaccttgattcaccatcctgcctgaccatcccctgtggaactgttagctctcagcatccacacatacacacacacgcacacgcacacgcacgctgacatcacagatggagaccatgggggtggggtaagagaagtgtcggtgggaagaggagacctataggctgcacacaggaatttaggcatgagccaagttagaggttttcccagggatgtcccttggagggcagggtggaaggagagactggtcctgtatgtgttctgctcacctgcctccccctgcaccatctcctccatgctgggcacctggatggatcattacgccagtgatttctatcagcccccacagttgccccctctcgaggtgctggggcctatctgcagctcaacatgcctgcccggacctgcagcaccgtgtccacctactcctggcccagctggagcacccagagtccactgaggcagggtctgagggtgaggaggcctggaggtaggtgcaggtgagcgtgtagggaggggatagggctggaccacacagagcagagctgccagaagctggggaggggacacagcattgataaactcaacccaattatgtggtagactgcagtctaggaagacgtcctgggagtgggacattgactgggcatctctgaaaggcagagggaaggttttgtcattggaaggcacgtggaatgtcagtcatgttgatgtttactctgaagtggggaggggagcagcccgacccctgagacctggctggacatcactgttgaggttgcagccagatttctcagcacgatgctctccacaccttctgtacatcctggggttcccttacctgcatcccctccctgagtcccctccctgattagaagactgcaaatgaccctgtgggctactgtctgcacacccccctacccaatgaccctccatagatgtacagaatttcactaaccctgcctccctacaggccctgtggaaggcctgggtgcagccagggtcccaccttggaatagacagatgtaggttcagacccagctcctccttcttaccacttatgtgactctgggcaaagccactgtgcctctcagggtctccctgagcctcctctcctgcacaatggagatcatcctggcatcgactccctagggatgtcatcaggcatgtgtgagataacacttaggaaacctgtgggctggtatcacatgtaggtaatggacaaattagacatgaaatgcatgaagggatggtaggaattatcatggaacacaactaaaaagaggcctggtttcctgccatgtgatctttgaaatgtcccattcctcctggcctcatttccctgtgtgtactattagagggctgaaatttagtaaattctgatattgtcatcctcatcagcgcttgtgacggttaaatgtttgtttacattcagacccgagtgccacgtctcagcctatgtggtaggagccacctcaatggctccaagaggttcccccacctcctggtgtacacatccttgtgtcatgtcctcccctggagtatggactgacttagtgactcacttctaaccaatagaatatagcagaagggatgagatgtcacttccaagattcagttataaaatgtccatgactagtatcttgctctttctctcctctgttctccttttctttctctgtgttgtcctctctctgtctctccctctctcagatccctgactctggggaatcagctgctgtgttatgagctgccctatggagaggctcatgtgtcctaggatatagagagggaaatggacagaggggagctcaggccatcagtcctaactgaatccttccagtaactatatgagtgggcttagcattggatccagccccactcgagcctcagttgagaccacagccccagcctcctgagagataccatggcagaagcacccagataagtcctgctggattcctgggccccagaaacaggaagatctacgtgtttgttgcaagcctctaagattgggataatgctttcatacagctgtagattactaatgcagggccatccagaatccacccctgcctttagcctccctcccctcctctacttgcaagctctctccagccacgctggccctctttctacctcctctctggccaaactcactttttcctggactttttggccattgatccttcccctggcacactggtctcggactttcacagggccggtcccaattatccttctcagtataaatttcacctcagtgaggccttttcagacctacctcccactcttgaagtgatcttcatctccccttcgtagcactgtgctttatttcaatattatgctcgcacttttcctctattttaatgattccgtccctcctcctcccctccagactgtgagctcctggaggacaagggccatgtcattcattcactgagagacccagaccatacttagccctggaacaagataagtgcttgggacctagttactgaatgagtaaatgagaggatctcaagccccttgtcccaactttcctccatctgaccagctcacactgtggagatgaatgctcacaacaggaagtgaggtctggttggtggcaagaaaatggccagaatgacccctgggtggctcctccctggctccagttgctccagcagagcactgtgggcacagcctccctggtggccagtgctagccctgcacctaagggagaaaaaccatgagcagaacacctttgttgaatgacttcaaggcatcagctctctcaggtcctagcagggcaaaggagcaacacccatgagatccggagtcattgatgggagccttaggacattttcttgttcctttactgccagcactggtactggggtccagttcactcatgaggccacatcactacagtcaggtcaatgactctgcctcagcttccaaatgaagctctcgaggctcgaacaggtggtctttgtctttgttcaaggatgacacacggtcctccaccacattcttctgtcccccaagtctcagtcctccaagctcacacacctgtctctcctgccagccctttagacctgattatattcccacagcatctcccagcccggacctacctggtcctaggtattttccagaatcagcctcctgctttgccttctctgtttacttagtctccatgattgtcctaatatgtgttacttcactctaagtctcaggggacacctctgatattgagcttttttttggtgggggggacggagtcttgcactgtcgcccaggctggagtacagtggtgtgatctcagctcactgcaacctccgactcccaggttccagtaactctcctgcctcagcctcccgagtagttgggattacaggcatgtgccaccatgtccggttaatttttgtattattagtagagacggggtttcaccatattggccaggctggtcttgaactcctgacctcaggtgatccactgcctcggcctcccaaagtgctgggattacaggtgtgagccaccgcacccagcctgataatgcttttggtaacccattggccctcccttttctggccaatctgccatcatctgctcttggttctgtgcacagccttgactgcagtcacctgcaactccgggtaacaaaccttcccagcatgctaactctgggggacccacactaaccaaggtagcccctgtacaccccatcatccccacatgggacagggttttagatatctaaaaatgtatagggaagaaaaggggtctcaccctatcttagctagaaaatgattatgaattcctgacaaattggttttaaaacgtggtttcacttttcctaaggtggcactcagcaaggagaaggccatgtttagtcgagcaccaggatcatgaagcccaagagcgagaagccagacaagttcaagtccggtatctcccaggctcttctggagctggagattaactcacacctcaaggttcagttcagggagctgaatattacagcagccaaggaaactgaagatggtggtggtgggaaagctatcataatttttgttccctttcctcaactgaaatctttccagaaaatccaagtctggctagtacgtgaattggagaaaaagtttgggggaagcatgttgtctttattgctcagaggagaattctgcctaagccaacccgaaaaagctgtacaaaaaataagcaaaagcatcccaggagccgtaccctgaaagccatgcatgactcaatccccgaggacttggtcttcccaagtgaaattgtgggcaagagaatccacgtgaaactggatggcagccgtctcataaaggctcatttggacaaagcgcagcaaaacaatgtggaacgcaacgttgaaactttttctggtgtctacatgaagctcacaggcaaggatataaatgttgaattcccagagtttcaactctaaacaaaaatgactaaataaagtgtattcacagtaaaaaaaaaaaaaaaaatgtggcttatcctgcttggtggaataagaaaagttggcagcaaaaaatataatctgcaaaattctgatacaaacaacaaagaatcatttcaacaatatgaccatatagatgcttctcttttatgtgtgtgactatcacttaaaatatggaatttaaggtaaagctaactctgctttttagggatggctggaataaggacattctgttgtttactttttttttctttttttttgagacggagtctcgctcttgttgcccaggctggggtgcagtggcacaaccttggctcacgtgattctcctgcttcaggctctggaatagctgggattacaggcatgcactaccatgcccagctaatttttgtatttttaatagagacggggtttcaccatgttgaccaggcttgcctcaaacccctgacctcaggtgatctgcctgcttcagcctcccaaagttctgagattacaagcgtgagccaccatgcccagccttgtttgcttttcaaaatgctttctaacctgaaaggaaccttagaaagcaagtggtcaaatcctcacctttcacaggtgaggcagctaaggcccaaagaaaggttgtgtcttgcctaatgtcaccaatcccttcacctatcttgcaaaatggacattatcttattcttcttgctatcttcagattccaagctggtgctttttatatacagtagtaggtgctcaattaatctaatttagaagaactgaactttatttaacactgttaacaatgtcttgagattttcttactactcgttgtaggttcacctttgtttctggtgacccatggcaaaataatatttattgagcacagtaatttgaaataaacaaggctcctttcctgacactaagcagggaggaattatgctgacaattctgattagctttctgtatcctctctgagaaacagcactctaaaaccatcttagctgggctcagaacagcccagactgtaatattatttaccagttaattggaggcaggaagccagctctgctgcccaacacacacaccagcagagacttcagaagacctttatccatcgccagaatggctgaacccaggcgctttctacggctctctttcctcttggtcagctccaagtatgagatttatgaacgttgaagaggttcccagtgctgttaaaaggtaggtcttccagaatattagtttccgtggaactaaagcttaatgacaggacttcatttacaaaacaataattatatggagcaaaaaaaccacactgatatggctgtaacttaatggtgttgtttttgttaaacacttaattttaaagtaagatggtctcaaacaaatatgtttttctgaaaaatgagcatgttggtgaatttgaccttttctctgatgatgctctaaagatctgatcttctggaagaacagaaataaaagatatcaacaaatcaccaaaaggattgtatgataattgtgaaaattgctattatccaattttgctagagtctctttaaaaatggagttaatagtggcctttcacagtttctaattcttgggtttaaaactgagaagactgtgttctttttttagctgtgtgccctgtgaaaatactgtttattgcatgacatgtgaaaaaacagctgtattcagaaaattaggatcatatctcaaaaggcaaacaaattagtacctttcttaaccaaagttatctgcatcaccaaatgcagaaaataatttgagtcttggctctccgtaaaatagtagaaaactagaaccattctagaccatagatgccttcatctattagggcttaattctatcctagagccccaggtcgggctgatagaagtttttttgtttgtttgtttgtttgtttcttttgtctcataaagttaagaataaaattggcttgcaatttacgattaaacttttgtgattatatttcatgggtgggggtacatctgtaagttttcttggtagcagttttaggatttttctctaaggggcacgtgatacacaagagcttgtggtgggtagctcacgctgccttcagattgactttgcgtcttgtcaagccttgcaggcactaattcacctaacactaagtttctattcctcaatcaaaaatataagcatcaggccagacataatggctcatgcctgaactccctgcactttgggaggctgagtgcttgagcctaggagttcaagatcagcctgcgcaacatagcaagaccctcttctcttattatattataaatataaaaatattttttcaaataactctgactcctgaagcaatttaatggatttaattttacagaaggtagatttttaacttctttattctaataaaagacaaaaaaaagcatttggaggcttaatgcaaattattttttgctactaaagtgaaagcagacctagtacatctaggtgtataatttcaccaactaacaactaaatattatctccaaaatagatattttttaaaaaatcagaatgccagatcccccattttaacaactttattgaaatataatttacattctatgtaattcccagtttaaattgtgctattcattggctttagtgcattcacagttatgcaaccaacaccacaatcagttctgaaacatttttatcaaccccaaaagaatcctcatacctattatcagttacttcccaacctcttactcctggccctaggcaaacaataatttattttctgactctctagatttaccttctctggagatattccataatggaattatacagtgtatagtctttgtgattgatttatttcacttggcataatgttttcaaggtttgtcaatattataacatggatcagcacttcctttttgtttctgagtagtattccattgtatgaatattggcacattctatttattcacacatgtgttgatggacatttccattattttcactttttggtgattataaataatgctactttgaacatttatgtctaagttttgatatgaacatctgtttttatttttcttgtgtatgtctaagggtggaattgcccttagatatagggcaattaacaattaacacccttgtgttataattgccctatatccatggcagttaaattgtcgtatatcccagggcaattaaattctatacacctagaagtactaggtctgattttgcattagtaccaaaaaaattttcattaagcctccaaatgttatttttctttcattggaataaatttttcagtttgattgcccttagatgtagggcaattataatacagaggtgttatatggtaatagtatgcttaacattttaaagaatggtcaaattgtgttccaaaacagtagagccctgtcaatgtaaaagttgaattttcgacaagagacttcctttgtgacagagctcccaggagagccattccacacctactttagcccatccagatacatctcataaggattcaaaaatttgcatcattacatttctgaaattacattcttatgcaaaaaagataacactttctctcttctctcatgtacctataaatttcatcatataaaattaaatgcaaagttaaaacttaaatatgtctacttttaaatcatggcaattaaaaagtaattccttgtgctttcaaattttttaattaagtcgaaaggtcatccattggtgcacatttttaaaaattttttatggtcttttttaatttcttgtgtctttagtgtcatatttaaaaatcactaccaaatccaatgttctgaatcatttgcttatgtttttgtctaagagttttctagtttcatgtcttacatttaggtctttgttacattttgaggtaatttttgaatatggtgttaggtaagggttcagcttcattcttttgcatatggatgtataattttcccaccaccatttgttgaaaagactgtcctttctccatagaatggtcttggcacccttgtcataaatgattttaccatgtatgtgaggatttatttctgatctctctagtttattctattggtctctatgtctgtctttaagacagtacaacactgttttgattactgtggctttgcagtaagttttggaataagaaagtgtcagtcttccagctttgttatttttcaagattgtttttgctattccaggtctcttgagattgcatataaattttaaaatgagggtttttttatttctgcaaacaatgtcattggaacttttatagggaatacattgatctatagatcaccttgtgtggtattaacatgttaacaatattaagtcctccaatctgtgaacatgggatgtggttccatttattcatgtcttcattaatttctttcagcagtattttatagttttcattatactagtctgtcatcttcttggttaaattaattcctaagtattttattatgtttgatgctattataagtggaattgttttcataatttccttttttaattgttcattattagtgtataaaatgcagctgatttttttatttgtcactttgtatcctatttgctgaattcatttattagttctaacaactgtgtgaaatctttaggaatataatatctggtcatctgcagagataattttacttcttcctttcttatttgaatgccccttttttttcttgcctaggttctctgaatatatcttctagtactatgttcattagaattggtgaaagtggacatccttgtcttgttcccaatcctagagaaaaacttttagtctttcaccattgaatatgatgtttgctggggtttttttcatatgtggcttttgttattttgaggtaatttccttctattcgtagtttgttaagtgttattaccatgaatcggttttgaattttgttaaatgccttttctgcatccattgagatgattatatgttttttccttcattctgttaatgtaatgtattacattgattgatattcatatgttgaaccatccttgccttccaagaattcattctacttggccatagtgtataatctttttagtatgctgctgaatttggtttgttagtaatttttttagtatttttgcatcaatgtgcataagagctactggtctgtagttttgttttctcatagtgtctttggttttggtatcaggactctgatgagttaggaggtgttcccttctcttcaagtttttagaaaagtttggtaaaaattgttggtagttctttaaatatttgatagaatttaccagtgaaactatcaggtccatggcttttcttaattggaaaatttttgattattgatttattccacttacaagttataggtatattcagattttctattccttcatgatttagcctttaaaatgaaaattctgatatatgctacaacatggatgaaacttgaggactttataaatgaaataagccagttacaaaagacaaatactatgtgattgcactaatatgatgtactcagcatagtcaaaatcatagaggcagaaagtagaatggttgttgccaagtgccaaggttaagggagtaataggaagttattatttaatgagtgtaggatttcagttttacaagataaaaagggttcaggagatggatggtggcgatagtgacacattatgaatgtatttaataccactgaactgtacacttgaaaatgattaagatggtaaactttacattatgtgtgttttaccacaaattttttaaattggaaaataaattaaaaggacattttaattctcagacaagtccaaaatgctgctaactctctatcctgccaatatttttgagggcaatttgaagtgattggtctcctcacactgtccaaagctgtatgattaacagagctggtgttcaccatttttttttcttttttgagatggagttgcactcttttgcccaggccggagtgcaatggtgctatcttggctcactgcaagctccgcctcccgggttcacgccattcttctgcctcagcttcccaagtagctgggactacaggcgcccgccaccgcacctggctaattttttgtgtttttagtagagacggtgtttcactgtgttagccaggatggtctcgatctcctgacctcgtgatctgcccacctcagcctcccaaagtgctgggattacaggcatgagccactgcacatggcctgttcaccatttttttctctgccttcttactcttaatttcttaaatatttccacagctactttgattctctcaacatatatatgaggttaagatttagaatttgaacttcttagaaagaattttaacaaaattatttgctacttaggaattaagtatgtaaaatatatatgttcatgtgtactttatttggcaattttaaaatattgtggtggactggataaagaaaatgtggtacatatacaccatggaatactatacagccataaaaaggaacaaaattatgtctttgcagcaacacagatggagctagaggcctttattctaagtgaattaatgcaggaacagaaagccaaatactgcatgttctcatttataagtgagagctaaatattaagtacacatggacacaaaaaagggaacaatagacccaggcctaccttgagggtggagggaaaatgaggtttgaaaaactacctgtcaggtactattcccactaactgggtgacaaaataatctgtataccaaacccccacaatacacagtttacccacataacaaatctgcacatacacaccctgaaagtaaaataaaagttggaaaaaaattatgatagaatgaatgtaatgtaaaatttaccatttcaaccatttttaagtgtatgggtcagcgacattcagtgcaatcacactgttatgcaaatagcaccacaatctttttcagaactttttatcatcccaaagtgaaattctgtgcccactaacaattaactcccctttcccccactatatccagctcttggtaaactccaggccacattctatctatgaattttcttattctaggaacttcatataagtggaatcatgcaatatttgcacttttgtgtctggcttatttcatttagcataatgttttcaaggttatccatgtggtagcatgcaccagagcctccttcttgtttaacgattaacaatatcccatcacatgtgatgatgtgtacttccacagtgaataatttagatagtcttctctacgaacacttaactgaagggcaaggcaagttattcataaaagagagtagaaatagcaacatgaaattctccctaatttaaccaaccttctaagtaaaacacaaaaaagatgaagagaaatcagcgcttatttgcttctcaaatatcaatcatatggaaaatattccaccaggtggtgcaataaaaatattggaaagaaattcctcaactatctgttgggaaatgctggaataatcaacatgacttctatcttatatttatatatatatttatattcctgggcagaaatgaaaactttatttactcaggtttgtcccttttatttaactctgcttattttgatcaactatttaatggtaataaaaagctctgcatttagcttattttccactttgtttcattgaactaatagaatatgtagtttccttttggtgttaagtggtttatgctcggcagtatgtggctcgctatgtaagtcaaagactaaggacatgttgatttgaaaagaaacatctgctcaccttagttttaaaaagatagaaaggagattaacttcacttgaggcagatggagtgctgtcccctgaggaagcttgacagcctcggtgcacagggtgggtgatggtttcacctgagatacataaataaactctcctccaatactctttttcacttgtgatagtttatttcaattaaaggaaggctttcccctgctctgtaatgagtgactcttggcatgaagcatgtgagatttctccattcattaatttggttttcaatctcagattttcaactgaaaaaaaaaaaatacataaaaagaaaatgacccagctgggcacggtggctcatgcctgtaatgccagcacttttaggaggtcgagaagggtggatcacatgaagccaggagttcgagaccagcctggccaacatggtgaaaccccatctctactaaaaatacaaaaattagccaggcctggtggcgcacgcttgtaatcccagccactcgggaggctgaggccagagaattgcttgaacctgggaggcagaagttgcagtgatccaggattgaccactacactccaacctgggtgacagagtgagactcagtctcaagaacaatgcagtctcaaaaaaaaaaaaaaaaaaagaaagaaagaaagaaagaaaatggcccttccctgtttgaatccagggttttatacagctcttcagatggtcagtctaagtgtcccacagcctgattttcttatgtttaatgcatccatagaaattttgttccctgaagcacttctcagttctgaaatgcaaaatgctggggaggagaaattaattgaaagtcatgctgtggaggacaaggtcttctttaaggtgaagaatcaagttgatccagcactgtccccagagactgagtcgtcatagatctccacttcaaatactgccctcctccctgcccacattatcccgattattactcactaatccgtgagaatgtctgggcaacttagggagtacctccactaccaaccttcatataccttattttgtttattctttagctaataagaaaacagaagggaggaatcatctcattttcttcactcaacagcattatagttagactgcaactagatacaaattctgctttcaccacttactgtgcaatttcatgtatgctacatacctctcttgtctcaggttccatataaaacagagacaataatggctttgcaaaagcaattgcaacagaagcaaaaattgaagaatgggatctaattaaactaaagagcctctgcatagcaaaagaaactatcaaaagagtgaacatacaacctacagaatgggagaaaatttttgcaatctacccatctgacaaaggtctaatatccagcatctataaggaacttaaacaaatttataaggaaaaataacaaccccattaaaaagtgggcaaaggacataaacagatatttctcaagaagacatacctatggccaacagtcatataaaaaaaactcaacatcaatgatcattagagagatgcacatctgaaccacaatgagataccatatcatactggtcagaatgactattatttaaaagccaaaaaataagagttactggctagcttgtagagaaaatgacatgcttatgcactgttggagtgtaaatgagtttaaccattgtggaagacagtgtaacagctcctcgaagtcctaaagacagagataccattagacccagcaattccattcctgggtatatacccaaagaaatataaatcattatattataaagacatatggacatgtatgtttatgatttgctatttattcacaataagaaagacatggaatcaacctaaatgcctattgatgatagactagacaaagaaaatatggtacatatacatggaatactatgcagccataaaaaaagaatgagatcatgtcctttgtagggacacaaatggagctggaggccattatccttaacaaactaacacaggaacagaaaaccaaatatggccagttcttacttgcaagtgggaacgaaatgatgagaacatatgcacacattgaggggaacaacagacactgggacctatcggagggtggagggtgggaagagagagaggatcaggaaaaataactaatggacattaggcttaatacctgggtgatgaaataacctgggtaacaaacccccatgacacacatttacttatgttacaaagctgcacatcctgcacatgtaccgctgaacttaaaagttacaaaaattaaaaaacagataataatggttttgaagattaaataataatccatgtaaagcaataatcatcatgaatatacatagtaaatagtaacttagggttctttgaatccactgattacaagttataggaagaaggcatttctcatgatatattcactagtgtaggccactgtctagcagctatcagggtgtctggtacatggtagaggttcaatagcggtgctgagtgagtcagtgaataaatgcttaaagttttatcctaagtcacttggataatattatatgtaaagtaggaacataaaagatattttgtattaaattcaggcttctttctttctttctttctatcttcctatgtctctaaccaaagttacttgtgttgtattcagatgtggaaaaatatcaaatgaggtgatatttacttagaaacttttaagtgactttatctaccagatgtcacaaaggcttagaagtcaaaaaatatctagacttatacctatattaagaaaagtattataacattctttatgaaaccagattttaaaaaatggttgttcccaacacagaaacttctataaagagagtagaaagattacaaaacctaatattttaaatgtaattcaagaaatcatttacaaattgataataacatagcctccatgcttaaattagaagtaaaatggaaactcaagaaaagaaaaataaatgaaaaccaattatatgataagttcctcaaaacctttaaaattaagaatgagaaggatggctgatgtcagtgctgttggttctcccagaaccctcctctgtcagcttaatgacctgtctctacaacatcaaatgcagttcactttggttctttaatgataacttcatatgtataaaatgtaaattattgttaaccatgagacctttataaatggtcaataggaaggctgagttttgctttggggaagctcgggccagaactgaacacaaagacagcatatctcagcttctgcacgttgcattcatcgggttcaagccatggcaaatgaaccgcttgtgacaatgaattcatttttcccatgctggatataagatggaaggcattgtgaaacatacaaacagagaaacattgatttgcgggtttgcaactgcttgaaaggatttggagaatcatactgcagggcttacttgcagttttgaaatctgaagactctcaagttggtgtgcacgatttccttagccagctgagaaactgacccacatgccgagtgcactgtgtccgcactcaacccagtgttgctattgctgtttcctattttctcttgcgtgcataatcactgctatgaagtaccagagtagctttgaaagttggtcataggccgggcacagtggctcacgcctgtaatcccagcactttgggaggccgaggcaggtggctcacctgaggtcaggagattgagaccaacctgcccaacatggcgaaaccccgtctctactaaaaatacaaaaaaaaaaaaagaaaattgccaggcgtggtggcgggtgcctgtagtcccagctacttgggaggctgaggcatgagaatggtttgaactcaggaggcggagcttgcagtgagccgagatcatgccactgcactccagcctgggtgacaaagcgagactctgtcaaaaaaaaaaaaaaaagaaggagggaaggaagggagggagggaaggagggagggaaggaaggaaggaaggaaggaaggaaggaaggaaggaaggaaggaaggaaagcaagctgggcatcaggtggcctcaggatatatccctcatgaatgtctcatgatggaactttatacattatgcacattgggcaaaattacaagatggagccatgggaatgaaaaagtgaatggagagcaaataaccctggttcctaagaagatgggagctcaagggcaagtctgtaggcaccggctaagtggggaaagtgggatatgcctctaatagacaaagttggaaaggaggaaaccaacctgatgataggcctgcccccaggtaaggagcagtcatcctaatgccaaatccctgggggatgtgacacccagggcaggacagcaatgacatcaatttccaaaggtcttgaaactttaagtgttgagggcacagtctctgacactgaccatatatgatggatgggttcctttcggtttcaggaaagttcgttttgcaggaggcagagaccagagagagagggcagggtccaacccactggagaagagcagcaggagccaggcttggtgtttaaacccctgccacatcagcagagagcaagaaaatctaggattagacaagattcagacataaaccaggaaccaggcaagaaactcaaccacatggacacagattataggtttatagagaggcctgcagctccctgggcaatggataacagtgttaggcatcaaaccccaaaccagacacctgctttcagagctaagggcctagtggacaccaggcttcattctcaccagctcagagactgggcaggaccaattctgcagaggggcaggggtggggcaggaagaggttgaaggaaaccttaggatctatgttatttctctatcaatgactcaaaaagagtccctccatttttcacagatattttaaatcctgaaatggcagggaggggaccttgcagtgatttttactcttgtggatcttggagtatcattgtttgtttcttggcaagtgacggagtcctacttagctctgttctgagacaactaattagagttggatattcagcgaagcacagaaaatatgcacaatggtcaacaaaactacccagaaatcttgagttgactttttttgttttttttctttgttatatttgtttttgtatttatgtgttcacctttgtatttctagtatcattgtcatggtaggtactcaatatgtttttattaaatgaatgaatgatgtttagccaaaattcacgatctgattattaacctttacctatgtaaccttttaataccatgacataatagattatctgttactgattaaattttagtatacatggttactatgagaaatgaaactcttacagtcaatggaatgaggcattactgtgtataattttctaaaatcttttggaaaaataataaaattgggtgcttttaagtgtatgtttaaattaaaaaataatgtatgccaggaatatttgaagatttagtattttcttttctacctggagcaagactttaaaagctttatgttatgcgggcattgattttcaaagctctgccttcaagttagaaaaaaatccctacacaaggagtatattttcattgtagaatttttaaaataaaatgaagcaagaagaatcaaagtagcagaaataatctgtaattctaatactaagagataatctatataaacattttgtctgtatagattcccccctttcatatctataattctgtctgcttgtctatctacctacctacctaccatctgcttgtcccttcaatcatatatatgtgtgtctgtgtgagtgtgtatttcattgtggatgcaaatttctgttgcaaaatgtaattctcccctccacatattcacctcataaaaaatgaggtgaataaaggaaatattaggtgggtccagtcttgtggtcagatgtgtatgtctgactcaaaatataaattaggtgttaatcttctaatatatatgctatatactgtcaaagagtgatctctggggaaaatgtgattattcattttttatttctctagaatatttactatttcatttgaaattctttcaacttttgcttgaaaaattgctttttatagaacgtttgatgccgagtctctgagggactccactgcaaaagagccacgccacttcacacttctggtctgtaggtggcagtggccaccatcctacagccgtgaaatccactgaggtcaggtttttttaaaaaaaaacaaagatcaacaggaaacctctaaaacaataaaactctgttcatcattttgcaacaatataacttacaaactcattacagttatatatcccactcttttagactattccatgttcctttccagctaaacgttgaaaattgggtaaatagtcccttaattctgtactgtcctctttcatctttctcccattttcagtagcaagagcattctgaagggcatttctaccaatttctgcaatgtgcagcatgaatgttggatgctaacaccaaatattggggcacacacttcactgcacagctggtgattaatttatttttcctagatacacgagtttcaatatccaaaactgttagacattgggaaaacaagcttgagcatgttattcttataactttaggaaaaggtgctaattactggctaacctccaaagatactgtacttcagtgaatattttatgtatattatatatatttgcatgtcctttatatatgtcctttctctataaaacatatatagtcctatctgtaataaataatatatacagaataaaaattgaattctactataaatgtgttttttgcttaataatatgtcatgaatattgatcccattgatcaaagtttaaattttgaatagctatagcacctgtttagatttgaattatattctcactctctaccacagatatgtcatgctttgccaattagtatgaagagtggcttagaatcaggactggtattgtgccttccgtagccctaatagactgataggtacattaattagtaatgcctgaattaaattagtgattaattcagtttctagtttagttctattcatacttgtgttaagtgttagatattttttaaaggaatcaagaaggtatacaagttagagagatgaattctgcataaaacaaaaatcctaaaaggttataaactatttgcattttcactcaacattttacgtgcaacagttagttctagaacacaacaggaatcttatcatgcttctggatgggaagatgctgaactgtaatctgtctctgcatttaacaataaaatttaaagtaaacctaaaagaggttcgctctgataaatgcaacatatactacctttcatatcaatgggaacatcaactagagaacactgattacactgtaggcccagcctgatgtaatttttaaaatctgaaaattccttgatacagtatttaggattcacaataaacaaaaattagtctcacaatattatcttcatatttaaaaagcatgtggttaatatcaattagtaattaatatataagtaatagactgtaaatattaaaaattataaaggtattgcactttctaactctaccctttggccatgggaattaaatacatctaaattctgtatttaaacattgaaaaaagctcagatgacttgaatctctaggttttacaaatcttttataatttttaagaaaaccagagttttacctaaactaagcagagatttccacaagtatattaattattcaatcaaaaaaaaatcagtgtaccagcccttacaagctaaaacccacttctatctaaaaatgaccagtcattggaattctctcggagaatggcaagaaactgaagcaaaataaataataaaagcaataaaaattcaagcactttggcaaaatagataattcacaaatattttacccttctagagttctgttttaaatttcatataaagtattccttttgaagaaattatatttgaaatatcaattctatttcaacaattttcattacaaaaataatttttgcataatgcagttatttttctattctatcaaatggtccaaaataccaccacaatgtttatgtatttacaatgaatattttttaacatgctattttctacaatgaatgattctcccactcttacactcattgtttgacgtggaacaagatgagcagagagacaaggggagccatcctgaaactgggctattccacagacctgctcctttgagtcttaatatcccaaatacactgccagtatcatccaaacttctaaaacagaaaataacccaagagttagcaaacagcaggaaatttcccttttgtgatttagtaaggaaaattttccacttatattagcacctgcctgagttacaatactaaatactgcacttttagttcaatggttctaatcagcaaaagctgttcaagagccatgaactttatgtatttattttttttgagactgagtctcactctgttttccaggctggagtgcaaaggcacaatcacggctcactgcaacctcactctcctgaggcctgggtgaccctcctacctcagccttccaagtagctgtttgttgttagattagatttctggtggctgagtccacagatggtcacaatgtgtggctatggctatgcgttatagcatagaaggaatagccagatggttctaatgcctaaagcttccttttttgcttgtcccttttataaagcttggttcttcaacctcactgtcaattttgtaagctaagagtaactttccgacaagtttatttacacctaagttatctaaagtcattttttgttgttttcaattgaggagtttaagtcatacagaaagtgtgaataaggcctggattgttggcaatagcatctcaggagaatgtggggattctgagacttattatctaagtaattggaggttgaaggcagtaaaaaccaggcatgagaccctgcagatttacagtacacaaggtggcaaaatagcaaatcaaattagagattttttggcacttaaaatagtatgctctttaaagacaatgttttagagtgtcatggtgaattttccaaagaacaggaagacgggtaaaaagtcaaggcctagagtttgtctaaataagtgtaagcaaagggaacagcgagctcaaatccttaaattctcttcttgagacagacaaaagtttagcatttttctatcatggtcctaacagtatctcctatgccccagggtaattaaaaattgaattcaaatttagatccaggtggcccctaattgaatttatagatcctcctggtaacttaggttaaacatatgatctggattaaaaaaaaaaaaaaaggaaaataattccaagaatgtgaacttactggaatatgcaaaggactccaagaacctcagcatttcaaacaccccctaaacttctctgtgtattcaaaaccggctcccacacataccacacgtatctgatgaaattatttatcttttcattgaagctacaattccttccttacatgagtgagccgactttcaaacaagaaccatattagcattcctacttcattgccggtaatatacaaacggggtttgaaaagcaagaagcaactactttaaatatcattgaaatacaggttgggcaccgtggctcacacctctaatcccagcactttgggagttcaaggcgggccgagcacttgaggccaggagatggagacgaggctggccaacatggagaaaccccgtctctacagaaaatacaaaaattagccgggtgtggtggtgcacgtctgtagtcccaggtactagtgaggctgaggcacaagaatcgattgagcccagggggaaggaggtcgcagtgagcagagatcactctactgcactccagcctaagcgatacagcgagactctatctcaaaaaaaaaaaaaaaaaaaaaaaaaatatatatatatatatacatatatatatatatatatatgccagagggagataaataccatgaaaatacagggaacaatatttcagaaaaatttcagggagtccagtggcctggcacctgccgggatatccctccatttcttccgctactcctaacagcaagttctaacaccaagtgagtcccttctgcttttggaggcagtgtttgctacatttgagtacactgccatgaatcatttacccatgtctccgagaggcttccagctttaagcacgaccctgggcaaaagaatcttttccagatgagtcaggaaatagtattggtcattttgcttcctgacctttatgatctagcatatccaatcatgctcaaagaatctgtaatgggtcagaagactcaatggaatccatggcattcctggataaataataataataataataataaaataaataaaaaaattcacagcgaaggcatcatagtttaaggcaaaagtatgcctttttctgctattgtcctttcactaagtggctcttagctttctactacgccttggtgaataataaacatctaactgtaaagccataattgagcatacaacttaaagagcacattataaactagtgctatcataccacacagctttgaaatttggaatactccatggtaatccatcatcaggtcaaagtgttatatgtcaaaccaggcatttgataattctcatgtcgtaaacaagttctttgaacgagtgactcacaatcccttatgcctattcctgatactctctcactactctctcaaactacctatgccctcatcattgctccctactaaaaaatactaaggagaaaataatacagtaagatcctacaaaatatacatgcaccagcctgaagttccatgcatacagtaggaactcaataaagattaattgacttgaattgaataaaactgtttgcaataactttataatttcataagctccattttctctgatagagcattatcttagtttgttttgtgctattataacagaatacctgaaactgggtaatttataaaggacaaaaatttattccctcacagttctggagtctgaggtgtccacgatcaagatgccagtagattaggtctctggttccaagattgtgttcccttgctactctctagagtgaaggaatattgtgtcttcacattgtcgaagaacagaagagagggaagccactcctataagttttttctatagctgcattaattcattcattaaaatggagtcctcatgatctaaacacctcccattaggtcccacctcccaacactgttgcactagggattaagtttcaacgtgagttttggaggtgaaaaaaacattcaaaccaccacaaacatatagaagaaaaactctttcagagggcagagttttgaaaacacccctcatccatatagcctcagagatgagtctgaatagatttatgaagactgattaatggtttggctagaaagaagaaaattggaggttggtgatgaaaagtttcggagaacagatatttgaaaggactctcagaatgagcacagatatcagcatatcagctacctagtaggaggcttattgtattgaattccactcacaatgaaagaagagcaatttgttcttgcttaatatccttatcctgggattgattatctttatttgtctctctctccatgttatcattcatggatttactaatatcacaggtcatctatgttttccagaaacactgattgctatcaagaaaaattgagtaatagatgggctccccaggggttcactagagctatcacataccatgtcatcatcctgaacagagactcttatgaaaagttggagaagttatttgaggactcagttaaagatcaactaacaacaccttgcaaagttgagatgtcctgtataatgctgcatatatcttgaataaatgaccaatatatgatattcctccaaatgggtctaaaattaagtggtacttcttggtcagaatacatggatctaaaacccaagagataaatttcacaaccacatgcaatgaaatcacattcaagagttttgcttctcattcctataactcagagcactgcttgtagagtgttttagataccaatgaaggaatccttaaaatcaaatacaaaatgcttttactgatttggaaatggaattttcctctgagtcatttcatggtactttattacagggaaatgagctagatcgttgtagttctacttggagtggttaatcctaagtaccaaggaaaaatagagatgctagctaatgggagatgggagattggagaagcatggatgaaatccaggtgatctcattggtcattttgtcatcttttcatgtctagggataagagttttttaggatgcacttccacttaaaccaagatgacctaacaaggaccagatttactctcctgcctcaacaactacaaagacaaaatatatgaaacaatagtttgtaagacattgaacattaagcaacaaggggctgtgatctctcagagacagaaaagccctatgattgctctgatttactgcctggagaaagtttgcagactgtggtgaaggaaggaagaactcaggtagggcccagcaatcttgcagagttgaggagatgtgtccggccacctgcagggaacaagacaactatttcacaggaccgaatcccggcagacaggaaagaattaacaaagagataacccacatatttgcagagccccctggtgtattcagttgagcactgatcagtgtgtgcatgtgagctacccaagactggagaaattttttaaaattaaagatttgatggccaaaattttttataaaaattgtaaacccacatgaacaaaaaagtcaataagcctcaagcaaaagaaacatggaaaagctacagctgctgttcaaaatggcattactgttccagacaaaattaaatatagacttcgctatgatcaaacaatttcatttctggttatacacctaaagaggtaaaagcagggacttgtgcagttatttgtaaacccatgttcatagcagcattaatcacaatatccaaaaggtggaagcaacccaggtcttgtccatcagtgggtgaatggataaacaaaaggtgctgtatacatacaatggaataatattcaggcttaaaatggaagaaaattctgatacatatgatgacatgctgaatatatgatgttaaatgaaataatctagtcacaaaaagaaaatgtagtatgattctacttatataaggtatttagaatagtcgaaaactaaagacagatggttgagcagaggttattagtggctgggtgagtagaaagcaagaaattattgtttaatggaatacagagtttggaaagtttggaaagataaaaaggttctgaaaatgggtggtggtgacagttgcacaacaatgtgaatgtacttaatgtcattgaatggtacacttaaaatggttagaatggaattttatgggctgggcatggtggctcacacctgtaatcccagctctttgggagtcccaggtgggtggatcacctgaggtcaggagttcgagaccagcatggccaacatagtgaaactccatctctactaaaaatataaaaattaggcaagcttggtgatggacatttgcaatcccagctactcgggaggctgaggcagaagaattgcttgaactctggaggtggaggttgcagtgagttaagatcatacaattgcatgcctgggcaacaaagtgagactctgtctcaaaaaaaaaaaaaaagaaaaagaaaaaaagaaattttatgttacatatattttttaaaggtacatgaagaaaattacaaaaagacacattaaaatcaaatttctggaaactagtgatagagaaaatcttaaaaaccaatcagagaaaaaagaatcacatgcaaaataataaacatatgttgacagtggctgcctcttccaaaacaatgcaagctataaaaccagttggacaatatcttgtaagtactgaaagaaaaaaaaagtcaacatagaattttttacccagcaaaaatatttattgaaaaatgaagataaaattaacatttttcagatatacaaaagtgttcatcaccagcagacctgcattaggagacaattttccatggttctcccacatttccatgtcttgcaagtgaagaactgagtattgtttgttccagactaaggtgttcataatgtttgtatagcagacaattttggaaggtaaagtcttagaagcattgggagataatatctccctcttgagcaaagggtaggcatgtttcctgtcctgtgtaataaagataatttcactcttcagagaaaataacaagaatttttgctgccaattataaacattttgcattacgtaaactctgggctcctcttttgtagttcaacccactgtatgcataggggtcatctggccttctttatgtctctcttggaaaattagggcttagggaactaacacgaaaatgtcgataatactgtgtctattgctaatactgtgtgtaataaactgtccaatgtacagaagtcttatgctttccacaaacacccaagaagctgtagcaggttaaattattagattaaaatattggctaacattttagagcctttacagttccagataacctgcaagaaacataaaggaactgcctcaagcagaaggaaaataataccagataaaaatgtgcatttacataaaggaatgaagaacaatcaaaatgatcaatatctgggtaattgtatagaagttttttgttattatttaaacattttaaaaaataatcaactatttgaagtaaaaaaaatgaaaacaatgtgttgtgggattcataacatgtctacagttaacatatgtcaacaatagaacaaagaggaaaggggaaaagttgaagtatgctattaaaatgttctggctgggagcaatggctcatgcttataatcccaacactttgggaggccgaggcaggtggatcacttgaggtcaggagttcaagaccaccctggccaacatggcgaaaccccatctctactaaaaatacaaaaaattagctgggcgtggtggcgcacacctgtaatcccagctacttgagaggagaattgcttgaattgaggaggtggttcttatactatatgtgaagagttataatataacttgaaggtggactgtaaaaagttaaagatgtatactaaaaaccctaaagcaactactttaataatatgacaaagagttatagctaataaaccaataaaggagataaaatgatcatgtagctgactgggagttgccaccgctactaccctgcaccaccagagaaaatcgtactgctttctactgaatgtgtatagcactcaaacttttgtaatgtcaaaccattgtctgtagtaaatatcagggtagaaatccatgaattcaaaagtagaaaaacaatggggaaaaaggttaatgaaactgaagtctgggttttttgagatcaaacttcagccagaatgatgagcaaaggaaagagaagtcacaaatttccaatatcaagcaggagaaaggtgacatcactacagattctgcaaatattaaaagtataatggagggaatactctaacaattttatgccaataaattttacaatttagagaaaatggataaatttcttgaaagatactgtgacaaagaaacttaggcacattaaaattttgaagagtttatttgagcagatagtgattcatgaattgggcagcaccaaatcactttgggctctaatgagagggaacaaggggaaaacttttataagatgtttttggaagcaagataaagaaaatatttgatggttaaagtggaaagtctctagttagaagtgagttggtggcttctgattagtttgctagcataagaacccaaggcgctggagctatctcagcccagtggcctcctaattaatttttttaacaatacaaactactaaagcacatccagaagaaagtgataacacgaatagccataaatatactaaagaaattggatttgtaattctaagtctttccacaaaggaaacttcacatccaggtagcttcactgcagaattctaccaaatatttggaaggaataatacctattctatacgaaatcttccagaaaattgaataagaagcaatccatcccaacatattctatgaggcaagcattacattgatattactcacgagcaaagatacaaaatttctaaataatttggtagctaacaaaattcaacaatatattaaaaagataatacatgttgaccaatggtagatgtatcccagtgtagcaggatgagccatagacaagaacctctcagacaccaagttgtagaaggaaagggttttattcagctgggagcatcggcagactcatgtctccaaaaaccaagctccccgagtgagcaattcctgtcccttttaagggcttacaactctaagggggtctgtgtgagagggtcgtgattgattgagcaagcagagggtatgtgactgggggctgcatgcactggtaatcagaacggaacagaacaggacagggattttcacgatgcttttccatacgatgtctgaaatctataggtaacacaagcagttaggtcaggggttgattttttaactaccaggcccagggtatagtgctgggctgtctgcctgtggattccatttctgccttttaatttttacttcttctttctttggaggcagaaattgggcataagacaatatgaagggtggtctcctcccttaccaggaatgcaagattgatttaacattcagaagtcaaaaccaaccagtaagcaagcctgctctctgccccagagaaaagacattgcctcacgcctaaatgttgcttactgccaacatacatctgagcaatggcccaagtagaaaacggccagggtcttgcgttcttggaatacccagcaagatgtacaggagcgtgagaagttcatgctggagtatcaacctgcggcttcctcccctttctctttgtttttaaaagaaaccctcctttctctttttaactaatagctccagacccagggatgaattatgtttaaaagtaaatttccattttcagtagcctttagcaaggtggtatcaaaacttattatggtgctttatcctgatggattcagaccagctgaagctaaaaaaggacccactcttttccgaccagtgaacaatagaacttgctttaaccaattgtgagcctactcatggactcattaccacttatccagagtgctggttttcaatgcttaattagcataagcaccaattccccttttcttttacttaaaaagtcctgacttttttcaatgagtgaatttctttactggcaatatattactttgctttgcaagttaacaaaatcagctctgttttgtttggttggttggtcagttggtttgtttgatctctactgatactggtttaaatcttcaacaatcatgatttgtcaagataaacatggcaatccctttcctgtctagtcagatactttctcagcctcttgtagttttagccaacaaacaaccacaaacaaataacgggggactcagttgggaaatttgtgttcatggggtctttttttttttgccccctgatataagaaaaactgttttcccacgctcatcttccaattgtaaggcaatgtcatgagggcaaaaagccaataaaccaaggaagagagagtgtggaaggacagagaaaacctgcgtctttgatgtcattttcaaaattccaagttagccatgaggcaaagctaaagaacagcttaataaaaacttggaccttggaattgaggtgttattagtgacagtccctaaaataaagaaatgaatgagtgaaggaggtatatcaggacagtgagaactcaaacattccaggctcagaatattggcaaatgttccttgatcctgtgtctttcagtgaagtcccacaagagaggttgaaagttcaaatggaggtgcctggcctgaaagaaactgcagctttgctaaaagagatattcatcgtaatctgttgcatgaatttaactgagttgtcccatcattgtaatcttgttgggttggaacagccaacttctatacccaacatctaaacaagcaccagcacagaagttatgggtttaatagcaaatattattgacaagtttgagactcacccctttttgaaaatgtcttcattaaacgtgcttggaaggataaaaggaatacgctcgccagaaaaatgcagttaagcttagcatctcctaagtagaggatagtatttcaaattgctgcagtgcagagaccatttaactctagaagaatgagtagcctcaagactagtgcttaggaaactcattggacttaaaaactgtgtgtagacaaaatctttgattatgataattaggacatgaaattgattagaaacaaatagaaaaacgttaaatttttgagagaactgtattgtgacaaaaacgtgaggcctggctgcagttagtttatgactattcaactttttagtctcagaacttacaccaagtagaatgggatcataaatgcattgcatccaccgtgaattacctcctaccaatacaggtctgtctctgaagggccatggaaaataatgggaaagaattttcctaaagagcagaaaccaacattgacaaatgagattggcccattggggaagctattacattgcaaagggtatttaatataggcaggactggagctaaggtgaggtggatgaggcactcatctggggcacaaagttcaagcaggtgctaaaacactcggtaattaagataagtaatattttaatgcaatatttagaaaatctaagtgactgcaaaaaatctatgatgaacagaatatcaaaattttatatatgcatcgtattactgatttattttattttattttattgagacggagtctcgctctgtcacccaggctggagtgcaatggcatgatctcagctcactacaacctccacctcccaggttcaagcgtttctcctgcctcagcctcccgagtagctgggattacaggcacccgccaactcgcctggctaatttttgtatttttagtagagacggggtttcaccatgttggccaggctggccttgaactcctgacctcaagtgatctgcccacctcagcctcccaaagtgctgggattacaggcgtgagccactgcgcccagcccgtattactgatttttatttccccctttggccttaggttccaatatggctcagcaggcactgctatagttgttttcttttttttttttttttttttttttgagacggagtctcgctctgtcgcccaggctggagtgcagtggcgcaatctcggctcactgcaagctccgattcccgggttcacgccattctcctgcctcagcctcccgagtagctgggactacaggcgcccgccaccgcgcccggctatttttttgtctttttagtagagacggggtttcaccttgttagccaggatggtctcgatctgctgacctcatgatccacctgcctcggcctcccaaagtgctgggattacaggcgtgagccaccgcgcccggcctatagttgttttctacttccccttttccccaaaacttcactgtggatttctaattttctccctcactgtattttaagtgtgtttgcagtgttgggaagaaggatacattctcatttactcccttagtatcttcaatggggtctaagaattaaataaccttaagacaggttaacaggagaaatgcacgcaagtgttgttaatctttacatgtacagggcgccttacacaaaacagtgaagctcctaagaaatggccagagtagaaagcttttttaccttttgtttttagtagaaataataaatttgtgaaatggtgacaaagaagtttgggctaggggtagcaaattgtggggaagtcaagggaaaggagggtgtaaagctagcggaagttaagggtgattttaggaagtttatttgtacagatctattgcagatcaattcccagtctctagtgataagggttattttctcatcctggtacaggaaaggcatctttctcagaagaatttttagggcttacaacaggcaagaaggggcaagtctgacagccttttctgcaagtgttttttctctagtattttcagctctaaataagcagtaagccaaatctgcatattttggggtggcatgtccttaactctttccatgtcagacaaattggtcttttagttacaggtcaccacacataagaagccaaatccagacttgcttatcaccagtgatatagggcttcaagctgaatgtagaaactggatgagatttgggggtttattctctagggccaggggtaaatgcatatttattttggaggattgatataatcctccaaataaatataatatatcacattatattcccatataatgtgatatatgggaaaaaaagtgtatgcaaatgatgcatagtgaaagaggaagacaccagtggatgcttaatcaagtagcaccttcttaagcccatttctccctattaggacacattcccttttgctacctatgtagtctttccttctctgcctctcctatgggtagatgcagtcatgtgacccaatcctaacgcgaaaaattcaggaagtctgaagggtggatgaaaaggaggcttctgaaagttgtttttcttctcagtaaaaggaaagctagtttcttcccatcttctaatcctgcctgtgaggaaaattaatgtctggagctgcagcaaatatcctggattcatgaagaaacaagcatgaagatgaaattcaaaacgccaatgatggcgaaatagaaggatagaaaaagcctggatccttcctgacatctgtagcagacgctgctgatgcccagccatttatctagccagtgaatccatccttcagtgaaagtgtcaaacaagggtgagaggaatgcagaacaggtggtagggagagaaaatgattggggtcagttgcagtattgggaccctcttccctcctcttgtaagattcccagaaattgtcatcagccagaatcctggaaaatctatgcttgaaatggagtgaagtgaatatgagaagggagtagatgggactggtccaaaggacagaacaatattagacactgttggtaccagcacaggccccccttatcagaccaagtcaccatccctgtgctgttgtgagtgctagctgctcatagctcacaacagcatccttctcctgaaaatcctatgggctcacctagaaatggctggaaggttgcagcccatagccaatggctgactgatagaaggcaggagcctggcttcttgcccaagagagaaaaatttcatgacaccatccacactctagagctctccatggagatcagcctgaagctcctgaacccactttatcacctattgctttccttgccctattctgctttcctcatccccttacctttcacctgagagctcgctctgaataatcacacaatctttgtttctaagaagcccaacccaagaccacatcaccgcgtcccatttaacattacgttcctcttctgcaggacctcttgttagataaacaatagaagacatcacctttaacacaccttttggtttttcctaactaatatagcagtgggtaagaaattatactaaataccatttaggaccttctaatcatttcagaaatgaggactatagattttacccatgttagttcgttctgggttgctataaaggaatatccgaggctgggtaaatgtataaagaaaagagatttatttttggctcaaggttctgcagactgtacaaaaagcatactgccagcatctgcttttggtgaagaactcaggaagcttccaatcacagaggaaggtgaaaggggaacagactcgtcacatggtgagagaggaagcaagagagatgctatgcttttttgaaaaaccagctatcacatgcactaactcatgactgcagggagggcaccaagccattcatgagggatccacccccatgacccaaacacctcccacgaggcttcacttccaacatttgggttcacatttcaacatgagatttagagaggacaaacatccaagctatgtcactacccatggttccttcttcattagcttatacaaataagtattaacaataattttactttgtataacctttccacaactattatacatagtgatggttagtgatgctgaaatttgatattattccataaatgtaacaggaaaacaatcattttctctcttttggtagtagcatcacaattttcctgttgggaatcactcctctacattcagtgcctgtgaactggtatcctgatcttgccctcagctcatgccaggcatgtgagccaggcctcacccacccctctagccacaataatcatatcagaaataggaatgaaacgcaagttgcaaccattgagaatcaggcttaagggttttgctgacacaattaaaaaggaggtgctattctccctctggcgttggagacagccttggagaaagcccaaatgtgctgcagatcaccatatagaaggagtaggttgggaatggcactaacacagaaaagagcatctctccaagatgaagagagaaagagcaaaagcaaatctggacattcttggagtccctcgtttcatctctacgcaaagccaaatttatgccctgactattcatttgcatgaaagaatctattttgattaaatccctttgatttgggtttggagttacttgaaatctgagtcctgactggagaggaaatgcagcatccacatattccccatgaatagacatagaggtgcactactcatgagtggctgctacagtcatcccatagaagaatgggccctaatgtattgaaataagccacaattattggatgtttatgttatttcttacttatttatatctgagaaatcttttttatttttatttgtttgtttatttatttttgaaacagagtctcactctgtcgcccaggctagagtgcagtggcacaatctcagctcactgcaacctctgcctctccacctcctgggttcaagcaattcttctgcctcagcctcccgagtagctgaggctacaggcacccaccatcacacccagctaattttcgtatttttagtagagacagagtttcaccatgttggccaggatggtctcaaacttcttgacctcaggtgatctgcccgcctcaggctcccaaagtgctgggattacaagcgtgagccatcgcatgaacaattttcgatggctatcaccccacatacatttttgaacaattccctaatttcctgggatgaattcctaggaattaattttggaaataaatgatgtgcatacttcttagaattttgatacacgctgctttgttttcttcaaggtgactaaaacggaagcactaaaatcttccattccaaattctaaaattattaacagcataattggaaaaagtgcacaaaatctgctctgctagctgacgtatatttttaaaaagctcttggactcaaattgaagaaggtaaaaatggtgaacaatctcaggactgcgcctgatgcagggcattgagaaaagcttctttcttcttctcgaaataaaattctgatgagtcattttcttctaaaattccatactccatcccactggccactttgaaattcctcaaaaactagaacacgggttttcacaccctgtgttttgttttgttttgtttttgttttttgcttgaaagaaggggcgggtagcagggttcttgcttggcttggcatttacatgttcacacgaagtcgtaaaagagtaaaacatgtgacagactttccaagagtgggtgggaatttgggcagttgtgaaacttctggtgaaatgtgacagccagaaagaaggctggtctctggagtatgatgcgtcttttcatggataacatggaaagttttgtgggggagttcaaaactcagcccaggtccaaataagcaaagaaataaaacaggcttatccaaagctgaaataaaactatgtctagaaaagaactttgctaaaggagtcctcaagcctcccaagcagctaggagtacaggtgcatgtcacttctttttttttattttattttattttattattattattatactttaagttttagggtacatgtgcacaatgtgcaggtttgttacatatgtatacatgtgccatgttggtgtgctgcacccattaactcgtcatttagcattaggtatatctcctaatgctatccctcccctctccccccaccccacaacagtccccagtgtgtgatgttccccttcctgtgtccatgtgttctcattgttcaattcccaagtaaatgattccatggtgaaagacaagaaaagaacttcaataggatgaggtggtctcataccaaccaaagcttgcataccaacattgccaggtgggtgagaattgcattcattcctaacctcttgaggcttcagcatcccaagactagatggtagaaaatctcagtagctctccaggcaaagctggccggggcagtggggacaggggattcagaacgctcacccacgatgtctgaaaagcatccagagagatcacaatgctttgacttctgatataaccttttggggtgtttacgtacttttacatgcttcaaggaataaaatgtctaaatggaattctaaaaaaaaaaaaaaagaaaagaaaagaactttgcatatggttatggtcctctagaaatgtttggaagcagaaagctagaacactattaagacattttttaaaagaaaaagaaaaaaactggaaaaaacgttttaaaatagatttttaaattaaaatatagcatatatatacaaaaatgcacaaatgatcattgtaagcttgttgaagtttagcaaagttaaaattcctgtataaccagcacccagaggaagaaaaagaacatttccctggatcacagatttccccatgcccacgtttatatatgtgaaataaataaacataaaaacccgaaacacctcagcccagaatttctttctagctcttctaaaccactagtcagcaagctatatgacttcaagatggctgcccgtttttataaagaaactgatagtgacacacagccatgccattcatttacatatcgtctatggctgctttcgcactgcaatagtagggctgagcagcttagacggagaccagatggccgcaaagcctaatttgctatctggccctttatagaaagactcgactgacccctgattcaaacagcagagaaaagtaagggaaaaatgagagagagccattctgtggttcaaatgtgaaagttcaaaagttctagaactttcaaagttgctctatagcctagagtagttgtgatattaggacacgggcccactcagaattgtatcgttgagtgcaggagcgatagacctttagctattaaaataatgctctgctactccaaagtctgtttacagaatgttatcaatgacttctcaagctttagaaatcacacgttcattcaaggcccacttcacctaaacttgctagaggtacaaaaccctttactcaagatgtctacctccatactttcatgtaattactctcacaactctggttcactaaaagaaggtttgaaagttctgatttttcccaaacacaaataccctccaagcagccccttaagggggagatgaagagctgattatttttaaattaaggaaaagtcattaccttttcttacctcagcagagtttttcatatgttattttatttattattattatttttttttgaggcagagtttcactcttgttgcccaggctgtagtgcaatggcgcaatctcggctcactgcaacatgtgcctcccgggttcaggcgattctcctgcctcagcctccagagtagctgggattacaggcacccatgttctaaaattacctccttaatttaaaaatatggcaagctgtactgagatgatctgagtaactccccccaccatacatcaggctttgataatctagaaacccaggggaaataaataacgtcaatatctgctagagtctgaatgtttgtgtctttcaaaattcagacgaggaagcctaatccccagtgtgatggtatttggaagtagggcctttgggaggtgattagaccatgaaggtagagtcctcacgaatgacataatgtccttatggtagaggagacctcagagagcttcttcaccccttccaccatgtgaagacacagtgagaagatggctgtctatgaaccaggaagtggaccctcactagacactgaatctgctgacacgttgaacttggacgtcccagcctccaggactacgagaaatacatttctgttgtttaagccacgcagtctgtggtatcctgttttagcctcttaaacaaactaagacaatatggcaggtattaacacaattattagaagatgacagccttctaaaatgtgatcttgctatcaaaatttgtctattatgtgaaatatacaatactttgaaatgaaaaaaaatcttttaccgcagaatagcatttcatttgccagtaataattccaatggatgataacttttcatacaattcactaactttcttcatagaaaatatattttatgtcaaaggttttgggagagtctcagggtatgcctaaagtccacacagaatgtatttaaaatatcacatgagatattttcagcaaggaaaggaatcatctttcaaagcaatataaatacattcaacatggaatattcaaaaaatatagtaaaccatatatgaatttcttcctcaattctaattgggctaaccataaccttactcctttcactgctttttctccaggtagaatactgtgtacatggcaaaaagcaaaatgctaatttaggcatttccccaggtttcctatctcatcacctctcattacccttcaatgcccttcatgtggatgtttctcgctcactgcttccctcacttcctgagcacatatgatattgtgacagtggaaaagatatagcccctctcaagtagtccacaatgacagaggaagatataaacaagtaattgtagtacaatgaaataagtactttggtacagatttggacaaagtgccatgaaatcattagagaaacactaacttctcctgcaagggtcttgaaagatgtcgcccaggaagtgatattaggagagccacagaaggtaagtaggataaggaggaattcagcaagcacagggagggtaccagagatagggtgggggtaagatcctataggaaaaggacttaggtgtgtggtaaagacacagagaaatagagggtgatgtatttagggaatgctaacaatttggtttgcaggcatacctcattttatcatgcttcactttattgcacgttgcagatattatgggtttttacaaattgcagatttgtggcaaccctgtgtcgaacatctatcagtgagatttttcccacagcatgtgctcacttcgtgtctctgtgtcagcattcgtaactctttattgtgatattcgctttacctaaatatttgcttttttgtggtggtctggaacctggaactgaactctcgatatctctaaggtatgctgtacttcctaaaagaataaatttttgcattgtgctttaaaattggtctattagaactacttgtttattatgcctaaaaagaatctgcaaagagaaaaaggatagaaaatgaagactccaaaaaaaatcacataacttttattgcaattgattttattttaccaagaccaaagaagtcatagtatagttaactataacaagattggtggcaattcctcttcctataaaaaatactttttagaaccagaagtaatcaaacacagttttccattgcaaatattctaaatgtaaattactataacaaacctttatatctcaacattataaatcagtagtcctcagaataattagattaaatatctgaatattctagaaaagtatcagcagtccataattcaaatttatgatggcaagatctagaatgattacaaatttaaatgaaaatgtgaggtataggctgggcgcagtggcttactcctataatcccagcactttgggatgccaaggtgggtggatcgtttgagctcaggaatttgagatcagcctggggaatttagacagaccttgtctctactaaaaatttaaaaaaattaaaaaaaaaaaacagccgggcgtggtggtgcgcacctgtagtcccagctacttggggggctgagatgggagaatcatttgagcccaggaggatgaggctgctgtgagccatgattgtgccactacattccagcctgggtgacagcgacgccctgcctctatttttaaaaaatgggatatgcaaatattctgatatgccaagcctccattcatctttgaggctaagaagtgaagcctattgcctggttatcaggaaaaagacagtgcagtggttcagtctaagctctggagtctgattgcccaggcccaacacttgctaatcatgtgatcctggtgatattacttattcttgctaaaccccgtttcattctgtataagatacataacagtacaatatctgcctaacaagcctggcaattaaatgatataggctcatgaaactcaacagtgttctccaaaaatgtgaattgtgattaatattgttattaccagtgctaggtggcatggagaatgtacagaaacaaaaagcccagctttcctcaatagagagtgtacagagttagaagctatggatgaaatgacatataacagcagtatttaaaactaagtgggctgggcatggtggctcacacctgtaatcccagcactttgggaggccaaggcaggaggattgcctgattgccaaggcaggagttggagactagcctgggcaaaatagagagatcccatctctacaaaaaatttaaaaatcagtagctgtagtcccagctacttgggaggctgagatgggaggattgcttgagcccaggagtttgaggctgcagtaagccatgatagcactactgctcttcactcttggcaacaaagcaagatactgtctaaaaaaaggaaaaaaaaagtaaccttaagcaaaggagagttagcaagggaaactgaggtgaatgcagccgaaggaataccaggaggcaaaacagaaaacctgagcgggcaaagaaaagaagaatggggccaatgcatagaataaataaataatatgcaattcttataatgtaatagagaacataaaaaattaaagaagctactctatgcagtgaaaaattagcatctttgcatcctagtgcacaaagcattaaaactatcagaacgatttaatctgtaaaacttgaagctgcaaatgtggatatccaagggtacttacctagtgtaattgttgagaagactcagaagctgctgggacctgaagtatccctagaaataatacattccttttatatgttgaaaatagtattatctgttagaaaaaaaggatagaaactttttcctgaagttggttaccatgatgttcacatacaaaaactagactgaaacattcatttgcactcaaggaaaaatgtttcacaggcattggttgaagtgatatttttcctgatctgtcacaaaccagaaactcccagtgtactgagattgttaatatgatgtaaattaagcacttaatggattacgtttcagtgataatcatgtaaaaccattgatttagtccaggaattgagggataatttgaagcattatgttccagcaatcacatcaataacgaccaaagtctgggggacagtggcatgtacatttctgttaaagacagtgtctaggccaggtgcagtgactcacacctgtaatcccagcactttgggaggccgaggtgggaggatcacctgaggtcaggagttccagaccagcctggccaacatgacaaaactccatctctactaataatacaaaaaaattagccaggcatgctgtcgcatacctgtactcacagctactcaggaagctgagacacaaggatcgcatgaacccgggcagcagaggttgcaatgaaccaagatggcaccactgcactccagcctgggcaatagagcaagattccgtctcaatttaaaaaaaaaaaaaaaaagacagtgtctaactgaagaacattatgtcctctgcttttcctactcatccagcggattcacagtttttggtttgaacactgaagaatagaaatacttctatagcaccagagtatcggcaaatcctcatcttttctttagtaatgtgtcaagcatttgcaagctggtgaagtggattacgaggctgcaatcacaccactggaatctaatgaataacacttttcaaaatcttaagttctttttaaaaaaaacaggtttagcgagatataacttatatactatataattcacccatttaaagtgtacaattcaatagcttttattatattcataaagttgtgcaaccaccaccacaaccaattttagaacttttttttttttttgagacagaatttcgctcttgttgcccaggctggagtgcaatggtgcaatcttggctcactgcaacctctgcctcccgggttcaagcgattctcctgcctcagcctcccaagtagctgggattacaggtgtgcaccaccacgctcagctaattttttgtatttagtagagacggggtttcatcatgttggtctccaactcctgacctcaggtgatccacctgcctcagcctcccaaagtgctaggcttacaggcatgagtcaccatacccggccaattttagaacatttttatcaccccagaataaacctgtacacattagccgtcactccccatttccccacaacctctcccagaccctggcaaccacccatctactttctgctgtgtggatttccctattctgtacgttttatagaaatggagtcacagaatatgtggaaccttcttggttttttttgtttgtttgtttgttttttcttgagatggagtctcgctctgtttcccaggctggagtgcagtggtgggatctcagctaatggcaaccttcgctttccaggttcaagcgattctccttcctcagcttcctgagtagctgggactacaagcgtgtgccaccactcccggctaatttttgtatttttagtagagacggggtttcactgtgttggccaggctggtctcgaactcctgacctgaggtgacccaacccgcctcagcctcccgaagtgttgttttaagtgtaggggtagggaaacaattgtctgcttttctattattgtaagtttcttttcttataatatttagaatccttttgtccctaaatagtatctttgtaattcttatcacaggtggaaacagaaaagaggatggtcccaagttttccatggtgttttccacctggtgtcttggtacaaatgctctgtgctgacactgttggggatgggagggcatgtgaaatccatctgctcttgtcaggcagccaatgctaactgtggggtcccagcaaactaagtcacccatcaaagtaatctggagtacagaagtcagaaatctaaggctaaactgaaagtccatgagaaagagttgggagtgaaacattcgagtaattagttcaaacatcaaatagaagtagacaatagcaagattgaagtcagggtatggtgtctagtgtttaaagttagacagaaatcagatcagaatatgagtaggtaagaaacaagcacttaatgtaaatgacgttagtgaaaggcctttaatattagaaacatcgggcaggacgtggtgtctcatgcttgtaatcccagcaccatgggagacggaggtggaggcgggtggatcacttgaggtcaggagtttgagaccagcttggccaacatggtgaaaccccatctctactaaaaatacacaccacaaaaaaattagctaggcatggcggcacatacctgtagtcccagttacttgggcggggaggctgaggcaggagaatcacttgaatccaggaggcggaggttgcagtgagcccagatcaagccactgctctccagcctgggccacagagcaagactccatccccctccccgctccaaaaaaattcagaacataggtagtgcattgaaagacactgaatgaccaattattctttgcgctgattctttgcgttcttggaggatgggtagacattgttgattgccttcaaaatagccatttcctcctttccctgcatcactccgacatcccctcctccattctggctaagtataggactgaaaatgctgtgtattctatttccattccttcttccagtttgtgctaagagtgagatctaactgtggcccatgtgacctggtgggagattgctgggagacttattagattgggttttctccctagtttaaaaaaaaaaaaaaaagatcttatataattaacctttgttttgtaagacattgtctttgtctgattcctgaagtgtaacaactgtcttgaaaccaggaagggacaagtcaaatgacagcaaaattagaatatagaatacacccaagtccctgataccaatatggcacttctgatttaaacaaccataggatgccttatcttcacttttaaaaatgtgagttttaactactttcaataacgttcaataatgtactctgatcctttttttttttttttgagatgaagtttcactcttgttgcctgggctggagtgcaatggcatgatctcggctcactgcaacctccgcctcccaggttcaagcgattctcccgcctcagcctcctgagtagctgggattacactcagatactttttataggaagcatcctaaaattatatgctgaaactaatatactgctttcagaagatcgttacttatgaatcttaattacaatggaaaggacacagttgtacttttagtgtgatggaattaccatcacaattaaccattggaattaccatccaattaccacttgggtttctgatctggaacatccttctaatgaatgttgcatttggtcaatattccaagagctaaagatagtattgtgtactaagagatcttaagagctgagggcgacacgcagtgttacttggcagtgaatgcttcctcagaaacagtgaaatcatggaaacgtcaggggcgtttgaactagagcaactccatcttgaataggggctggggaaaataaggctgaggcctcctgcgctgcattcccagaggcattcttagtcacaggatgagataggtcagcacaagatacaggtcacaaaagccctgctgataaaacaagacacagtaaagaagccagccaaaacccaccaaagccaagacggcaataaaagtgacctctgatcatcctcattgctcattatacactaattataatgcatcagcatgctcaaagacactcccaccagtgccatgactatttacaaatgtcatggcaacgtccagaagttaccctatatggtctaaaaggaggaggaactctcagttccaggaattgcctgccctttcccggaaaactcatgaataatccaacccttgtttagcataagcatatcatcaataaataactataagtatattcactcaagccgcccatgccactgctctgcctatggagaagcgattctttattcctttactttcctagtaaactttctttcactttgctctgtggactcgcccagaattctttcttgcgtgaggttcaaaaaccaccccttggggtctgaatcggaaccccttttggataacagaaacatcaaggcacagtgcccaaaatgggcagtatatgaaggaccatataagttcctcgaggttgggagggggtgcagggaaggaggttgattttctttgagatatgggttatacacctggcttctatctgtagtgctttggtttgatttatagctgagctcattgaccaggaccttgtctatatgacatctcaatttcccttaatctatttcagtaaagattcaaaggcaagacttggctggaaaccaaaacacatcattttgattagggttttgggttcagcaaaggctacaagcagggcctgtaactccttatgatcgacacattgtgatattgcccagaagcagttttgatggctcttgaaccagaactctgctttcctttttaaattaaaatgatacagatgatacagttttgctgcctggtggtcctgccccttttggaaagtgatcaggtcttatacggagcaactctactatactcctgtcttcatcccctatctccacattaaggaagatcaagaatcagaaagggtgtatacattcccttcaagcaattacctctatcttcaagcaagagtctgctcagcaaaagcctcttcggaccaccccagctaactgcagggtacctctacctaagcccagaacgaactactggactgtcaatggtcctggccacaactttgctcctgtaggaaagtgagaaaatggaaagtcagatcctgaggccagagctgcaaataacacagtgtgggatggataagtagccaaattaccataaggcaagttgctaagtgctgtgatagatgatcaaagagaagaaagtagggaaccccagagaagatggagatgggagataattttcaagtctacatttaggaaggaatattagagctgatagtaaattccacaggaggttgccctggggtgtagggatagggaaggctttttaagcaagggaagccaggagtacacataaaatcaggaataccagcatgtatgcattgtacttaggacacagtgagtaccttagataaagacagtatactttatactcaagtgtacttttatattcaggaatggaaacagaaagatggtggtggggaatgcagaaaggtaagatggaaagataaattgaagatctattatgaaggctttgactggcataccctggaaaatggcctggaaactattgaatgtttctaatctggtcaaataattaggtccctcccagatcacatgcctacagaggctggacacttaatgtaaattatgaagaggcccccaagtggagatggtgatgaattatgcccgtttaaaagggtttgtgctacccagctgcaggggatttttaccatttgaaaagacaaaccaatgtccccagatctttaaattgttaaaaagaagtcaggaagccaactacaccaaactcccaatttctaaatgttgacagctaatttaaaaccaaagtgagtacattctgttggccaaacaacacatttctataagctggatttgtctggatctgaaagcttctggattttcactcagccctaaacaatgctgcaaagtagataaattatgtgtgtgtgtgtgtgtgagagagagagaaagagagacagagagagaaagagagagggagagagagggagagtccatttttatggtttcatcacgttgaatttttaaatgagatttgaaaacccaacgtatttaaagggtcaattaatggcaacacagctcaggagacaggctgcacataatggctctgtggttagaagtctagccctaggactgaaaccgatttattcagtgaccttgaataaggtcattaaccatgagttggcttcagcatctgtctctaacacatccaaggtagcaactgccaagctgctaggagaagagctcactgaagagatttaaacacttagctccctcccaaaaacgtgttttcaagaactcacaatcatctctgtcatttgtttcatttaaacagttctcatgaattttgccaagattatcagcacactataataacgtctgaaaacgacacttattaaacactatcagctgaatgtaagctttcacagcattgtaaaacaaacaaacaaaaaaacccaatacttgttttataaattatgacatacgttttccaggaaaaaatatctctatttgtttccagtcaatatatttttttcaaccccttaggctcttaaactaactcccttttaaaagcacagtagaaaaataaaaatgtattcaatattttcagcctcgttcttcataagcaaataaattgagaggagaactaatatttacttctcttcttatccactcaggtggctgcatttgagattttgaatatgaattatctatatatatatccgatcctgcagtcaaagcgatgaagaacgctcatttgcattataatttttagcaagacatatttagttaactataatggacttctttgtattttgataccaaagcatatttaatattcccatgttgtatttgtcaaacctaaatgtgtgctgcacagatatgcaaaataattataattttaaccgtttcagttcaactaatatatttcatatattccaaaattactacatagcatatgctaccatatttcctctatttatttgtatacaattcttcttctctcttgatatggtttttcagtctttagtaacgccttcaatctcatccaacttattactggcattaaaaaataatccttgtgcttctcatttgcaaactttgtgatatttcttcaacattataaattaattgactgctcttcttaaacacctttagcattggcaagaagcagtggctcatgcccgtaatgacagcgctttgggaggtcaaggccaggggatcacttgaggctaggagttcaagaccagcctgggcaataagcaagacacttgtttttacaaaaactcaaatcgttagccaggtgtggtagcatgtgcctatagttctacctactcaggaggctgaggcaggaagattgcttgaacccaagagctcaaggctgcagtgagctgtgacattgcactctagcctcggtgacagtgtctcttagaagaaagaatacacagccttgatcttacaaaatcaatgtacacatttcatttttgtgcattgtaagtatggtgacatattccccacttcactcccactgcttccccctaccccttcctctttagcgagagaccacctgctccaacaatttcacccatgttttgctacattcttatttgcattcttttcttggcatctcctgcgtcatatagagctgattctattggcatctgagtgcatttctcaccctctaccctcctacatgcagctcgccggctactctgtccaagcccatcttctgactgcgctctttgtcttcctcacccactcccaaactccatcccttgttttttattgacctttatgctcggagctgcctcccacgaacattcataaacctccttaccacagtctcccaaatcatttccccagaaggctttctagtcttgtaagcgttcctatttgtgtcggcatgctatactcttagctgtttctgctcatgtacagcaattctcttttcttccttgaaagatttcatctgaaaccttattattttctgaattccttttttgaacaggaatagtcagggaattcacagcaatataggttaaataaacacacctaacatttactttgaagtaaataaggccaacatgagcgggagtcatactcttgcctgatggtcaaagggaacagtgatagcagaaccaaaattgttcctcgcatgtgggaaattacatctttgttatggtattttcataagcactacttgccgggtgcagtggctcacgcctgtaattccaacgctttgggaggccaaggcaggaggattgcttgagcccaggagtttaagatcagcctgggcatcatagtgagaccccttctccacacacacacacacacacacacacacacacaaacacattaaaaattagctgggcatggtggcacatgcctgtagtcccagctacttgagaggccaaggtggaatgactgctgatcactccactgaactccagcctgagccagactttgtctcaaaaataaataaataaatagtaacagtaagcgctactatcaggaaatttgaacttttttataaaagtgccaggtcaacattctgaaagtctttttaaaactgtgtttaagcataacgcttcctgattcttagactccttcagttgtttcgctttgtatggtatatgagacttgagggtccaggcacggtggctcacgcctgtaatcccagcactttgggaggccaaggtgggtggatcgcctgaggtcaggagtttgagaccagcctgaccaacatggtaaagccccgtctctactacaaatacaaaaattagccgggcgtggtggcccgtgcctgtagtcccagctactcgggaggctgaggcaggagaatcactcgaacctggtaggcggaggttgcagtgaacaaagatcgcgccactgcactccagcctgggtgacagagcaagattctgtctcaaaagaaaaaaaaaagacttgaaagaaattgtatgtctttaaatctttttgaaagcagacactattatatatttttcaactagagcaactagcaaactagcttttggaggacctctttgtcatccacttgttgcaggcttctatacagtttccaaaatctgaaattctgtatctgtctttgttcattgtgatcagatataaactaaaggcaaaaataacagcaatcaatagtaattataagctttggactccttgtaaatgaaggtcagaggacagactgccaaactcctcttgggaatgatggctcccagtctgggaaaagaccgacactaaataaattgttccctgccttgcccaagggctcaaaaagtgccttttgtcctgaactgtaaaagtagtgaggagaaaatgtggaggtttaagctcctcattcagtctcctccaaccattccatcaagcgggacatcctctctctctaaacttctattgcacttagatttttggccactgaactttcttggggtcaaccatatcgtcttttctctctctgtgtatttgttttcctgctaccttcttatatagaattgctggaggtaggggccataagaatatattagcttttcttgtcagttcaccattagtacaatgcaaatgggagatatatcaattcatttaaggcatacccactatgcgccaggcactgcgtggggtcctagagatataatagtaaataagacactgccctatcctcagaggtatgaaatctagaggagagagacaggcaagcaaataggcaaacactttgaaatatgtgtaaaggccaccataatacttcctttttgccctctgaaggttcactgaaaatcagctgacaaaagtcgaattaataggagaggccaggcgtggtggctcatgcctgtaataccagcctggacaacatggcaagaccccatctctacaaaaaaaaagttacaaaatttagctgggcaggctgggtgtggcggctcacgcctgtaattccagcactttggaggccaaggcaggtggatcacgaggtcaggagttggagaccagcctgaccaacatggcgaaaccctgtctttacaaaatatacaaaaagtagctgggcatggtggcacgtgcctgtaatcccagctactcaggaggctaaggcaggagaattgcttgaacctgggaagcagaggttgcagtgtgctgagatcgtgccactgcactccagcctgggtgacagagtgagactcagtctcaaaaaaaaaaaaaaaaatttagctggacatggtggtgcatgcctgtggtcccagctactcaagtggctgaggtgggaggatcacccaggccctggaggccaaggctacagtgaactgtgattgtgccattgcactccagcctgggcaatagagtgagaccctgtctcaaaaaaaaaaaaaaaaaaaaaaaaacagagagagagaaatggtatacaaatttattagcatgccacaagagggaaatccccattatgcagtggcgatagatgcttatttacccttcttcttaggtgaaagggagatggggaagtatggatgattttaatggggtagtaagtgattttttcggagaatttaatgggcttgaatcacatacaatggtctggaacattgtctgtggggcccgcagagcagacaatggttcgtgacgaaaatgtgtccagatgtgttgacagacttcagtcattcttccagcaatgagttcagtgacgaaaactcagggaagggacgagaggtccagactttaggtggataaggagaacaacctcatcctttgggagagacagaggactgagagacagacctggggccagaggggaacagggaagatcagatagactttgagacttcttcttcagttcaacatgtcaaagtgctatattttggggtattggttgggtattggtttctgagccacaacatgtgataaatgtgatcattgaagccaaggttaggggctctgagagcatattcgagaaatttgaagggtcccggatgagctcttggatgaagtgacttctaacctgcaatctgaagttgggtagaacttagcacggaatgcaagggtggcggaggggagcagaaaagttttccagacagctttaatggcaaccccagagacgagaagaagtagacagcacattaaaaacaaacaaacaaacaaaaaaacagtaaataaatccgtcagtatatttggagtttctaatggcggtgtggattggaggtggggaaagaggaactgtgctatgctgaaatgaacgtctaaaggtgagcagagccttagagacaaaagttttcatgagagacagaataaacaaacagacaatggccagaccctggatgacaactgacccacaacctctgaagcaaccagtccaggatgtcaaccaaaccacaacctctgtagcattgactcagaacattcagggctgttgaatggtcaatgactgccagcttccctccctattccctctctccttgaccccatccaactcaggaccaaccagagaaagctaaacacaagaggacttcagaaagttcatggaaaattgaaataaaagatttaaaaaatatataaattgtatttctcaatgtatgtttcatcaagtttaagacacatttgtaagtgatgataccaaccatttagtccatccctaaagaactaagggtcctagaagtttaaccgtatcaatgcaatctttgttacattattaactgaagaagaatgaatgccctttaaatatgtttttaaaattagcaaacataaagaagtcagagggagccaaatcaggactggaaggtggatgtctaaagatttcccattgaaactgtggcaaaattgcccttgtttgatgagaagaagtgagcattggcatcgtcatggtggagaaggactctctggtgaagctttcttgggaatttttctgctaaagctttggctaactttctcaaaacatgcttataataagcagatgttatcattctttggacctccatgaagtcaataagcaaaatgcctggagcatcccaaaaaactgttgccatgacctttgtgcttgactggttttgcttttttatttattttattttttaagaaattatataacagagacagggtctcattacgttgcccaggctggtctttagctcctgggctcaagcaatcttcccaccttggccttcctagtagctgggactataggcgtgagccaccactcccagcccctgcttttgctttgactgggtcactaccactgctggatatccattgctttgatggtgccttgtcttcaggatcatatcggtaaagccgtgtttcatctcctgttacaattctttgaggagatgctttaggatcttgatttcacttgtttaacgtttcagttgaaagctctgttcttgtctgcagctgatctgggcacaaaggcttcggcaacgttgagtgaaaagtttgctcaaatttaattttccgtcagaattgtgaagctgaaccaattgagatgtccatggtcttggctatttttttctgatgtcaaccatcagggcatgaacaagataaattctttcctcacaaactgatgtggatggtctgctgctgtggccttcagctccgatgttgtctcctcgcttcttcttttttttttctttttttgagacggagtctcgctctgtcaccaggctggagtgcagtggcaccatctcagctcgctgcaacctccgcctcccgggttcaagggattctcctgcctcagcctcccaagtagctgggactacaggcgcatgtcaccacacacagttaatttttgtatttttagtagagacggggtttcaccatgttggccaggctggtcttgatcttttgaccctgtgatccacccagctcagcctcccaaagcgctgggattacaggtgtgagccaccacgcccggccgcctccttgcttcttaaaatgagttatccatttgtaaactgctgatttctttggtgcattgtccccgtaaacttttcataaagcatcagtttttcccactcaacacttttcccagttttcccactcaacacttaatgtttgctcttgcttcaattttagcagaattcatgtggctctgatagaggctcttttcaaactgatgccttatccttagtgtgtccaaccagcccccgttcagacatgttacaaaaagttactatgagtttattttggtgaaagcaatttttgaaatccatagttttttcatagtacacattttccatgaactttgaaggaccctgtatgctcctgaaaccaggcacgtaagatgccccatgtcatcagcctccccagttccccagtcagagcactctggaagccttctttttttttttttttttttttttttttttccagtataaagctttcccactcctctgcttacctttgagtctctgccagagggaagtgatggtggctgagtcccttgtcagggcaggctctgaatcaataccttctgtttgttcttatttgggtattctttgtttatttccacatacaattgccaacactaccaccaatatttataattgtctcttatttggcacaccagaggtgttataccctgaaggcaaggcaacatattaagatttaggttgggtgagaatgatgctttcttttctaaagaaagaaaagagcaattatgaaagtgggaggggaggggagtaggaaagaaaaggagaatattttgaccttgaagcatattctcagattaattttagaaaataatatctatggaagtttaggatcaagaaaataattcctgatgaaccttcccaggagccctttttgttgttgttgtttcttttgttttttttggttattttcttgaggcagggtcttgctctcttacctaggctggagtacagtgacacaaacacgactcattgcagccttgacctcctgggctcaagtgatcctactgcctcagcctcccatgtagttggaaccacaggtgcatgccaccatgaccagctaatttttttattttttaaaaattataaattttggtcttgaactcctgggctcctcaaattcctgggctcaagtgccttggcctcccaaagtgctaggattacagacatgagccaccatgctggcccacactctctttatagctacctagtccattattacatattctcagcatggcgtttttcactgtctgatatttccccttctcttcctccctccttccctccttatttctcttttgacctcttctcaagtagaatgtcaactccatgagacctatgacaattttatctgaaaacctagggcagtgctttgtccatagtttgacactgaatatatatttgctgaataagtaaatgagaatagagaaaatgtcaagaagttgaggacattctcgtctgatggtttgtaattgctctgtgaagtaggaggccaagtaggagactaaaagtagaaatagtggagtgggcaagttgaagagggtggaatttggggtggtgagaatggaagaaagtgatgacaaagagaacacagattaattgttggacagcatttaggccctgccactctaaaaatacaatgattgcatgaaagaatgaatgaataagggcatgtcattctgctgctactgttctgaaaagcgcttctgagaaattgagctaagcttaatcacacagtatgtgtggtagacagaaaaattaccttcaaagatatccatatcctaacccctagaatctgtgaacctgttgcctcacatgacaaaagggacttttatagaaatgtttaaaatttaaggattttgaggtgggaagtttatcttggatagtccaggtagactcgatataatcagaagggtctttattagagaacaatggaaaggaaactcagagttagaggagatctgaagatggaagcagtgggcagagtgaaggaagaaaggtgatacaagcaaggaatgcaggtggcctttggaatacacaaacggtaaggaaatcagttcttccctagagccccaagaaagaacacagtcttgttgaccccttgattttaggtcttctgacctccagaactgtaaggtaatacagttgtgtggtgacttacagcagcaataagaaattaatataccttcagttctatgcagaacgtgcttctcaaaccataatctgagaccttcttaaaatgtagcctctgattcagtaggtttgatgtggtgagacctgagattctgcatatttaacaagctcccaggtgaggccagcccttttgggctacaaacacttgaagtagaataaatctagaaggcaccatcatgacaaatgagagaaatagctgttatggccatacagcatgtctttcatttgtgtagtttttccaaacttataaatgaatattgcattttataaacacagaaatgctataaagcagatactaatatctttcctatcactgtcaagagaaaggatattcagaaaggggtaagggaggagaccacacctcatattgtcttatgcccaatttctgcctccaaagaaagaagaagtaaaaactaaaagggagaaatgaaatccacaggcagacagcccggcaacgcgccctgggcctggtagttaaagatggacccctgacctaatcggttatgttatctatagattacagacattgtatggaaaagcactgtgaaaatccctgtcctgttctgttcagttctgattaccggtgcatgcagcccccagtcacgtaccctctgcttgctcaatcgatcacgaccctgtcacgcagacccccttagagttgtgagcccttaaaagggacaggaattgctcactcggggagctcggttgttggagacgtgagtcttgctaaagctcccggctgaataaagcccttagttctttaactcagtgtctgaggggttttgtctgtggcttgtcctgctacaggggaagccactggcctgggctgcatacatggtgcagtctatttggcttttgacagaatcaggctttttttttttttttttgatggagtttcgctcttgttgcccaggctggagtacagtggccgggtctcggctcactgcaacctctgcctcccggggtcaagcgattctcctgcctcagcctcccgagtagctgggattacaggcatgtgccaacatgcctggctaattttgtatttttagtagagatggggtttcaccatgttggtcaggctggtcttgaactcctgacctcaggtgatccacccaccttagcctcccacagtgctgggattacaggcgtgaacccccgtgcccggctggaatcaggctttgagctcaagttttttgtttccaagttcttttcactaggacagttaatgtgtgaaatgaagaactagaaacaaccaagtgtcaatgaacccagaagcatcagcgctactcaggatgggacataaaggaccaacagcaactactgcagaattgaactgacacaagaacagatgggaaacagagatgaaccattattggatttttccattttgagatttgaccgaaatggtaatcttgtttcagatcatcttgaagatgcctgtagagggaggcaatttgctttgatccagctaccttaatagtgagtaagtgtaaatttgaagcattttgtcacactctgctatctcacttttacctgaaacttcgtattgtgtttagtcagaatttattgagcacctactttgtgccaaagcaccattccagacattacaaaatcaaatatagataagcggttgtccccgtactctcggtttttactgtatggcaaaaaagaaataaatgtcccccaaaaccccaagccatatattgatgtatacaattctagaagaaattggaaagattaaatgtgtggttgattaactctagaaaaagaggacataaaatataaggggttttgttttattttgcctcagaggcaattttgtgtataccaaaaagtctactgagattttttaaaattaatgttcaatctactaaagttacaaattcaaaatcctagttcttcccaaagtttttaagtgcgtaatataatattgtattcttatcttattgtcattgttcaatgtcacttccacagagcttgttattgttaagtcttggcctcatttacaaattttatttctttaaaccttaagctgcatttacaaatgtagtatattccatttccttcaaaagtattttgacctaataaacaaaacctctctgagtgctagataattcttataaatgtaatacattgaacttataattacagtgaagttcatatccatgttccaactcaggaagatttaacttaaaatcacaagtctaaatcaattaatccacctctcattttagatttatagaagatctagtgggccatcttatgttacacgttagaataaataagaaaggaattcttgcaaattccttaacacagatatattaatagtatggctttgattctcctacacatttagatttgtcctgaaactgaaaagatgcttcaagacagttcgacgtgtcaaggcaggttcattgattcaccattgtggtacaggatgttgacagcaaagaaggttgggggaccaggggttatattgggaactctctgtattttgtattcagtattgctgttaacctaaaatggcttcaaaaaattatctattaaattaaaagaaagagagtgagtatgagcatgaaagagttgcaagaacccaaaaaagcaagaaaaaagttactgtctctgttcatgggagagttggttgggctgctacattatcatccataactctcaacttcatttatagttgcatgtcaatgactccacagcttcaagaggtaggccaagtccctggatttcagttacacttatcacctaactctggagtctcttagagatccctatagtctatcaaattggtcctttgattagattttgcaagactggctcttaagataaattaatgtttaccttttaaatgtaaacatctctgaaccttactaaaaccctttggtattttacatgtttcataggcccacacaaattagatattgaaagtgtgtttctttgaatcctgtgtgttggacaaggttttctctgattggtaattatactttacaagataattttagtaacggtggcctccaactctaaaagcatagagaagagaggtaaacaaataattatattatatggtgaactattcagtcatagaagatactcacataagaaatgccaatagggaatgaagtgtccaaagaatatagaagagtttggcacagaatagtgccctatgtgttgtagagtacgcagtaatcatttattgagtgaatgaatggatacacgaatagtgaataaagtgctcatagaagaatactagcttgttagtactagaatgtaaagttacaaggtagggttatagattttgacttatagtaaaataaaacacattccacttctcctaaaaatcccctgcgctccacctgtttatctgccacacccccgattcccagaacccctggcaactactgatcattttactgtctctaaacttttgcagaattttatgtgaatatctgttttcaaatcaattggataaataagattccttggatcatatggtgagactacacttagctttgtaagagactgccaaactggcttccaaaacggctgtgccacatttgaattcccgcctacggtgggtgacagttcctgttgcttcgcatgcttgtcagtatttggggttgtcagtgttttcgattttagccattctaataggtatgtaatggtacctccttgttattttaatttgtgatttcctgaaaacaaatgataagcatctttttcacatgcttatttgccatccatgtatcttctttggtgaggtatccagattttttggcccattttttaactgggctattttcatattgttgcattttaagagtcctttgtatttttggatacaactcctttatcagatatgagtttggtaaatattttcttgctgtctgtcacttgtctttagattttcctaacaatgtttttacagagaagtttttaattttaatgaagtataacatcaatttttttctttcatggaatgtaattttgcagttatacctaaaaactcacagtcataaattttttgtgactaaacccaaggtcatataagttttctcctatgtcttctatctttttttaaaaaaaattattttaaaaatagaggtaagggcttgtcataacccttagacagggtgggtttgaactcctggtctcaagcagtcctcctgccttaactgggatgagaagcatgtgccactgcgcctggaatatatatatatatatttcttttcttttttttttttttttttgacggagtttttgctcttgtcgcccaggctggagtgcagtggtgcaatctcggctcactgcaagctccgcctcccgggttcaagcgattctcctgcctcagcctcccgagtagctgggactacaggcgcccgccaccgtgctcggctaattttttgtattttttagtagagacggggtttcaccgtggtagccaggatggtctccatctcctgacctcgtgatccgcccgcctcggcctcccaaagtgctggaattacaggcttgagccaccacgcccggccattttatttttaaaaaggttcatgattttatggtagggaacaagtttgccccacagaggcaagatttgtccttggttggcctgtctcctggaaagagaattgaggtctggaactctaggcctcttgtccatttactacaccatccagaacatttatgtaagcatttccagcaattgtcctgtccattctgatttgattagcaaaggtcacatgtccattcttaaaatagtatttctgtgctaagtcatatattccactccagatactgggcaggggtggagtcagcttccccagaagcacattgatttccacatggaaattgggctgtgttctaaaatgctgggaaagcagtcacatatgtgcaatgccagcatgaaaccaaagggttgggggttagatcattaagggctttatgtctaaacaggtgatggggtgttttagttcattctttcattgctacgaagaaatacctgagactgggtaatttatgaagaaaatatgtttaattggtgcagggctgaacaggaaggacggtgttggcactttctcagcttctggggaggcctcaggaaatttacaatcatggcggaagacaaagtaggagtgggcacttcacgtggctggagcaggaggaagagagagggaggcggaggtgccagatctggtcatttaaaatgatctggtcaaaacaacaaactcactattgtgaggacagtaccaagggggtgggaataaaccattcatgagaaaccacccccgtgatccaatcatctcccaccaggctccacctccaacactgggggttacaattccacatgagagttggtggggacacagatccaaaccatatcagaaagtaatggagtcatcttacagaggagtagtaaggtgttagatctgcatgttagaattttattttctgtagcctggaagggattcaagctgtgcatgccttgaggtagattaatgagggagctctagcagtggtcctggagagagaagctgagggctttgaactcaactatggctgtgacagtggcaaggagaatgggaaggagagagcaaattcaagacatgtttaggaattaaaacaatgacaaaaaaaaaaaaagacaaaaaaagcttttcgagctgggtatggtggtgcatgcctgtagtcccagctacctggaaggctgcagtgggaggatcacttgagcccaggagtttgagtctagcctgggcaacataaggagaccttgtctctaaaaaaatttgttttaaaataaaaagcgttttgaatgattttcttgtttctctaattgataatcccacaaattggggaataaaggatattagaacaggaggctggaggtaggatggccacagttgatagattatcttgaacatgttggatttgatatgtctttaagtcaacctataggaaatgtcaagtaggcaagtggatttggggatgtattatagttaggctgagggcagagatagaatatcaccattaaaaccaaaaacagaatttgagtagactaaacctcttagtaaaagattgggcactaatggaaccacccagtgagttcttcttgcctgctgcccagatacagctgatgtatgaagatagaggaattgcaatagagaaagagtcttacacatgagatggctcaagagagactggaattttattattatgcaaatcagcttccctcaaaattcagaggctagggcttttcaaggatagttcaacaggcaagggaatgtgtgctactcattggttggggatacaatcacagaggtgcaaaaatggtcctcaggcctgctgaatctgcttctaggtagggacacaggactggttggtggtatgggtggagtcattggtcatcagaaatgcaaaaacctgaagacatctcaaaaggccaaccttaggttctgcaatagtagaataattggggaatctacaagtcttgtgacctccaggataatggcaagaatcatttctgtctacactttagcagaattcaggctcctctcatcctcctaacctggtggtctttcattagttctacaaaggtagtttagttttggagaagggctattatcatttaaactgtaaactaaatttcccgaaagttagcatggaccaagcctgggactaattaaagacagtttggagattaaacacaagatggggattggtcagatctctttcattgccataattttctcactgttgtattttttgcaaaggtgatttcactttaacgaagcctacctattatctattctctagaagttcattgttaagtaagtagttgaggttctgattccttagagtgactcagtttcaattcaatccttgtcgtcatttgaatatctcaaattgacaaaccactttgtgtatgattttatatagatgtctgattagctgttctgcaaattcacaattgcagtcaagattctcttgtccagcacaggaaaacaagacaagcagcaccttttccagtagtctctcaataagactttttcctgtgtttatagatgtaaaatttgctaatgagcaaggcctgagagctaacattgaagttgttctgaagataacctattcagtggattagaaatatatattcatggccgggtgctcctgtaatcccagcactttgggaggccaaggcaggcggatcacctgaggtcaggactgcgagaccagcctgggcaacatggtgaaacgccgtctctactaaacacagaaaaattagccagatgtgttggcacaggcctgtaatcccagctactcggggggctgagacaggacaatggcttgaacccaggaggcagaggttgccgtgagccaagatcaagccactgcactccagcctgggcaacagagtgagactctgtctcaaaaaaaaaaaaagaaagaaagaaagaataaagaaatatatactcattttagaatagaatattcattttttaaaacactgcgttcatgttctaatgatgctgtaacaaattaccacatacttagtggtttcaaataacacaactgcattatcacacagatctggaggtcagaagtcttaaaatccaaatgtcagcagggctgtgctccttctagaggctcttagggaaaatctgcttccctgccttttccagcctccaggggctttatgcattccttggctcacagctctttcctcatatcactctgacctcggcttttgcctccccgtttttcttactccaactctccttcctccctctttcacatttaaaagacctttgtgattccactgggcctacctggataatccaggacactctccccatctcaagatcagctaattagcaaccttaatttcatctgcaaccttcattccccactgccatgtaacatgtttatttacaggttctagggattctgacatagacatctttaggggccatcattccgcctacaattgtgggccgatgtcttccttctctcccgacctcagcaggttgggtctgggtggacacttgaaattggtagaacagtccacagttgggatgagtcaaacatgactgagtacttgactgtgaagttaggtagaactcagccttgctcagctatcgcaggccacgtacatgctggttagtgaacagaaggaaacaggaggttgcagatacagggagacaagtagcagcaagagacagaccagagatagagaaagtagttctgatgattttctttttttgagacagagtctctgtcgcgcaggctagagtgcagtggcacgatctcatctcactgcagcctccagctccctggttcaaggaattcttgtggctcagcctcccaagtaattgggattacaggtgcacattatcacacctggctaatttttgtatttttagtagagatgagatttcaccatgttggccaggctggtctcagactcctgacctcaagtgatctacctgcctcggcctcccaaaatgctgggattataggcgttaatcccagcactttgaattggaaaatggattttctaaactgaattagaaaatagtaaaaactgggttcggatttagtttcccactccgctattttctttccagtatatatttcagaccagtaaagaagagaggtaaataaccaattaagaaaagtttccttgctggatactgagatgtttgatggttcctgccactcctactggcacttagtacatttgtggtctattatgcagcttagcaattttgaaaaacatttttattctctttagctcatcccttcttaaaaataaatattaaggttttggggagctgaggatacgaaattcgtaatgtatacaacagctgaccagttcctgtcaataaaatatgacaattaaattcagaagcgaggccctttccttgcttatcttgtttagtgagacaagctcattcctaagcagtcccggccaatatgactttgaaatagtcatccctggaatccatttcgggtttctttttggacccaagagctgagctgaatttggacatcaggccaaggctgaacagcaacagggttcaggccatttctcattaggaaattactgcctctaaaccaggcccaaagtgagcactattgattttttaaatactttttttattaacaattttggggaggtataatttacatatcataacttcacctgttctaattcagttgttactggaaatggggtcttggaactcatgcaagaaataatttggggtgagtccacagagtaaaccgaaagcagatttattgagaaagtaaaggaataaaagaatggctactccataggcagagcagcctcaagggctgctggttatccatttttgtgattatttctcaatcatatgctaaacaagtggcagatattcatgagttttctgagaaaggggatttcccagaactgagggttcctcttccttttagaccacatagggtagcttccagacattgccgtggcatttgtaaattgtcatggtgctggcaggaatgtctcttagcatgctaatgcattataattagtgtaaaacgagcagtgaggatgaccagagaccactgttttttggcatcttggttttggtaggtttgggctggcttctttactgcatcctgttttattagtgggcttcgtgacctgtgtcttatgctacatttctatctaatcctgtgaccaagaatgccttccctcctgtgaatgcagcccggcaggtctcagcctcactttacccagcccctgttaaagatggagtcactctggttctaacacctctgacataaccatcaccacaatctcattttagaatatttccattcccgccacatgaaagtcatgccccattcctgcgcccagccctaggcaacgtgagtttactttctgtctctacagatttgcctttcctggtcatttaatataaatgaaatcatgtaagatatggtatttttttcctacttcttaacttaccataatgtctttgaggtttatttatgtggcagcatgtatcagtacttttttttaaatcaataaagagtattctgttgcatggctagtccacattttgcttatccattcactaaaactattgattttttaccactagatcatggtcagaaaatgtagtctgaggaacctgccagatgtagtctggtcaggggtatcaggtgtcttaatctgttttgtgttgctataaaggaatacctgaggctcagtaatttatttatttttattttatttatttatttattttgagacggactttcgctcttgttgcccaggctggagtgcaatggcccaatctcggctcaccgcaacctccacctcccaggtacaagtgattttcccgtctcagcctcccatgtagctcagattataggcatgtgccatcacacctggctaattttttttgtatttagtacagacggggtttcaccatattagtcaggctggtcgagaattcctgacctcaagtgatccactggccttggcctcccaaagtgctgggattacaggcgtgcaccactgcacccagccaaggcttggtaatttataaagagaaggggtttatttggctcactgttctgtaggctatacaaaaagcatgctgctggcatctgcttctggtgaggtctataggcctcttccattcatggttagaagtcctaggcacactggcttgggctcaatgtttcctagcccacatcttgaaggctgtggtggatgaaatcagcatgtagaggcaggaaaaccccggatcaatcagaaaaacacttactccttggcactcatatgaggatggcataagtagagggtcttggtagaaaagatgacagttcagtacacttagcaacaaagcttgagaatgtctagcttctcacacctggcaagcttcctcagtcttgatgaattaacgattctgcctttctgtctttccaggtgctttggctatagaggccttgagatatttcggttacataactggctcttatttccgttgtttaacatttattgagcatttaatatgtgtgaggtcatttgcatacattgtctaattaaatccttgcaatgatcttataaagtagctgcctgatatggtttggctgtgttgccactcaaatatcatcttaaattcccacatgttgttggggggatccagtgggaggtaatttaatcatggaggcaggtttttcccatactgttcttgtgtgatagtgaataagtctcacaagatctgagggtttcagaggggagtttcccgcacaaattctcttctcttgtctgatgccatgtgagatgtgcctttcaccttccaccatgattgtgaggcctccccagccatgtggaatgtaagtccattaaacttctttcttttgtaaattgcccagtctcaggtatatctttatcagcagcatgaaaacagattaatacagtaaattggtaccagtagagtggggcactgccgaaaagatacctgaaaatgtggaagtgactttggaactgggtgacaggcagagtttaaaacagtttggaggccaggcatggtggctcatgcctgtaatcccagcactttgggaggctgaggcaggcagatcacctgagatcaggagttcgagaccagccggaccaacatggagaaaccctgtctctactaaaaatacaaaaattagctgggtgtggtggtgcatacctgtaatcccagatactcaggaggctgtggcagaagaattgcttgaacccggaaagcagagattgcggtgagctgagatcgcaccattgcactccagcctgggcaataagagtgaaactgtatctcaaaaagaaaagaaaaaaaaaacagtttggagggctcagaagaagacagaaaaatgtgggaaagtttggaactccctagaaacttgttgaatggctttgcttaaaatgctgataatgatatggacaatgaaatcaaggctgaggtggtctcaggtggagatgaggaacttgttagcaaccgcagcaaaggtgacttttactctgttttagcaaagagactggtggcattttgccttgctctagagatttgtggaactttgaacttgagagagatggtttagggtatctggcagaagaaatttctaagcagcaaagcattcaagaggcgacttgggtgctgttaaaggcattcagttttaaaaggaaagcagagcataaaagtttggaaaatttacagcctgacaatgaggtagaaaagaaaatcccattttctggggagaattcaagcaggctgcagaaatttgcataagtaacaagaagtcaaatgttatccccaagacaatggtgaaaatgtttccagggtgtttcagaggtcttcatagcagcccctcccatcacaggcctggaggccttggaaaggaaaaatggtttcatgggtcaggccccaggtccccgtgctgtgtgcagcctagggacttggtgccctgctccagccacggctgaaaggggccaatgcagaggtcgagccatggtttcagagggtgcaagccccaagccttggcagcttccacgtggtgttgagcctgcgagtgcaccgaagtcaagaattggggtttgagaacgtctgcctagatttcagaggatgtatggaaatgcctggatgaccaggcagaagtttgctgcaggggcgaggccctcatggaaaacctctgctagggtagtgtggaagggaaatgtggggtcggagcccccacacagagtccctactggggcactgcctagtggagctgtgagaagagggccactgtcctccagaccccagcgtggtagatccactgacagcttgcaccatgtgcctggaaatgtcacagacactcaaagccagcccatgaaagcagccaggagggaggctgtaccctgcaaagccacggggtggagctgcccaagaccatgggaacccacctcttgcatcagcatgacccggatgtgagacatgcagtcaaaggagataattttggagctttaagatttgactgccctgctggattttggacttacctggggcctgtagcccctttgttttggccaatttctcccatttggaatggctgtatttacccagtgcctgtacccccattgtatctagaaagtaactaacttgctcttgattttataagctcataggcagaagggacttgctttgtctcagatgagactttggactgtggacttgtgagttaatgctgaaatgagttaagaccctgggggactattgggaaggcatgattggttttgaaatgtgaggatatgagatttgggaggggcaaggggcaaaattatatggtttggctgcgttccccacccaaatctcatcttaaattcccacatgttgtgagaggaacccggtgggaggtaattgaatcatggggtcagatttttcccctgctgttcttgtgacagtgaataagtctcacatgatctggtggttttaaaaggggagtttccctgcacaagttctcttctcttgtctgccaccatgtgagatgtgactttcaccttccagcatgattgtgaggcctccccagccacatagaactgtaagtcctttaaacttctttcttttgtaaattgcccagtcttgggtatgtctttatcagcagcatgaaaatggactaatacactgccattatacttctttcacagatgaggaaattgaaccttgcagagattaagtgatttgttcaaaatcactcaggcaataaatggcaaagtcaagatttgaactcactttctctgaggccaattctccctacactcttccaagctacttttaaaaagtatcactaaaaaaggcagatgggagcagtggctcatgctgcactttgtgaggctgaggcaagaggattgcttgaggccatgagttcaagaccagcctggccaacatattgagatactcatctctacaaaaagcaaaaaaattagccaggcgtggtggcctgcacctgtactcctagctactaagtaggctgaggtgagagagtcacttgagcccaggaggtagaagctgcagtcagctgtgatcatgccactgcattccagtctgggtgacagagtgagaccctgtctcaaaaaaaaggtaggtgggggggatttaatttattatggtagaatgatgagagaagaagtagcaaatggtttaaatagacatttttatagtgattttgggggacagaaaaagaatggaagctggatacctatcagaaacatggtggcaggggaagtgtgaagagaacaagagccccacctgttcagtgtgaagatgctcccaaggtgatccattaacctctgtttccgcattccacaccactgcttggctcacaccctagctacataaataattgcaagaatcaaatagttcttaaaagatattatataatgctccattctgttatattgaaaattggtgataaatggaagtataaaaatattaacagacttcccaggattgtagatggtgtgaaagtaggatgatagattctaatgcataaaactatgttaccatttgcccttatcaataaactacatggcttcctatttttttgtttgtttggtgttttgctttgttgttgtttttgagacaggatttcaccctgttgcctaggctggagtgcagtggcttgatcccagcttactacaaccttgacctcccaggctcaagtgatcctcctgcctcagcctcctgagtagctgggaccacaggcttttgccacccattccccaaccccctcccacccccctcccctcacctccaccccccagtagagactcggtctcaccatgttacccaggttggtctcaactcctgggctcaagccatcctcctgcttacagttgtgactgtatgttaccataccctcaggatctcttaagtgagttgtgaaaaatattcaggattacctatagaaggccactgaaattgactcaacccataataaccttttccagtggcaagaagttgcaagaggagttctaaagacaaaatcaataagaaattaaggttgaggaaggctatccttggccttagagaagtgctctgcaacagaaatgctatataatatgaacctcatgcataattcaagattttctagtagccatatttaaaaagggacaaagaaacgaatataattaagtttaatactatatttaacccaaaatatgcaaagtatttttatttgaaaaatcgataaaaattattgagatacattacatgcttttgtcctaagtgtttgagattggtatatattttacactaacagcaacatttccattcagattggccctttttttttttttttttttttttgagagaagtctcactcttatcccccaggtttgagtgcaattgcttgatatcggctcactacaaccaacctctgcctcctgggttcaaatgattctcctgcctctgcctcccaagtagcggggattaagtcacctgccaacacgcccggctaatttttgtatattttagtagagacggggtttcaccgtgttggccaggctggtctcgaactcctgacctcaggtgatctgcctgcctcgggctcccaaagtgctgggattacaggcgtgagccaccgagcccggccggattggccctatttctttaacgctttagtgctcatctaaagctcatctattgcttgatgaccacatacggctaacgactactgctttggaccctggaactttagccttagatttttcaaagcttcttgagcaacacttagaacctgcaatgactgatcccaactatgttattgagttctaaaacagtattatgtgttttgatgcacttaaaatgaaagttatatgtaaatacatacaaaagcaccataggttttcacatgcaggcacaaaatttcttatttaacaatacactgtggaaaaaaatttccaaaacttttttcagttattcagtttaatagagatttagcagaactaagtctttgcttttgacagagcttgccaccactaaaataaagaatttacgttccaacagggcagggcatggtggctcacacctgtaatcccagcactttgggaggctgaggtgggcagatcacttgagctcaggagtttgaggccagactgggcaacgtaataaaaccctgtctgtaccaaaatataaaaaattagtcaggtgtggtggtgcataactgtggtcccagctactcaaaggcagaggttgcagcaagctgagattgcaccactgcactccagcctgggtaacagagttagactcccacctcaaaaaaataaaataaataaaagaaaaagaaaaaagaaaaatttacacaacagaaaggaccatgggaagggaaggagaaaagctgattgttgtattgttaccagaaaggggtcctgatccagcccccaaaagtgggttctcgggcaagaaagaatttggtgctagtccatggagtaaagtgaaagcaagtttgtaaagaaagtaaaggaataaagaaaggctaccccataggcaaagcactaccgagggctgcaggttgcacatttttatggttatttcctgattatatgctaaacaagagggggaattattcatatcttccctttgtagaccataggacaacttcctgacgttgccatggcgctggtgggagtttggagtgaggatgcccagaggtcactcttgtcgccatcttgggtttggtgggatttggccagcttctttactgcaacttgttttagcatcaagatctttatgacctgtatcttgtgccagcctatctcatcctgtgacttagaatgcctaactggctgggaatgcagcccagtaggtctcagtcttattttacccagcccccactcaagatggagttgctgtggttcaaatgcctctgacggtataaatatgtacagaagagaggcaagcatattctggtgagcattctgggctcagtaatctttttttctgccttaactagtaaaataaaggctccccacaaaaagctggccaaatacatggatttttcagtaagctgagaataacaccaataacaactggcctacacatttttcctaatagacattagtttgtccatgcatattttaatgcatgatgaagacgctcttaatattgatttaaatcacactgctccctaaaatcttctggtttttagagatggagtttcgctctttcacccaggctggagtgaagtggcacgatctcggctcactgaaacctcagacagcgagagaaagagtgtgtatatatatatatatatatatatatatatatatatatatatatataatatatatatatataaagtatatatatatataaaatatatatatataaagtatatatatataaaatatatacatataaagtatatatatataaaatatatacatataaagtatatatatataaagtatatacatataaagtatatatatataaagtatatacatataaagtatatatatataaagtatatatatataaagtatatatatataaagtatatatatataaagtatatatatataaagtatatatatataaagtatatatataaagcatatatataaagtatatatataaaagtatatacatataaaagtatatatacacacacacacacacacacacacacacacactttgaattctaagcatcagcactttctcttagaatgtaagagccaatgcagttatcaccatatggaaaaaggccagaaaaaggtgaagtagaaaatacaaatgtttcagttaggggcaatggcttgcttgctcactataaaacaaatgccttcatcctttgcacttctgcacaggcattaggggaaacttgttctgatcagaaagggagttttaaactcacatctctcactgcagatctttccagggaactgccctcagataatgtagacttcactaggaaatggctggttgttgggtttttgtgcaatgcaaagcggtaccttcaaagaggagctttgcatcagcttcattttcctcagaagagcaggagaaggctagtgggaaatttgatttcacacatctttattggagcttcatttgtataaaggtgatcactaggaagggaattttttttttttgagagggagtctcgttctgtcgtctaggctggagtgcaatggcgtgatctcggctcactgcaacctccacctcttgggttcaagcaattctcctgcctcagcctcccaagcagctgggattacaggcgcccaccactactccaggctgatttttgtacttttagtaaagacagggtttcgccatggctggtctcgaactcagcctcccaaagtgttggttttacaggcgtgagccacccatgcccggccagacaattttaccatccataacatagctagtgtttctcgtagtggtatagaaacatctgtctgccatgctggctggctcacacctataatcccagcgctttgggcagctgtggcgggcagatgtcaagagtttgagaccagcctggccaacatggcaaaacccggtctctactaaaaatagaaaaattagctaggtgtggaggtgtgcgcctgtaatcccagctactcatgaggctgaggcaggagaatcgctaaaacccaggaggcagaggttgcagggagccaatatcgtgccactgcactccagcctgggagacagagccagactccgtctcaaaacaaacaaacaaacaaacaaacaaaatctgtcaccagagtctaagggaaaggtgattgtattacttgcttactgggattaatttatcagtacctatgacaacactttaaatctttcactcagagattaggaggggaggataagaaaactaatttggaagtctgcctctccttgctcagacaacacatgaaaggttgctgcaactctttagtgctttagtgctcatctagtctttcaggcacttcctagccaaggaaacatcttctagctgtttcttcctctgctccactaaagctcctgggacttcatttatggcagataaaaaacaattaaatataagatttttaaatgacaataaaaataaaaagagcaattgagcaattgggttgtcttttttacaatttaaaatttcctgtctttagacatcctagagttgttgattccgggattcctggggagaaaggctcagggtcggctaacttgccttcatcgaggcaatagttttatgggcctcaggcaacaatggcttagagagcgtccaactaatcaatctcagctgtagggatggaagtgggtgggtgggtacagctcaagcccttggtacaaagcagcccgctagtctctaagatatgttatcttaactcccacaaagtgccaactcccttcaatatttaaagaacctgaggccaagcacagtggctcacacctgtaatctcagcactttgggaggccgaggcaggtggatcacccgaggtcaggagttcgagaccagcctagccaaaatgatgaaataccatctctactaaaaataaatacaaaagctagccaagtgtgatggagggggtgcctataatcccagctattcaggaggctgaggcaggagaatcacttgaacccagcgggcagagcttgcagtgagccgagatcatgccacttcactccagcctcggtgacagagtgaaactccgtctccaaaacaaaacaaaacaaaataacttgaaagagggcttagaggccgggcacggtggctcacgcctgggtggctcctagcactttgggaggccaaggtgggaggatcacgaggtcaggagttcgagaccagtgtggccaatatagtgaaaccctgtctctactaaaaatacaaaaaaaaaaaatcagccaggcgtggtggtgtgtgcctgtaatcccagctacacgggaggctgaggcaggagaattgcatgaacccgggaggcagaggttgcagtgagccaagatggcgccactgcactccagtctgggtgacagaacgagactccgtctcaaaaaaaaaaaaatagaaagagggcttcaaaagcattgcttgaagcctgacctatttgttttactcctgattttgttcgtgattcattgagaatatttgagttctaagcgctttgccagcaggtgatggtggtgataaagcacacttgcttcccgccctcagggaacttgcattgtaatgggtaagagccaagacagacaatgaacaagtcaataatcaaacatataattacaattgtgatcaagaatttgaaggttaagacagatgctctaagacagggaaataacctactttaaaggaggcctcttggagaagctgaaattcatgataaaaatggaggtgaaaggcagggcgcggtggctcacgcctgtaatcccagcactttgggaggccgaggtaggcggctcacgaggtcaggaggaggtcaggagtttgagaccaggctgaccaacgtggtaaaatcccatctctactaaaaatacaaaaattagccgggcgtggtggcgggtgcctgtaatcccagctactcgggaggctggggcaggagaatcgcttgaatctgggaggcagaggttgcagtgagccaagatcacgccactgcactccagcctgggcgacagggtgagactccatctcaaaaaataaaaataaaaataaatgaaaaggaggtgagaaggattaaggcaagcaaaatagataagaaaaatatttgggcacagaaaaaagtgagaatcaaagccgggcacagtggcagaaatggtatgtcttcacttagaaagggtatatatgtctagaaattcaataccagaattctttagcttcataggaatttctctgtgacataagaacaaaataaatatttttatgtcttcttttgtttctcggttgccaattatccataaacgttttggctaatacgcgttgaatgcgaaagtatgcctatataatgaagagggaatttttcagaggaagctagtgagttttccagaggttaggagacaatggcttttatgtttcatttgtagcagggaggaacttaagtgacctagaattttttacctttaaattttttccagtgtagaaacaaacttgtagtgcattctgtattgcttggggagaggaatatttcactttttctctgttgtataaacactttaagttctgcattggtgataaaatgaataatggtggtacaaatggaaagctatataactaattgtttgtcatacacataatcatcactgcaaaatgagctctgggaattccattctagtgaccaggaaatctctggtatgagcaaggactttttataatgttaccaagtatgttgggaattgaaatatttatatagattgtgtagtttttagaacttagagtgcgttagagaagagttaattctctatttaagatatttggtactgtagatagactatttaaaatctgatttgttccattaggttctccctttaagttcctgatttaattcagttaactggttctccctttaagttcctgatttaattcagttaactggttctccctttaagttcctgatttaattcagttaactgagaaatgtaattttaatttcttatttatttcactccttcagtaaacatttattgactgtcagctgtgagagtcttcatgctaaagcaagtgtctgcaccacgggattactgatattatgggctgaatcattcttgcttatggggcgcggtggtcgggggaggctgttgagcagcatccttgatgccagtaacattatccccctaccccactgtgacaaccaaaaatgtctccagacagtgtcatatgttccctggggagcaaaatcatcaccccagtccagaagcattggtgataatgggaaggagcagatgagagttggaggtgggggtgggaaggaggcaagagaagtggcacttggggtgggacacatgaatgcatttaagagacattacgaaaaaagaatagagaagtcttcgtgactggtaaattatagggactggggaagaggaaggagtaagcaacaacactggtttgggaaactggagggattgtagcgctcttactcaaagaaaaaacaaaagaagaacagatatgaaagaaaatatgagttcagttgcagagacattggatttgactggaggcatggtgttctctaggaagtaggttcaggagtcgagtgtgttggagtgaagtcaggactgagaggtggattttggagggcaaaagattagtaattgacactagggcaaaaaagtgtcattcacctgctagagaaatggatgagttggataattaagatgcaaactaattgttctattagagattctaaagcattccaccaaggttaagcagaaataaaaactaacaaaacagagcaaaacaccaagtatcagaaacatttcagtgtatcttatagtcaattaagagggtaaatgaggaggaagagagctggaagaagagagaaaaggaaatgaaatggaattctgacagacaggtaatcgtgaaggagaggaagattcatttagtatcttttttatttttatttctttgagacagaatctcactctgtcacccaggttggagtacagtggtgcgatctccgctcactgcaagctctgcttcccaggttcaagcgattctcctgcctcagcctccctagtagctgggactacaggtgcccgccaccacgcgaggctaattttttgtacttttagtagagacggggtttcaccgtgttagccaggatggtctcgatctcctgaccttgtgatctgcccgcttcggcctcccaaagtgctgggattacaggtgtgagccaccacgcctggccatttagtatttattaattgctatcaaccattacataatttaatttcaaaaaatctgggaaatgcatgtattcttttttttttttttgagatggagtcttgctctgtcgcccaggctggagtgcagtggcatgatcttggctcactggaaagctctgcctccatggttcatgccattctcctgccgcagcctccggagaagctgggactacaggcgcccgccaccacgcccggctagttttttttttgtatttttagtagagacggggtttcaccgtgttagccaggatggtctcgatctcctgaccttgtgatccgcccgcctcggcctcccaaagtgctgggattacaggcgtgagccaccgtgcccagccacgcatctattcttgtaacccactttcttcttcaacatttgagcatgaaaagtttcaaacagtccaggtgtagtagcttatgcctataatcctagcaatttgggaggcaaaggcaggaggatctcccgagcccaggagtttaagcccagcctgggcaacaaagggaaacctcatctccacaaaacaaattgaaaaattggctgggtatggtggtaaatgcctgtagtcctggctattcaggaggctgaggtgggaggatcacttgagcccaggagctctaggctgcatgagctgtgatcatattacagcagtctgtgacagaatgagaccgtctcaaaaaaaagagaaagtttcaaacatacagtaaagttgaaggcagctcccagtgaacacccatatatctaccatgtaaattatataattaacattttattatatttgttttatcacatatctgtccatgcatctgttaaagtatcttattttttgatgcagtttagaataagttgccaaaatcagtacacttaagccaactacatcagcatacatattctcagctagagttcaatatttgtttagagttttctaacctacttttactaattgaatttttaaagcccatatccaatttcctttgtgggaaaatgggtggtactttattttataaaaatagtttttgtgaccattttggaatgctaacactgaagacttttattgataattacactagaattactctagatacatcaatatagaggctggtcacttttgctgtttctcgtctgtgtcttgctaccaggatgtggccaggcgtgaggtaatatctctaattatctgttaaatctagttttgcaaccacagatatgatattcttacctgatcaaatggaattaaggttaggccatgtttcaggcatccttaggaatactaaatagctattaaataacaagaaccctttggcaaagctttgtagtttgcctttatgatatccttaccggtcccccaagagtaaactatgcagtgttttatgttataaaaaaattgtggtctaaatttgcaggttccagtattctttctgctgctatgtgatcttggacaaatctcttagcctctctgagcctgagctcatgcttcaattatccttgagttaagagcacctatgtgtatttgatacccacacttgtgaatttcaaatgagcctttgcatgcaatagagatttgtcagctgtgacctgctgcacaactgtcactgtgaaaaaaaatcatcaattctttccctccctccttctttcccttcttttgtcttctgaacgtctagaatatagcacagaagaaaacaataaggaaatcagtagttcagaatcaaagacgttctgctaaagaaagagcaaaaatcaagattcaaagtacctcagcactcaaagaagcagaaaattctaatagctgcaggcaaattgtgccctctgaggagcctagattctagaaaaaaggagagagcagtcttgtgaaagaggtgaaacaaaggcttttcatgtactccggaattgcttggagactgggatataaccctggcaaagttattaaagttgatttctctaaagcatttactcgaaagggccacctaaggataactggctaactgcccttaaattacatttatttttaaaaacatagtttgaaaaaggttagtaaccaaagacttacaagaccaaccttttttaaaaaagaattttaaaggctggttcataatatgcaaaggaagactacacatttgcttgctacatttaagttgcacagtataatatatagcttttctccctcctctgggttattttgaaaatattaataagttggatgtctattccatattttcaaagtggttatcaatgacttttacttaaatacttgtaaaacttattaatgccactttaatctcagtttactgcttaaagctttagatatccatatttttttaaaaaaactattcttaaaaaataggtaactaaatttaataaataatgaaaacaatgacaaaatattcaatgaggaaaaatgtttatccccatattgtggccagaacgttaagaaacttttacaggacgaagtctgcctggaagggtttgcttgggaaagtggtagtttatagcataacatctgattttgtgtgtttgtgccaagggtgtttcctttctgtctttttcctttttataggcagccacaatagtgacatgtttaatattgatgagtttgacctcctgggagttatcgtatatgcaccctttttgaatacaaatgctgtttaatttatatggtaaacacatagaatttggagactagcattttaatcaacactaatctcagtattttctacttctcctacctctccttctgtcaacaacaacaaaaaaatcacaaaccaattttataaatgacagctaatgtcctctcctggagaagcagggtctgtgtgtgaaacataaaagcagcaccatgtgtagtaacctctcctaaaccatatgctcaagcacattaacagtgttcaattagatgatcaattattcaagaaacagaacaatccattcattcaacaaatatttattgaacagccatgcagaggcagacagggggttgtgtatgtggctgtgacccgatggcacctctaaactggaattgggcttcagtttttctccgtgtaaaaatttcttcttttttatttaacttttctcttggcaggtccagcagctttgaagatcagagtgcatcttccagctgacgatctcttcggtcggggacaatgcattcgattcgcacggtggagattaaagtccccgagatagaggaaacgtttttcgcgcccaggttcagcgaggagccgcgcgggggcagagggggcggcggcggcgggcggggagccaggcccgagctgcgttctgcgcagccattggtgggcgccgcgctctgcactgagcatgttcgcgccccgccggcccctagccgcagccgcagccgcagcgacggcagccacgggagccgccgcgcattatgcaaagcggcggcagatgcgagcggggccagccgggcgcgcgtcggcctcccctcccagcggctccccccgccgccgcctgactctcccgggagactccctaggcccggacctggggccgaggagggccgggatggcctgagtgcccgcggcgcggcggcgcagcagcgggattgcaccatggggaaccaggatgggaagctgaagaggagcgcaggtgatgctttgcacgaaggcggcggtggcgccgaggatgcgctggggcccagggatgtggaagccacaaagaaggggagcgggggcaagaaggcgctaggcaagcacggcaaggggggagggggcggcggcggcggcggggagtcgggcaagaagaagagcaagtccgactccagagcctcggtgttttccaacctgcggatcaggaagaatctgtccaaggggaaaggcgccggcggctcccgcgaagatgtactggattcccaggccctgcagaccggggagctggacagcgctcactccctgctcaccaagactccagacctcagcctctcggcggacgaggccggcctgtcggataccgagtgtgcggacccttttgaggtgaccggtccagggggtcctgggcctgccgaggctagggtcgggggccggccgatcgccgaggatgtggaaactgcagcaggggcgcaggatggacaaaggaccagctcgggctcggacacggacatctatagcttccattcggctacggagcaagaggatttgctttcagacatccagcaggcgatccgcctgcagcagcagcagcagcagcagctccagctccagctccagcaacagcagcagcagcagcagctccagggcgccgaggagcctgcagcgccccccactgccgtctcccctcagcccggggccttcctgggcctggaccggttcctgctggggccgagcggcggggctggggaggccccgggcagtccggacaccgagcaggcgctgtccgcgctctccgacctgcccgagagcctggccgccgagccccgggagccccagcaaccgccgtcccccggcggcctcccggtctccgaggcgcccagtctcccggcagcgcaacccgcggccaaagactcgccctcctccacggctttcccatttcccgaggccgggccgggggaggaagcggccggagcccccgtgcgaggggctggggacacggatgaggagggtgaggaggatgcttttgaggatgcgccccggggctctccgggggaggagtgggccccggaggtgggagaggacgccccgcagaggctgggggaagagccggaggaggaggcgcaaggacctgacgcccccgcggccgcttccctgcccggcagccccgcgcctagccagcgctgtttcaagccctacccgctcatcaccccctgctacatcaagaccaccacccggcagctcagctcgcccaatcactccccgtctcagtcccctaatcagagccccaggatcaagaggcggccggaaccctccctgagccgagggtccagaactgccctggcctccgtagccgccccggccaagaagcaccgggccgacggcggccttgcggccggcctgagccgctcggctgactggacggaggagctaggcgcccgcacgccccgggtgggaggctccgcgcacctgctggagcgcggggtggcgagtgacagcggcggtggggtgtccccagcactggccgccaaggcgtctggggcccccgcggctgcggatggcttccagaacgtgttcacaggtgagcgcgccctgctgctggcctccgggtctcaagtcgcctgtcagtcagggccttcccctgccacccgccctccctgggctctggaaggcggtgacctggtagtggcacatctcttctccgtagggaatccttttccgcccagcgagctcaccccccacggtgaaatgacttggacatacttgttggttttctgtgttcttacaagatcttaaagggaacaacttagttgtgtctgtcctaagttgctctgcccatttcaccaaaatacctgctattcacaaagtttcgggtcacgccagggagataaactcctttttcgtctcgttagctaaaccatcattcttctctttcatttttcatcaccacagcattaaaaagaaaaaaaattgttcatggttctttcgcaagagtcggttttggaggcacaaatcatttattccggtacgatccaaaggcagtctctgaccgctctcatagctgtgtgtatttgtccacgtttggtatgtatgtgatatgtagtttctatcttgcagcagtctgggttccgctgcttagtgaagttaagcggtcactcactgctgtttgctgctgcaagaaaatccgatacatgctattagaaaattaataaataaatagaatagtagggataattttcattcagtttcatggtccagcccagaacagcctgtagtttggagacagtgaaggtggaaaggtcaaaagcacgtctagtccaactggtacctcccctccctagcatatgttatagactcatacccagggcggcataaagcacagccagagtatgtttgctctggtcagtgtcaagcagtccaatgagtttatcctagcttacaggcttacagggcccaaggccttaccttaagagcccaacatgtttacctaacctctattcttaattattaaatgaaatagagtgttagaatttaatgaatcgaaaaatatgaaaagttacatgactactgataggtttatgataaatatttgaaggattaaacatttcaaatgcaatctgaaaattttaaaatcttatgttctattattttaataaatacattatctgtaaaacattgcttagatgaaatttctcggcacagacagcgacttcttagttgactaaatgctggtaatattggggtagctacttttattgaccacattttaattttcatctgtgggccaccttttattttgcccttatagggtcttacccttaaaagtagcttcttccattcatttcacatactcttatttttcttcttttccaccttctctttattgtgtagattgttaaaaagaatgtttgtagttttatacccactagataaattgtaaaaaaacaaaaacaaaatgcaaaacaaataaaaaagaaagatcacttttgatagaagaagattggaaagtttttgcattaatttttgtgaatttaatgttggtaagaaatcacatattttctctttatctaagtgacattcacgtatatagtttttgaaaagtgaaaataattcaccataatgattatcaatcattaatattaatgatagctattcctactagcataagactttggaaatttatttatttcattcatttagcaaatatatatatgtatatacatttgtaagcatatatgtgcatacacacacacacacacacacacacattgagcagccacattgtgctaggcagtattctaaatagtagcacactgtgctaggcagtattctagatgtaggtgatacatagaccattaaatcatgattttgcctttctaaggctcgctgactagtgaggaggagacatgacataagtgcagtgcacagaaatatctgtatagatatagacatgcaaatcactgctgggaacatcacggatgcagtggcttatctgcttggtggcaaggggtgagggaagaggacttgagagaggaggattgaacagagtcctggaagatcacaagaccctaaataggttgaatgtttgttttcctttaaaaaaacaagtgtcttcttggaacttgcattttagtttaatttgctaagtattcccaaatttgaaatttgggactcttaaaagagtcctgtataggaaccacctgggttttgttgacctctccaggtgatttgttttttaaattgtgcaaagtaaaattgcagagctagtcgtttttataaggacatcacctattttgtatttgatggttggatacagctggttggtaatcagcaaatatatttttgtgtagcagcttccgtatgtttatgtcattcactcagcattgttcaggaaaagaggatcagtaggttttacctaactttgtaactggtgggaaaatgtagatagagaaagaggtgaaataactttctcaaggtcacactgtgattcattcagaggcagatccagaaatagaaactgagtcaatgaatcaagtctaatgtcattattatttctgtttggatatacaatgttttaaggccatatagagagtaaaaactgtttataaaaaatgtgatcagatttagggcctttctttaattagattttccagttcctgtttttaataaggtgtcctcctttaatggttgaacatctggccttccttgagctggatgaagggtgattgttggccagagtgaaccagattttctctaagcagctctcatggaaactgttcttatggtggtcaaatgaatccagattgacacaggcccttgtgtctcagctgtcaactcttcatgtcatctgccactacgtttgcttctttactctcctctgctatttttttacgggtgtcttggaaattaccagaggcttggggaacactggcattgtccttagggaaatttctttttggccttaattttgcatgtatttggatcaattaattgccagctgcctttgaagcaggtgatcattatatctataagcttccataagcatcttttatttttaaaccatagaatgagggttgtcagcattacaggaagaaacagatgtttttcgctttttaccgccttccaaatgtagggagaaaatacaagtgaaaagggatttctatggcacatgtctgtgtctctttggtagatctaaaaacatttagcaatgagggagaccaaactttatcttgttttagctattaagaaactgatgatgccttaggccattgcatttaagtatttcataattaatgtgtttgaaatacatctttttcagtgtttagtagaaaaaatggcgtctgaaattcgggaggttcctttacatattaagtataacagaagcttggtactggagttttgcagttaattaaagtttagatatccaacgtgttaaatttgtgatgctaaatcgcttttgataggaatctttcccaagtcaattatgtgcttatctttttttttaaacacatggaataaaagtttaatctgttttaaagggcttaatgtcatcttcaggcacatcattgttacatcttataaaaacattagtgatgtcctcaacagctattgaagtgtgtgggctgttggcttcagtctgtagtttctgagtttttgtgtctgtgtagtttcttgattgttttcttgctgccagctatttattgttatagctgccttttttttttttttttgagacagagtctcgctctgttgcccaggctggagtgcagtggcacgacttctgctcactgcaagctccgcctcctgagttcacgccattctcctgcctcagcctcctgagtagctgggactacaggcgcccaccaccatgcccagctaattttttgtatttttagtacagacggggtttcaccgtgttagccaggatggtcttgatctcctgacctcgtgatccgcccgcctcggccgcccaaagtgctgggattacaggcgtgagccaccgcgcccggctatagctgtctttagtctctttgctcctgtccctcaatttttttgtaatttgacttttctgatcaatttgcaattggcttacaattcctgtaattatgatattggttacacttattgtacttctaagtgccagactctgttggtgcattacataactatctgtaatccttaacaacagtcttgaggtgtagctgtttatcctcatttttcgaatgaaaaaacccaggctcagacagtaaagtaacttcttgtctaagggcattaagctagtaagtggcccatccaggatatgtccttagaaaaccaaatctgttgttaatatgtataagatgaaaccaagtagatcattgagcttttggaggactagctaattaataaagtgcataggctctagaacttggattgtgcaactctgattttggcctttctaaaggttatcttgaatttttttttttttttttttttggagacagatttcactcttgtcgccaaggctggaatgaagtggcgtgatcttggctcactgcaacctccgcccactgggttcaagcaattctcctgcctcagcttccagagtagctgggattataggcgcccatgaccacacccagctaatttttgtatttttagtagagacaggatttcaccatgtaggccaggctggtcttgaactcctgacctcaggtgttctatctgccttggcctccccaagtgctaggaggcctatcttgatttttatatcagtagagggaagaacccactctaggagtacacattttctcatacggcttggtaaattgctacattggatttttttaaggccaggagtagtttgatttccagcagagcccctgacagagtatagatgtccagttaatgtctgacgaatgaaggtcagaatctgcctgatacgtataaaatgtcttattataaaaggaaaggggtttatatgaatgctatgctttcccctaaatactgccttactgggttccatatatcagagaagaatttggcgatgtaagcggggaccagaacactgatcttcaatcattttagatgggtctgaaacatcctttctcatggtttctttaggcctgtggtttggattgaagtcaagtgcaccagtagcttcagggatgggttttaatgactgctttatgagttgaggatgggcctagttttaagagctttaggcgtttggatataagccatgcgtatttgaaatggagcaggtacttttagtgcttttccttctgattcttctgaaaagatacagaaaatatacagttggatgaaggtagcagtagttattctaactacgtttattctaggtatatttgcaatcctagttttgctgtttagctaagtgagtctccagtaatttttcctcatatctatgaaggtagaagaataatttcaaattaatactattaagatgaaatgaaatagcatacataaagcccctacaattctgcctggtacatgagaggcacttaactggggctatttgctctcctgactggatttattatcttaaaaaaaaagtcattgttcaaagtgatcagagccaaatttgttaaaacaaccctgaaattgtatacaaaacttagcaggatatgaactgaccagatactagttgagccccagttttgttttgttttgtttttttttgcaaattgtttatgtattattttttcttttttttttctggaattgtaagcattttgtcacttatcagatattctgtggtggggggttggataagaaaagcatatgatggggtgtggctgtaagatttgggggagggtgctgctttccaaagaaggggtgggaagaggaggcggtagctgacaccctcagtgtttctgctctgcacagcatctggctgcaaacccctgactttgcagctttaccttcccacggtctccttcataaatgctctactttacactgttttatgaacatgcatttcattttcccgactttgtgcctttgtcttgcagctttaccctcttggaatacatgattcgtctcttttgctttagcatttgaaaagtgctgattgaattccgtttcctctttgtatcttttccagccagaccttactggctgtcatctcactttctctgtactttactgtctagatcatattatatatgcttcttggatttagggattcttctggtcttctttcttgccaccctctgcctttccttcctccttgcctgttcacccgattccatccatccatcatctcctctcctactaatctgtccacagatatctcttccgtgccttgctctgtgcctgtcaatatgtgtaaagcaccgactgtactgaggtcttgatgaatacttgctcattcaccatttttggcagtgatatagacaagttgagtatccaggcttcctactggcaattaaaactagttgaattgaagctggaaaattgctaacctttctgggcagtcaaaattaattattttcaatgaggtgtgattgaatcaatgatactttatagaacttatgttgatagaagaatagctattcttgtttctgcaggttaatgttaaaatagtaatgacattacagcaactgaccttccaaatataaatgttattgtaatgaaagaagaggtaaagggaatagagaaaattgtattcctctgttcattcctgttttgtattctaagtactaacctaatgctaataaaagttagcattaaggaaccattaggaagaaacaaaaatgtactgcctgtgacttgatagttattagatatcattttagtgacagtagaaactttctaaggcttttttatcttaaaatatatggaaaatatgacctcagtcagttcggaatggtagtaaagcaaggtagtcataacatcaaaattctaagaatgagtaacaattatttctggatgctataataagatgctaaccacactagagatttattatccttttgatacctactgctccactatgggtgagaaggagggaagaatttatgtcttcttcctttgtaaagatgtacttggaagtgttgattggataggaaaattactgcctctattctgtgatccagtcaggctccaacctaccaggaacccactggaagctttattatctgttaccctagagctgcaatggactgaaaacagtcctattgttttcaggaggaatggaatactttcttgagaaaatcaagcctatattatgtttcaaaattatgcttaaaaaggcttaggcactactcagttgagtctttttttgtacttcatgcagaagggttctttgttgtagtacctggtgatagagtggacacatacaggaagaaattctgtgtcatttaaatggttgttttaggtacgcaggaggggaaagaatgtgtttcagtaagctagtgtcagcactatgggaagagtgcaggctgagaacaatctatttcccttttccgttttaccaccagcttcctattagggcacaaggcaatcatttcttgcctcttgttaataccctggcttcccagattggaagagtgaatgcaatcttgctgggaagcgtcttccttcaagtcaatttcagcactgtggttctatagatatggtgattccagcaggtaccttttctccctaatagggatgctctgtgtatttagagctttcctttattggtagagctgaagaaaattcctatgccggaagacccgtttataccacggagtaattgatggtgagagtggtgatgttttgactttgatagttttgatcaatttttgattcatgctgaaggagatttgcattggttagactgtcattatctgacaataggaccgtgtgtgtgtgtgtgtatgtgtgtgtgtgcctgtgtgtctgtgttgtgtgtgtgtgtgtttgagacagggtcatgctctgccacccaagcgggagcgcagtggtgtgctcatggctcactgcagcctcaaactcctggtcccaagcaatcctcccacctcagcacctcagcttccagaatagctgggaccacaggcgtgagccactatgcctggctaattttttttttttttttttggagagacagggtctcactatgttacccaggctggtctcgatagggccttgtgtttttgaacactgatataatgattatgtatgatggttgatcgtgtgttatgaaaatgtatgaaatggaaagctatgttatataatgtatggctcgaagatttagaatatatgaaggctttctaatattggcacaaaatatactgagtcattacttttagtttcattatctgcaatgtaagtcatctcttgttcttggatggattgtaggctttgaatttttcattatagtttaaactgctcaataaaagcagtactattaattctcttacttcaatatactttaatatattggtttttgttatgttttcagtttttcctactattgaatatgcttactgaaatactttttatgagtctgtggtattccatttagaagtgtgcattgatattaaaaatttcttagaaactagaaggttaaaaggtgttgagaggtcctaggttttttactttaaaaagaaaaaagttccattggccttaaacaagtacagcttgtttgagcccattaaggactagaatagaactatttcaggatcccaaataaatgcatttgaatactctgtggagagttttgtaaggatgctcttcattattgagatacaaggtttatcttttaaaagtataataaaagaaatgaggtaacaatagggataatctttgaaactcattttttaacctatatacttgtagataattggcttctttttcttatagaccaatacttgcctgtttggagagggtaagttatgtgagctctctgtgggaagtgttacattttgcagctaaccaaaatgttcttctataagccaattatatcttctgtccttttggtgctattttggttaaatggctttggggatataaaatgtgtggatggtatccttgcagtttctttcagggtatagggattgatctgtctctgttcaatttttagaaaaatccagaagtatgttgactctgttggattcaatattttggggataggcagagagggttgtataagaactgcagtgatttaagtggagaaagtggagagacatttgactgggctgacaacgtgatatcagtaaaaaggtgatcctttaattttttttttttttttttgagacagggtctcactctgtcacccaggctggaatacagtggcgccatcttggcttactgcaacctctgcctcccaggttcaagagattctttcacctcagcctcccgagtagctgggactataggcacatgccaccacacccggccgatttttgcatttttttgtagagacggggtttcaccatgttggccaggttgatctcgaactcctgacctcaggtgacccgcctgtctcggcctcccaaaatgctgggatttcaggcatgagccactgctcctggccaatgcctttaataacttggattatttctctaaggagactcatttgactctaaattcacagatcattttcatatcatctgcttttggataataaaagctaggcatgtggctttagctttagcttgaggctaagcccttaaggttgagcccctgatttccttttgtatgtgtgcttttgtctttgtcagttaccaatagactgctagagttgtgtctgcagtttctgtgtttctctggacctcagacatatctcacttagacatcacaagcctaggatattcaccgtgtctaaaactatacttactattttacccaccctcttaacaccctccttctgggtttcccaaacaaggcattgccgtctagctttgccatattcttggattcctccatccttctcatacttcacacccagttaatctttccattttctcttttcttttcctaagtatctctttaaaatgtcttccaatttctgtttccattatctctacccttcctagtttaaatccctatcaacagcctcctcaacattcttttgtccacaacctgcgtttctccactccattctgcatgaagcaagagagtaaatgacttaacatacaaacttgaatgggttccggtatagaaacatgtcattggtcccctatcaccctgaggctattgagtttaaattctttactatgtacatattaaatatattaatatagacattattattatttttttttgtgacggagtcttgctctatccccaggctggagtgcagtggtgcgatctcggctcactgcaagctccgcctcccaggttcacgccattctcctgcctcagcctcccgagtagctgggactacaggcgcccgccacctcgcctggctaatcttttttgtatttttagtagagacgaggtttcaccgtgttagccaggatggtctcgatctcctgacctcgtgatccgcccgcctcagcctcccaaagagctgggattacaggcgtgagccaccgtgcccagccgacattatgttatatagcatatataagctatatattatatataatagacattatatatattttaatatgtattaatatttaatctctgtagttttgtcacctcattgttcaggatctactattcctcacctcgtcctaagtgcttcagtcatttttcagatagctcatgctctctctggtaattttaggtattattaacactttttcttcctggtcctcagagaaaaaaagaatccatgtagttgtattcatgagaatccagtctgtgacacactcgcatcatcagtccaggcaaaactcgttttgtccttatcatactccctgcattttcacttcccattccgaagcctctagtagacatacagaactgcttttatctattgctctctttgaattagtctgcatttttctaaagtatatagtatttctgtttatgtttggtttatacaaatactctgagttgcagacctcattctgtttcttaaaaagaacaaaacaaaactcaaccacctttggaaaaaaatctacgaacttttctgggtgaatttccaccttgttttttgcttcccactgttatatactattcctaagaatgaaagtcctgctgggttgttcaacaccagggtcaccattcaccttttattgtgtgtgagtaatgttcccctagagctgttcaatgtggtgtctctgggcacattccctagattttatttaaacatgagcatggtgataaacatctagattcctgtacttctcggccaccagagaaaacagtctgatgaatatttccatacagggagctatgggagaacttctctgggatatacatttggaagtggaattgtcaggtcattaaataaaaggttttatttgagtaggtactgtcagattagtttccagaatgctttcctagtttatgcttcttttttttttttttttttttttttttgagaccgagtctcactctgtcgcccaggctggagtgccgtggcgtgatctcggctgactacagcctcaacctcctgggttcaagtgatcctcctacctcagcctcctgagtagctgggattacaggcgcccaccaccatgcccggctaatttttgtatctttggtagagattgggtttcaccatattggccaggctggtcttgaactcctggcctcaagtgatccactcacctcggcctcccagagtgtgggagttacaggtgtgagccactgcacccggcctccatataaatttagaataaaattagaataggttgttgagtttcttaaaaaatcctgaagttgtttgattgagattttagtcaattcatagattaaattgaggactgtttccacttttgtaatatcattttatctgagaatgtgaaagatctcttcatttattcagatcatcttttattcattttaatagagtttagacttttctccataaagagtttgtgtttcctttgctgaactatttcctgatgcttcatatattttattactaatgggaatgggatcttactttagttttatttctagttgattattgttaaggtaaagaaatgttttcagtatctatcaggtataaatactgtatgatttcctttatgaacgttatttaaatgtaaagtttatttagtaaaatctatagcttacagttatatgagattttaaaggtagtgcttttttttacagcaaataattgaaatataatcatagaacagtatacattgtgtagattcttttggaattattgtggctttccttttagcattaaatatggtaagtttttgtggatttccatacactttttggggagccatattcctaaaacccagaaacattattaacgttttaatttagtacgttgtgtcttacattgaacattaataaaaatctcactaattatttaaaatacttcaaaagcataatttaaacaactctatagtattttatccaatcagaacaccattcatccccgagtatccattgcatactttttcttagattgccttctgccttttgggatgccttttagacaccttcatatgatcttcttccacctataactcttcctaattaaatgatgctttctccccaggcttcatatgtagtctgtgttaacatccaccctgagtagtctatgaaacatccaacatttccctgcatgttgataaatcatatttctagctcagatctctcttgtgaatttcaggtgccaatttcatattgtcttttaaacatctttatatagatacgggaatagtttcaaactgaactcatcttttctccaaacccaacctgctcccttatgtattattggattcctggtagataataccatctaacaaagctctttacccagtttcttaagccagaaatttggaagtgcaagttagccaagctatgccactcttcctcctccttatatttaattagtctctacatcctgttaaaatatacctccaaaaatatgtttttaaatactcatcccctcctttccaggaggatttttttttctttttttttgagacagagtttttgctcttgttgctaggctggagtgcaatggcgcgatcttgctcactgcaacctccgcctcctgggttcaagcaattctcctgcctcagccttccaagtagctaggatttcaggcgcccaccaccacgcccagctaatttttgtgtttttagtagagacgaggtttcaccatgttggccaggctggtctctaactcctgacctaaggtgatctgcccgcctcagcctcccaaagtgccggttttacaggcatgagccaccatgcccggccttttccaggaggatttttaatgccactctccaaattttccagtagctttccattgactgtaggaacacaattgaaacctcagatttatattcaagcagaagactgaatgtgttcaggatgaaggagctagatgtgatagcagtttgtatgattcaagtcagcataagggaagccatcccttacagaatgtccagtgttggcatgcgtggtcttgagaagagcaatttcatcatcactggagatgttaaaatagagactgagtgaagatcaaatggggtggtcgtagccctggagaggctgaatttgaccactgatattctttccagctcggagagtcaatgatgtatgacttgaaaagtaagagcagcagctgtggtctgtgtgactcattccttttatttgagactgctttaaatatttatttaaaactcttcaaccaagtgattttagaagctgccatttattagagtcacttttatggatttaacttaatagatacaacaattaaattaaaaaaacatttttcttttgtctttctatagtttttcccttttaatcttgatttatttcatgaccttttaaaaaaataccaggaaattcataacctgtcataggtcctgaaaagtggttggtagttatcatcatatgtgttctatgatattcttttttcaacttcattagatttattagattaaatttctctatttatttttgtcattttcagcctttggtaaattgaagttggatagtgtctttttctctcttccccaggaaaaaaaatcccttgatgctagtcaaattgaactttatataaattttaatagacatgtagtaccgagaactctctataacaaagtcactttttgaatactctcagtatgatgtttttgctataattgatgtggaacacatcttttaatacccttctcaatatccctagtgtcaagtaacataaatgcatcaaacgtgcacctcagttcaccacagagaacagtcaacttcttcaaaacaattatgaagacacattgtaggcacttgttcttgaagactaagaggatcttcctgtaagagtgtctaaatcaaaggtgtacctggattcagtgaattttgattcctccaggggtagtagagtttcactctgctttatgttggtccaaatccctttattagccatggtcatctttgcagatgagggcagggagttcatcatccttgtgtgttttgtgacttgttttccttaatggtttgtctagctattggatttcacgtttgttttctttctttgagacaaccctagatatttatccttgtagcagtcttctttttactataaaacctgcagcattttggacctaaaactagacatggtaatttctatttgatcataaatggccctccttattttttttcttatttggcaagtataagccgttagtatgtgagatacagaatatgtgatatctctgtattcagtgacatcataaacttaagcaattatcattaatgtcttataatagatttgcttgtcaacatccttatttcctcctaatatttcaattgatagataacatgggatatcagggaagtttattagatagttatgtctgagctataaggtcagagaaaaatttaacgtgacaagacatctgttttaattctcattttgcataagatatagtggcctggaagaaacagaaacctgtgttgacaccttttaaaatacagcaactgtcttgttcatccttctaccattaaaaaatgcacagaaggggcctggtgcagtgacttacacctgtaatcccagcactttgggaggccgaggcagatggatcatctgaggtcaggagttcaagatcagcctggccaacatggtgaaaccctgtctctactaccaatacaaaaattagcctggcgtggtggcgagagcctgtaatcccagctactcaggaggctgaggcaggagaatcacttgaacccaggagatggaggttgcagtgagccgagatcctgccattgcactccagcctgggcaacagagcgagactctgtctcaaaaacaccccaaaaaacccaaaaaacccacatgcacacaaggaaaaaatatcagtgacatatttgtaggctattaaaatataagtttcaaacagatgattaaaattgaatgctatcataggacataaaactcagtacaaaacttacacttagccctctcatgtatataaccttagacatatgactcaagtatttgggccttgatttctttacagtggaattagtggtttgaacgaaatgatctctaagatttcttctggctctaacatactgaagatgaacatactgaagtggattgtcactgagtcacttgatcgtcctcatgacaatgattagtctttggaatgagtaaaaccagaaaggttacatgcaccatcaagggtattgggagaagagcatctcctactgtctgtcatcaaagcttctattcctgtttggacactttcttgtctcagtaaaatgggagactctccctgctctatgttgaactcactgaacctatgtacacccttcatttagatactcttgcaggaagatcctctcagtcttcaagaaaaagtgcctacagtgtgtctttaatattgttttgaagaagttggctgttctctgtggtgaactgagacgcacatttgatgcattcgtattacttgacactagaaatattgagaagggtattaaaagatgtgttccacatcaattatagcaaatacatcatcctgagacactgactctccctgcggtatgttgtcagcagttagcaaccagcctgtactctgcatctcttctacaagagtatgccagctacatcatcttattgtattattattactattattattattagttaagggcagggagcatgttttcttcagcttgtcttcctctagtaggcctaggacattctttgggatatgacggactcctaagtgcttggttatatcttatctttgctcctccccaacctcccagttccactaaggatgtttaattaaggcagtgtgttctacacagactgcttttaaaatgttccttcttgggctttggttgttgtaagtaggttgttagcccctgcagggcacagaccgcatggtctgtttcttttatatccgaatgcagaaagttggtcagaagcttttcccagagttgctggctgagtcagaagtagaagatccctggaataaaaatgaggagagcagagtgtgcctccagttttggcactgccactttctaatcttatgacttcgggcagactctagaaccttttcattcctcagtttctttgaagttgtgatgataaatcctgctctgcctacttcacagagctgacagtagatgcagaaatgccttttacattgtatagccctgttcaaataaaatactttttactttttatagtgtcaatggtcacaggcccaataaaaccctagtgcaaggagagttgattttacttcttcattgtgcaagaggattgcaacatttgttctgatggtgaataaaaacttaccccctaactgcggtgtccatgtttatctaggcttgtgagttttgcttctcaaggtaagaggagtatttatagctagtgtatgactgcaaagctgattctacaagcttcacttttgattagctacagtgtggaagaatatgtgggaagagcgtgaggggattagtacagcaataattggagaacattaatgattaataagtccccgactctcatttaatgaatattatttttgatgtgaatttaataaatatagtaaaacaaatatgcaagcccttttttttaaaaaaaattgaggctaggaattctagcaagcagtgtcttaaatattaccttgttgttaaaatctactaaatttaaggaaaaaaacccaaaacttggtggatgaagatatttgaatctgtgattaccttgcctattaccgtactatttcaaatgcttttagatccaacttatgatttccttcttttaagttgaaccaacatttttaatcacatttacaagtagagagtatttgaagtatatcttgatcataataataacaggtaacatttattgggtactgttaagcctgttacaaaaattgtttcatttaattttcacagtaatcctcggaggtaatgaggatgattatttccaatttctagatgaggaaacaggattaccaggggttatgtaacctgtctaaggccatacctagcataatggaggcatcagtgttatcggaaaggggtcccaatccagaccctaagagagggttcttggatcttgtacgagaaagaattcagggcaagtccttagagtaaagtgaaagcaactttattaagaaagtaaaggaataaagaaaggctactccatagacagagcagccccgagggctgctggttgcccatttttatggttatttcttgatgatatgctaaacaaggggtgaattatccatgcctccccttctttgaccatataggggaactccctgatgttgccatggcatctgtaaactgtcatggcactggtgggagtgtaacatgaggatgaccagaggtcactctggtcaccgtcttggttttagtgggttttagccggcttctttactgcaatctgtcttatcagccttatcagcaaggtctttatgacctgtatcttgtgctgacctcctactcatcctgtgactaagaatttcttaacctcctgggaatgcatcccagtaggtctcggtctcattttacccagcctctattcaagatggagtcactctggttcaaacgcctctgacatcgggattgagatccaggaagtagcttctgttgcttaagctatggctgcaatcccatgcctccccacatgggtgtacttcatgaagtcaaggtacagagtccacgtgttttcaggggaaaggaataggcagaaaataaggaacactttccatcctataaaagaatgagagaattcttcatggttatactattctagatttcttcagttctgcataattaggtatataatatgtaatatgtgtgatcaatgacatgggcctttcctagataaagataacgtgacctttgacaagacacctaacatccttaggcctgcattttcttttttttttttttttgagacggagtctcactctgtcaccagctagagtgcagtggtgtgatctcggctcactgcaacctccacctcctgggttcaagtgcgcctcctgcctcagcctcccgagtagctgggactacaggcacgcaccaccacacccagctaatttttgtatttttagtagagaccgggtttcaccctgttggccaggttggtctcgatctcttgacctcatgatctgcctgcctcggcctcccaaagtgctgggattacaggcgtgagccactgcatctggacaggcctgcattttctagttcagaaaatgatattagaggctgggtttgaaggacaggaagatggcccctcccactgagtcttttatttgggtggagggaggaaagggagcagaaagagcccaagaaactttgcccgtctcctgcccttatctttatagagttataaatttctcagaaactagcatttatatacttataaagtttatagcaatctgtgctatagagatgattttatcagcttttgagaattttctccacttgcagtgttgctgcacctgctgggggtgtgttctctaggcagtgtcagagcctaactcttcctttatggggattgcacttgcgttttcctgataagtgaccctgggacagtgtgtgcttctgaaggcctccctggctgaccctgtggtccgggccctagggactgaccttctagctggcaccagctcctgctgtgaaatggctgctgcccacaggcagtgttttgtgagctgttcattcagcagatagatttttggcaaattgacttagtgctgttttgcaaagagtaggagctcaggaaatatggttgaataaataaacgtaagcaaatatgaagtaaaatgcaggcttgaatagctggacacttgaaaaagttaaaattactctagggccaatgattttcatttattggtgtggttgacatgtctgtctaggaacagtgatttgaccaaggagtagagtgaggggactgggggataccttgactgggggatactgtggtcatggggtgtgaaagcccgtgtcagagggaaccgggaagcctctggttcctggccccagccagccagtttgcacagttaagaagtaagattgtggccgggcacggtggtgcgcacctgtaatcccagcactttgggaggccgaggtgggcggattgcctgaggtcaggagatcgagaccatcctggctaacatggtgaaaccccatctctactaaaaatacaaaaattggccaggcatagtggcacacgcctatggtcccagctactcgggaggcaggagaatcgcttgaaccggggaggcagaggtcgcagtgagccgagatcacgacactgcactccagcctgggggacagagcaagactccgtctcaaaaaaaaaaaaaaaaaaaaaataaggttgtgtttaaggcttcagggcagtccattctccctagtttagattcaaggcatcctaatcctatttagtaggtgagtgtctcctgattaaattctcaattatcaaatgcaggaagagaaataaaagttcatgtctctgtccactccccctgacctggttggtcaaattacattccttgaacagaaaaggagttcagtatagtccagctggagtgtgtgtcctggaaataacaaaaactgtttgccttcccaccacagcgattttgactctttaataaactgtgttcgtatctcttggttttgcaaaatcaggaacatgctttgtttagttttgtgatcttgaattttcacatgatttttgtgtcacatatttctgtgtaagtaaatgtttttaatagtgtgatttaagatattttattgtgaaagtggaatatacacactcagagaattacaatgaattcccatgaatccattactcagcttcagtaatcatcaatattttcaatgccataatagttttatcaaccctttttttccacttctaccccatgccacctacttttttgtgaaataatttaaaacaagctccagacatcatgttattttaatatcaaatatgtatctcaaaaatggacttttaaagtatgctacaatgtcattctttatattgaaagcaaatagagtaagttgttcaatattacctggtaactagtccatcctcagaactctctgatactctagaatggatgctaggtgcaatctgacagttgaattggttcatgctgagttctcctttcttttgttccagaggctgggggacagcaggaaagctcgatgggggatgctgtgtactttatgatcacccccagcaggggcccaccatgtctggctttctcagttgtcctgaagctgtgaatgatccctgggtttggggctgacagcttgatcctttctttgcaagagtttcaattgaccttttctctaatggattttccatccacttgctgttctttaagtgaacccattatttcattagggattgcaaaatggtgattttctaattatatcatttcttttttttttttttttttgagacagagtctcacactctgtcgccagactggagtgcaatggcgagatttcagctcactgcaacctccgcttcccaagttcaggtgattctcctgcctcaacttccagagcagctggaactacaggcatgctccaccatgcccagctaatttttgtatttttagtagagatggggtttcaccatgttggccaggatggtctcgatctcttgaccttgtgatctgcccacctcggcctcccaaagtgctgggattacaggcgtgagccaccgcgcccggccaattctatcattccttttgcacattttggctggaatttttctgtattgaagactttattcactaggtatggttgttaccctgaaatacagttctttctagaaaggcagcataaatgcctcattatttcctattctgttatcagtgccctagcattcttcagtgatagctgatgttttatttttctggtttctttaaatatatttaatatgtttaaatcaattaagtgattattctttctgtaatagcatggcttttaatggctgtatagttagcagtcatgtgtataaagctatctttttttatttatgtctgtattgttggacattttagttcctttgaattttggtactattaataatctatttgttatagtaccaggaactgtgataaatacttgacatgcattatctcatttagtcatcataatactcccatgatgcatcactctgaggatacctctgaatatttacctagaatagcttttataaagttgaatttctgggtcaaaggggtgaatttttaaagatcactgacacacattgccaaattgccccttaaagctttccttgtcggtgctgatgcccacttctgggttttgggataccttgagttcaggttgagggacactggaggaacaaaactggtaaacctgctggtttggtggttctttgaattctcatctttttccccagtcctcctgctattacaatacagtcttgtcacagagccaaccccaaaactggggttctgcctgggagaaaacatgggttcttggcttccctcaggaagcaattcaagagggaaccacagagcaaagggaaagcaagtttattaagaaagtaaaagaataaaagggtggctaccccataggcggagcagccctgagggcttctgactggctatttttatggctatttcttgatcatatgctaaacaaggggtggattactcgtgagtttttttggaaaatgacaggagattcccagaattgagggcccctcccccttaaagaacatacagggcaacttcctgaggttgccattgtatttgtaaactgtcctggcgctggcgggtccatgctaacgattcctttagtatgctaatgattatctttggcatataatgagcagtgaggacaaccagaggtcgctttcatcaccatcttggttttggtgggttttggctagcttctttttcacattctgtgttatcagtgggtctttgtgacctgtatctcaggaaagcagtcttgtggagctccgctctgtcttcagaggcttcacgtagctgccccaactgccccatgcattccgtccaggtatggggccccttcttccatactctgttagtgcgttcacaaaggtctgcccggtttcaaagaatggggtatttagagactgggcgagattatgggagagaatatagaaagagttgagagaataagctgtggggtgagccaggaagcactccgacattgccgtgttgggtagagaagccattaaaagggacttgggagaaaatggctagcgagttagagaaaataggggaagggaatatcatgagctgagagtaaaatgctttaaggagtaggagtaaatcaacagtgaaatttttctgaaagataaactaagtaggatgaagacagaaatgttggctgggtgtggtggctcacccatgtagtcccagcactttgggaggttgaagcaggaggattgcttttgtccagaagtctgaggctgcagtgagttatgatagggccactgcattccggcctgggtgacagagggagaccttatctttaaaaaaaaaaaatggaaacaaaaagttattgataccatgctgcccagcagcttctggcacatcatgggcatggaaatcaaattagagcagactgagcaaggagggagaggtagcaaacgtagttaattccggttagtagttttgatgtgaagggaagccaagaaatggaatcgtagctgggagcggagagtgatgtggctcaagggaggatttgttctttcggttttttttttaaagcatgtttgtgtgatactgggaatgtccagcaaagagggaggtgtttgtgtttcaggagagaagggatagccaaagaagtgagatcttggcacgcaataaggaattcagctcagaacacaagggaaagaacttgctcttgtttgtcacagggcctctttccattgtgaggaagacaagtgtgagcatttttgcatatttggaatttgtctcagattcttccattgtctcagtaaatcatttgacaatatcatctcatcattgggaagaacgggtcaggtggggagaagattgtttaaacattgtattggagtggaagcttacatgagaacccacagcagtgttggcctccttgaggtatatagctgtgcactgaaagtcaagacagacaacacctgtgtggctttcttttacaatgttcagttgttcaggtgcaggcaaagagaaagtggatggctgcgccgaaacaggtcgtggtttcacctgacaagcgtggtggagggagagagggataagaaagctgaagtgtttgaagtatgtaattatagtgatagaacatggaatttaagccgctgcggaaggaagtgacacagcacgagtgatggattgtgcaacagtagtagggacaactgattcaaggtcagcatgctggatggagcagtagaaggggttctagagtaagagcctaaaagtagaaggtagttctcaggagttagatgctgcattcaggcatttgtacatagattcattgatgatcgaaaaattaattgattatcccgtctttgccagccactccttgaggtcctgagtagaaggtggtaaacacacagcagggactgctgaaatggagtttacgctccaggagtaggagacagatcacagacttacataaattcaagggctaagctctctgaagaataaagtggataatgggaacaagagtaatggggtgtgctccttcagaaagggtattaggaagttctctcagtgaaagtgaccactgaccagagacctgaatgagatgaaggagtgagggagtcattgatgtatgcagaagaagagtgttctagtgcaaaagtcttcatggtgagagtgagctcagtgtgtttgaggaggagaaggccagtaggcaagagtggtgagaggtgggaggtagggaggtggctcttgcatctggtgagtgttgcgggggttgtgactgattggggctgttgccttgggttataaaataatttactgaaacagtagtgaggtgaagaatgcaagtttattagagagtaagtacgttgcaaagggcaacgggtagcacagcagagaaggggctgtctgccaagagacaggggctgggggaaagtttgatagggtcctgcttgtggggccactgtgcaaataaaatgacgctgctggggctgcatgcagagtgaggtgtctgggaacaggatagtgtgcaagcaggttgtttgtggttagcagtcactcagaacaattgttctcccccacctgggaccccccttcctcgttgttgctaacttacctatcaggactgcacagtgagggatttgattttactctgagggtgatgggaacccactggagagtttggagtaaactttggaattgatcttctggaggttgtacggttcctgatagtgaccaatatgaggctgtgagatgggaatgggtggctgttttgtggtggagaaaatgttagctggaggcaaggggatcaaggtctcgggcgaggtatcctcctgagcaatggtttgctctccatgtggatgtccaaatcactaagaatgataggagcagaggtggaacgtggggcagtgaggcaggaggtgagttatttagtgaatgacgaagggagggaataactagaggttagtggatggcagaaaggaggagggatagtagggtctagccagtggcaggaattttcagaaaagctcatggttttgaaggagaataaatcatctggaagtgttcatggggaacaaggatgttacccacgttttttgcctcagatgtgaaggatttgacttaaaatgcctccacctggccgggcgtggtggctcacacctggagtcccagcactttgggaggctgaggtgggcggatcacgaggtcaggagttcgagaccagcctggccaacatggtgaaatctcctctctactaaagatacaaaaaattagccgggtgtggtggcgcatgcctgtaatcccggctactcaggaggctgaggcaggagaattgcttgaacctgggaggcggaggttgcagtgagccaagatcatgccattgcactccagcctaggcgacagggcgagactccatctcaaaaaaaaaaaaaaaagtgcctccacctgagacgattgcagggcgaggatatcctcaagggaaagcctagttatcactaaagaaggaggtgaagtttctttagagagaggttaggcctggggttctcagcctggggttatttttgccccctgccccaggagacacttggcaatgtctggagacattttgggctgttacagctgggggcgaggtggctgtgccaccgccatccagtagtaatggccaaggatgctgctaaaagcacaggataatttcccccactaccgctaaacacggaaataccaggcccagggtgatgatagggttgtggtacagagacccttgattaaggatttcggggcatatgctttcatggaagtagagttccagcaggtcatcattttctctcctccacactgttctggaactcctttgataatttttggctggatgtgcacgtacacatttaccttcagtcacacacatgcaagatcctgctgaccttattttttgtcatatacattatctgagcggtaggaaagaattagtcttagggctattttcagtaattcggtaacatgaatacaacaatctactgttatgataattaatcacttgagaattgagggatgccatttcctagatatttagttccagttagatgcaggcaaactgaagttctgtaggggaaaaatttgttatttcccctccaaaaaatcctgggagaccaaagaatgttctctaatgaccagaagaaatggagaaaatagagagatctcttgtgtcctgctttgtcactcgaaatatcaaaggcagcttttgagattagttttgttttatagacagaaatacaaagaggcataacaactgcatgactagtatcctggtagaatggaacatttagacatttgaaatgtagttattgtaactgaagtatagacttggcctggttttgcaaagcctggagctaagaatggtttttacatgttcaaagttgctcaaaacaaaattaaaccagtgaaaaatatgcgacagagaccttacgtgtggctcataaagcctaagatacttactatttggccctttacataaaaagtttgatggtatagactgataaatcatttccagttctgactatgatatgaatgaatctatcacagaatcatagcattgtatttattcagaaatcctgaaaatatttattgatgctttttatgtgcaagtgaccaagtttgcaaggtagatgctggccatcagcaagtttatatgtcagtgaggaaggtcaactttaaacaaatgattgcataactaattagataaaataattaattacacaaagaaactatgaagggttccaaaagagcatggaaggggattactgaagacttttctggataacagttgatctaaatttgaagaaagaatctgctaattagaaggaggagaaattgtggccctggaagggaccctagagattttccatttcctctgatgaaagtttgtgaatgcaaaacaagctacataaatgtttgaaagttaaagagctaggccaggcacggtgttttacgcccgtaatcccagcacttcgggaggctgaggtaggcagatcatttgaggtcaggagttcaagaccagtctgaccaatatggtgaaaccccatttctactaaagctacaaaaaaaattagctggacatagtggtgcatgcctgtagtcccagctacttgggaggctgaggcaggagaatcgcttgaacccgggaggcggaggttgcagtgagccgagaccgcgccactgcgcgggtgacagcgaaagtctatctcaaaaaaaaaaaaatgtgtcagaaaaaattaaggcctatagctatgactctgcactctcgctaacattagaaccaactgacaaccagtagaaaactgatgcctgagcccggcttccagcaattctgttctccccaggtgatcctcagtttcagccaagattgagaacccctgggctaggtggacccaggccctctaggatcctcagccagtgtcttattttttttatttttatttttttttttttgagacggagtcttgctctgtcgctaggctggagtgcagtggcgcgatctcggctcactgcaagctccgtctcccgggttcaagtgattctcttgcctcagcctcccaagtagctgggactacaggcgctggccaccaagcctggctaattttttttgttttgttttttgtatttttagtagagacggggtttcaccgtgttaaccaggatggtcttgatctcctgacctcgtgatccgccagcctcggcctcccaaagtgctgggattacaggggtgagccaccgcgcctggcccagtgtcttcttattatgcctctcttgcctttttttagggaaatagtaaaaaaaaaaaaaaaaaaaaaaaaaaaaaaagtccttaagttcagacctatgctagagttatatttctgaggagcatctgagagaaatgtgaatttttatcccttttctgggtgacttatttttattttgctggccagctctcttcttgtgggttggtgcctttgcctgcctcttcgtctcttcattctctgtccccgccatgatggacactgtgaatgtcagtcactgatatttctgagtctaaatggcggcatgatgcgttacgaactgcttccttcgagaaccatctgcaattaaattcaagcggtttagccttttggatccaaaattaattaattaatttatttatttatttatgaattattttttgagacaggcaacactcttgttgcccaggccggagtgcaatggcgtgatcgcggctcactgcaacctctgcctcctgggttcaagcgattctcctgtctcagcctcctgagtagctgggattataggcacccaccaccacggctggttatttatttatttatttatttatttatttgagatggagtttcgctcttgtctcccaggctagagtgcagtggtgcgatctcggctcactgcaacctccgccacccagcttcaagctccgccacccaggttcaagcaattctcttgcctcagcctcccaagtaactgggattaaggagcccgccaccacgcctggctattttttgtatttttaatagagacggggttttgccatgttggccaggctggtcttgaactcctgacctcaggtgatccacctgcctcagcctcccaaagtgctgggattacaggtgtgagccaccatgtctggccttggatccaaatttaaatccaaaattggatttaccaattaaatccaaaagggagctgagtgaggtggtgtgtgccagtagctctagctacttgggaggctgaggcaggaggatggcttaagcccaggagtttgaggtaagcttcagcaacgtagtgagacctcatgtctattaaagaaaaaaaatctgagctgggcgtggtggctcacacctataaatctagccactcaggaggcttaggtggggggattgcttgagcccaagagttcaaggccagcctgggcaacatagcaagaccctatctgaattaaaaatcttagatggaagctgtatagcccataacttcgcctgttgtcttttgaggcaggaggtatttagggggatgagagagcaaaccagttctgcagttttttatgtggtaactctggcctcagactacagagctttctcctagcttgagaggctcctttctgcgctgtcagtagccttggaaacggtgttgttccctggcagtgtttacccagccgctgtcccctggcgagttcagagccaggtgatcggcagtgctcgctcttaatgactgtgtttcatctgcagggcgaacgctgttggagaagctgttcagccagcaggagaacgggcctccagaagaagcagagaagttttgctcccggatcattgccatgggtcttctccttccttttagtgattgcttcagggaaccgtgtaatcagaatgcccagacgaatgcagcttcgtttgatgtaagtaggagaattcacttctgtccgtgaggcagatttgctgtggaaatagcagctacgatgtgtatctgcccagtcaccctataatttaaaaacaacatgtgattcaagcattttttttccttagctgctcaacagctcggtatgtctgtttgtacacaaaaaaaaaaaaaaaaagaaagaaaaaaaactagcgtattaagtacatttgccaaacctccttttcttgacagatggtcactcaagagttctctagcctgctttaatcaacgatgattttaaaaattgatttctaaattatttttaattgtggtaaaatacagacaacataaaatttacctctgtaaccatttttaaatgtaccgtttagtggcatcaaatacattgacgtggttgtgcatccaccaccaccatccatctttagaactcttttttatcatccaaaataaaccctgtacccattaaacaataactccccatcctcctctttccccaagcccctggcaacaaccattctctttctgtctctatgaatctgactatgctaggtagctcatataagtggaattatacagtatttgtcctgtttgtggctgacttatttcacttagcatgatgtccttgagattcatccatgttggagcatgtgtcagaatgtccttcccttttaaggctgaatcatattccattgtatgtatatgttgcattttgtttatacgttcatccatcaatggacatgtgggttgtttccaccttttgctgtaatgctgctatgaatatgggttcataatgagtgaataatgccgctatgaacatgaggtacaaatacctcttcaagaccctgtaatcagcgatgattctaaagtggctgtaagtccatatgtatgacttggctggtcgtaggcattccttcagaagcagctccacggggcacagttattcttcccagtgggccggaggtttccatgggccctacgatgctattttgtgcgttcctaactcatgtttgtgtgaagtacggacgtgaagcagcattgtctgcttcatccccagctcccattcaccaagagagttaatactgtacaacagtaattcaccaggcatattcacaattcataatgaatatgaacacagctggattctcattgtcaaggcagagtattgccagtcgttctcaggtatgtggtatgtgtgtggcattggttgggatgagtacgcctctaaaacccagatgtgtaagaattctcgtggatgaaattctcataacaaaattgaaggttggctcacttgtgcagagcccaggatttttagttgaggataatgatttttcttttttttttgagacgtagtctcactctgttccccaggctggagtgcagtggcactatcttgacacactgcaacctccacctcccgagttcaagcgattctcctgcctcagcctcttgagtaactgggattacaggtgcgcaccactatgcctggctaatttttgtatttttagtagagacggggtttcaccatgttgttcaggctgttcttgaactcctgacctcgtgatccacccgccccggcctcccaaagtgctgggattacaggcgtgagccactgcgcctggccgtggtttttcatcatatgggttagttactttgttttgttgctgccaacagtgctctcttatcagccttcttcaatatataggaataaaataatgatgagctttaaagacaatgacaaagccccagctgaggtcaagatacgataataaataataaagtgtctatatctgcctgttcactttgcttcctcttctttacccattacagcctgcagtcttcctcaatcttcctttagtattaagaaaataaatcacataaaatattcagagagcttcttgattcttgatgcttcccatttgaaagaaaattccccatgttgtgctgtgacttgtgaagtttccttcctgagatttgtttacatttttcctgctgcaattttttaaaatgacattgcagctaatcgctgctaggtagatctctttctcttatgggaaaaaatatataacttaaatgttttcctcccttctcttgtatgacaggtctgtgttattgtagaggcagaacgctagaatgatggtgtgttaaatgttatagagctcagttctagaagatatattgatttggcaagttggaactataattagtatagtgcaggcaaaggcaaacactagccatgtctagcacttgctttttgattcaaactgttcccaagttaacggcattttcctcctttaaagcccagaagtgaacagtcttgccagtcgataaatgtagaattggataaacagaaaagaatagggtaatcctatttctttctctctctcttttttaaaatcaactaacctggttgtttcttatactcacctcactccatccttgtgttagagactagtaactcttccccatcatcttattttggagggcagctgggtgtggcatcgagcgtgaaaaacaaacaacaaaggtataaaatcccttaatgttgtgtgaaggcatttcctcagaattgggaatttctttccttcaacttgatgtgattgcattttgtcttcctttattcattggctctgtacgacctctctactcccccatcaaagtgaacataaaacaaagaagaaaattaaagatactcttgtatgaaatgttatgccctatacttaaatagcagctcagtaacagaactatgcgttcattggatgcgcagtcaaggagtttcttgaaaactggagagggcgacgatataatgatacagggggttctgaggactggggtgtcaatgagggatgaggaagaatgtgcttatctatggggagagaaattttcgataattagtatctctgctgatttccagaaaatggctgttggggacatttctaactaacaatcctcttgaggtcagttgcccttcgagacagaacatgctgtgggaataatgtcataactggtacccttcctacctacccccccccactttgttcccttccctgatgggttcctctcccccacctccttatcctctccgttctcatctttgcacttatgtatgcaattacagcaataaagatcttcagtttggggctcttcactgatgtagtttatgtattagcctacttgactcaacccttctgattttgttttatgttattttatacaattttagggcctaacattttgctttatcgagtgttatagaaagtatgaaaagacttcacattttctcttacattttaatatgattaagatgtcaagaactttaaaagacaaagatggctttgagggatgctgttaattcattcacagatttttaccaaatatattcattctagaagccaggcagtgttttaggctctggagatgtgttagtgagcaagagaatgtgttctgttgaaatgtgtttcctattcaaaatggagagagacagattttttttcagaatgcataggctaattaattgctctcagattctaataagtgatatgaaggaacacaggaccaacaggatggagtgaatggcgtgggggtaggatgagcgcagaggggagcctgtgagatgaggtctgtgggaaggccattccaggcagctcccagggcaagtccaaagggccttggaggagcacagacatgactcagaggaagctggggcttcaggagatgaggacagcaagggctcaggccacagcacaggcagggtctggaaagccgtggaaggaatatggcttttttttttttttttgaaacggagtctcgctctattgcctaggctggagcaagatcagaggcatgatcttggctcactgcatcctccgcctcctgggttcaagcaatttctagctaatttttgtatttttaatagagacagggtttcgccatgttggccaggctggtcttgaactcctgacctccagtgatctgccacgtcggcctctcaaagtgctaggattacaggcatgagccaccatacctggcttttttttttttttaaatgggagcttttgggaggttttatgcaggggaagaacatatttgtcttatatttcatgtggatcacctggcctggtcttggtttgcttgttgtggtggtggttgtttttgagacagggtcttgctctgttgcccaggttggagagcagtagcacaatcatggctcaccgcagtctcgatctcctgggctcaagcgatccttccacctcacccttccaagtagctggaactataggcatgagccaccatgcccagctaattttttaagttgttgttatagacagggtctcactgtgatgtcccaagttggtcttgaactcctggggtcaagcagtcctcctgccttggcctcccaaaatgctgggattatagacataagccaccatgcccggcccccagcctgctctttgaatgattgagtgtaggcaggcacagaagtagaagcaggaaggcaggtgggatatggcagtagtttagttctagatggtggctgtaggttggggcaggacggtgacaggggagatgaagaccagttagtaggttggggtggattctggaggtatggctgatgggacttctggtggggcagacatggcgacaagagaacacaaggaaatcaaggatgacttcttggtttgaagcagctgggtagatggttgtgccattcactgaggtagagaagacagctgcattttgggaggaggatataaggatagaactgctagcaagagaaaacagggatcatactaatgcttgctacttggcagattatattgttgacttgtagatcatggtatatttcagtggtctgaagctaggcttctttgtgtatttggaacctactctagtcatttctctcatgcctttttccaaatgagatccctttttttgggtcatatgcatattttccagccaaccacacttatcttacataattgttgattattcattaacaagctcttctaggatttctttaatcctaactgtggcatatattatatgatctacttacatcaccaagagttaagcaagtttacttgacccaaccatttttgcaggggtaggtgattctaaatctacttaatccttcatgagcttatctttaaatgtctgcctagcaggatatttttggatgcatgtttttggttgctggacttgtttgggtttggcagatctgctgattttgctaaacatgtggtgatcccttgctcaccagatgggcaagagctccttgatatgtatgtaaatggacatcggtttggatgaatatgtgagcgaagctaaaattaaagacaaggaagacataacaattcaggttaaaaagaaacccaagaaataagatcttgaacctgttgaaagatgaagctgttaatcaaaaccaacagcagccagtcccggaaaactaatgaaatatgctctactcattgttaccgtagacaaaaagaagacttaagtggacaaacagaaattattatgtgcatttgaattcatttttttttcttttttgagacagaatctcattatgctgcccaggatggagtgcagtggcgcgatcttggcttactgcaacctccgcctcttgggttcaagggattcacctgcctcagcctcctaagtagctgggattataggcaggcaccacgacgccgagctaatttttgtatttttagtagtgacgaggttttaccatgttggccaccctggtcttgaactcctgacctcaggtgatccacctgctttggcctcccaaagtgctgggattataggtgtgagccacctagcccagccttgaattcatttttttttccagagcaggaaaaacattttaatgctatttagtcaagcccacacagatcttttcctgagaagcaacaaaagccttgccacatctttcagctctaagagaatatagatatacgtatatattttttgctgtatatttatttttgaaacgttgtgtacagtatcaactttcaaagttgtttttattttaaagatggtattaagatgatacttaattttttcagaccaactttaacaattattttagctgatgattttgtttaccaaaatttatataagctatgtggacttgctgtatgttaatgcctgctgatgcctttttttttttttttttttgagatggagtctctgtcacccaggctggagtacagtggcgtgatctcaactcactgcaacctccgcctcccaggttcatgcgattctcctgcctcagcctcctgagtagctgggactataggcacataccaccatggccagctaatttttgtatttttagtagagatggggtttggccatgttgcccaagctggtctcgaactcctgacctcaagtgatccaccccctcagcctcccaaagtgctggaattacaggcatgagccatcacgcccagccaccattattgacattgctcttgccttctggcggtcatgcatgaggatttagctcctttatactccttccttgtctctccttcttccttctaatataattaatattgctattttgagttttctttcataatacttctttgaattttaaataatatgcttatgattttttgatattgtttcatcaaattcagatcgtatctcttgccaccccactcaccgtgtaatagttacactattagtgtctctacttttgccttcatttagtctgagccctgtttacctcccagcttctaccagatacacttttatgtttagggcatacttttaaggttaatagtttatctataagttgaaagacatatggatgctgtgtgaatattgcactgcagaggcagatatattctgattttgcttccttttcagtattccaatatcacaacccccaggccactcaaacaaggattttcctgggtcaagttcaaaagaattttgtggttttatttatttatttatttattttgagacagagtctcactcagtcacccaggctggagggcaatggcataatctcagctcactgcaaactttgcctcctggtttcaggctattctcctgcctcaccctactgagtagctgggattacaggtggatgctaccacgcccggctaattttttgtatttttagtagaaacagggtttcactgtgttggccaggctggtctcttactcgtgacctcaagagatccacctgcctcagccttccaaaatgctgggattacaggcgtgagccaccacgcccagctgaattctgtgtttttagtaaacaatcacttgctcaaaagtatcccatatttagtttagtttacatttggcttatccttttcttatacagggaactcccatccagcacaacaaagttttcgactgcctcttattttcttttttgggtgaagaaacatagcttttccccctgtattctcaatattttttatttttcagctcattcttgccatttcatggaattcttaaattctttctcttctaatttaggtcaggttcttcgtatttaattatgacttccgcttgtacttctcagctccctctttcccttacaacacctgtcccccaagcccctgccctgttattaggaacacaaagatgaaaagaaaggttctatcctgaactggcttacgattcactttaaagaaataaacacatggaagtaaattattggagcttagtggttgaagtgggctccacagtcaaagtgtccaggatttctcaactatgctgcaagcttaggtaaatggctggatttctgaaagtttatttcttcttgggtaaaatgaggaataaatatagtagtttctgagtgagaggaaagtatggatacgaataaagcattttgcacactacaggcatatagtaagtgttcaatgccctttgcctgttaccatgggtcacaatcgtgtttaggctccaagtggagatatttatagtacaaggagcaaaggggaaggtttttaactgggtctccttgataactcaggagataacacctggggcaagacctgaggcatgcgtaggagtttgctgtggggaacagccatgaaagaagtctataggtcgggtgcggtggctcacacgcctgtaatcccagcactttgggaggctgaggtgggcagatcacctgaggtcaggagttcgagactagcctgaccaacatggtgaaacccccgcctctactaaaaatacaaaattagccaggtgtcttgacacatggctgtaatcccagctactcaggagactgaggcatgagaatcgcttgaacccaggaggcggaggttgcagtgagccaagatcgcactattgcactccagcctgggcagcagagcgagactctgtctcaaaaagaaaaaaaaaaagtctgtatactgggcagcacatagaaaggcacaggggtgcatgtgagcacagtttctaagtatttccggagtataaattgggagaatgatgcgtagaaaggagaccagggatgtaaacaaagacaacctgggggtgcttttgaataattttgagtagttaagccataaacagattggcatttgtaaaatatcactgtggtggcagattggagaatggattgaagaaaactaaaattagcatctgagtgatcagaagagtgtctgaactgaaacagaggcagtgggattggaaagagccagctatagggaatctttaggatttagaaccgacaggacttgccatttgattggatgtgaggaagtggagtagatgatttctttgagtttctggttcacatttctgggatactgtactaaagagttagaatactaaagacggaacagatttcagagagaatgatcattctcttttgacatctagaatttgtgattatttgggactttatggaggctatacctcaagggcaagggaactgatattgctggcatagaccataggttgtatggtaaaatcatgagcaaataaatctcgtaaattaagagaaagttgaccaatcaaaagattaaagttcttaaggacagtggagaataattagatgtagtgagaatatagagagaatgaattcattggtggttgtggccagagggaaggatattggtgtttaagacttcagaggtggaggtgttctactcattccaaagaccagtccatggtggagaggtaggctcgttgtgattagaattgagaagctcagggtgttggctgggacttaatgtcccatagaatgtagaagagtcaaccttgagaagcagagagaggaccatgtggtaaagtccttgacatgtgaaggctataccaaggaggtttgtcagggtctgtgatgaggaggggtagatgctgatacccctgggtgatacgggctttggaagtggagtgggttacgctcaggatggacgtggaatactctctagatgatcatggagggctagattagagggtcgcggtatgagggaggattggaaaaatcacctttcaggttcagtcatcgtttggcttggatgatcacattggccttttcattaccttcttgggtttgcctgttactggtttccagtccagtctcctcagccttgtctagtggttctcattccagggttatgttgccctgcagaggacatttgacaatgtccaaagacatttggggttctcacagtagggagaggggtgcaactagcttctagtgggtagagactggggcactgccaagcattctaaatgcacaggacatctccttctttcccctaacaaagaattacaaaatgtgcaaaatgtcagtagtgccaaggttgagaaatctagtgatatatgtctgatcatgttgttttattttattttttgagacagcatcttgctctgtcatccaggctggtgtgcagttgggtgatcacagctcactgcctgccttaacctcctgggctcaaccgttcctctcacctcagcctcccaaatagctgggactaaatgcaaatgccaccatgaccagctaattaaaaaaaatttttttaatagaggtggggtctccttatgtggccaaggctggtcttgatctcctgggctcaagtgagcctactgccttggcctcccaaagtgacgggattacaggcatgaaacaccgcacctggccatgtcattttaattgtttctctatcagaataaactccagcttctttggatctccatggtcttccttctgcctttcaatactttcccacttctacctctcctgacccactttcctttccaaactcttttgccacgctgaagtgttattgattttcctaattgtccatgtcttctctcacttgtggggctctgtgggcacctctacttctgctccccactattatttcccagttagcctccactctttctcataggatgctattcagagttagatgccattccttcccagacatcttctttagccatctcagtctgcattttctctctcaaaggatatattacacatattataattgcctatttaccctgtaacacctgaatgcaaattaaatattgtgtgaaggttccttgaacaatgtaatgctgtgtccttgtgtttacctgacagatctccccagagtagttaggagtggtctctagtcctagactggattctaatcccatcttctccacccacttaagaggtgaaaacatttacccaaggtcacattaaaatttttcatgtctaataatctctggagttgttttgaagattaaatgagattaatttattaggcatttagcacaatgtctagcacatcatcaatgctaggtaattattagtgattggtatttaatattattgcctttcaagttcttattacagaatcaggcataactgtttaataaatatgccttgattttgtaaagaagagagctgtaggaaagccatgatgactgcagtgaggaggaactggagaatctattcagtgaattgtcttgaatgatcaaaggttgcctatgtttgataatcttgaaaacacttggactgggtgtggtggctcacacctgtaatcccagcactttgggattgggaagctgaggcaggaggatcgcttgagcccaggagtatgagaccagcctgggccatatagggagactctgtctttacaaaaaatttaaaaaattagccaggtgtggtggtgcacacctgtagtcccagctattggagaggtgggaggatcacttgagcctgggaggttgaggttgcaatgagctgtgattgcaccactgcacttccacctgggcaatagagtgagaccctgtcccaccaaaaaacaaacaaaaacaacaaataaagagagacagagagaaaaaagaaaacacttgaagagggagaagatgggagaagggatgggatctggctgtgttctggaattaatttattagtctgggagttgactctgtattggatctcttcttctgggcttattgccatcctcctttctcaatccattttacttaattttactgctataattaccacattccttcaccaaccctcatgcccccacatctttctggatggagtggaagggaaatggaaagagtagggaaagctacggggaggtaactgcaaattgtgaagggaaatctgtcatgcccacttggtgttatgttcatgaccatcccgtagtgactccatgctttccctaggtcagtctgtggaagtattgcacttgaatattgacatgcgttgtgcttatttagctctctgtgtgtatgtgtgcaagtgtctggcatacttgacagataacgtggcatggaagaatgaatcgttttgctttccctagcacctcaccaaagaatagggacctccatttcatctagaattcctaagacagggaggaaccagagagggctggagattgttttgctacacaacattgctcttctctttcaaagagttcattttattttcttgattggataatttcttgtggggtaaaatcatggatgggaacagtcaatacatataaataggaagaaatctgcttactgagttttctgtaagggatattttccaatccaatattacttttttcttatgaagtcaatttatttcataaagaatataataagtggatatgtatccagaagttcctactcgatttctttctttgaaggctatgcacttgttatatggtttgaaaaaaattgcctcgtatggggaacttttctttaccacaatattgattgtatagtgagttaaattatgtcccctctgtttgtagtcagatagttcagtgtgaagtagaaggctttcaatatatattttaaaaattgttaattctctggaatctatcattttcgaaaggactttgtcatgtttcttttttttttttttttgagacagagtctcactctgtcacccagttggagtgcagtggtgcgatctcggctcactgcagcctccgcctcctgggttcaagcgattctcgtgtctcagccttccgagtagctgggactacaggtacatgccaccatgcacagctaatttttgtatttttagtagagatggggttttaccatgttggccagagggccttgaactcctgaccttaggtgatctgcccaccccggcctcccaaagtgctgggattacaggcatgagccaccatgcctagtcatgtttttttttttttaatcaatttatagtaatttgtccccagttactactcagtgaatgtttgtatgactggatcttgtagtaatcagtaaccaagtttttatacatatgtgtttaagcatatgtatttttaagcatagttggagattattatgtttaagcctattttgagattattttatttttctgatccggtacgtgatttaataaatttctaatatgtgttgccatttatgtatcttatttcagagggcaaaacgggtgatgtttttcccccgttatgctcaattcaagtgcatcgttgcaaaagtagtaatgatagttattgttattcccccgatcatgaagttttctgagctcagaggaagtgctaccagtcagtagtttcatagattttagaatgcttcccaacagtaaagttaattgaagcttagaaaaatagatttttaaaaaacacactcgtggcaatcagactttttaagacaatgacatactttcttcatgattgttttttcctcctttaagaggattatgctgttttagatatccattttgactttcacaactggtacttttttttaatcacccatttggcaaacagtgttgggtgactcagaattcattttgaatttgtatgatggacttttattaaaaggggtgactcagctcgacttttctgtcatgattttcttttcttgtctttctcctgtagatgcactgaatattaattagttctattgatgtgacttgtatttcttctgacctccttttccttttctcaagagccaggaggagtataaaattgggaatctggcctggtgcggtggctcacacctgtaatcccagcactttgggaggccaaggtgggcggagcacaaggtcaggagtttgagatcagcctgacccacatggtgaaaccctgtctctactacaaatacaaaaattagctgggcgtggtgtgggtgcctctaatcccagctactagggaggctgagggaagagaatcgcttgaacccaagaggcggacattgcagtgagccgagatcgcgctactgcactccagcctgggtgacagagtgaaactccgtctcaaaaaaaaaaaaaaaaaaaaaaaaattgggactctatggcaaagtgaaggaccctgtacagagaaaacatgacttaattcaggagcttaaagggtttttttgtttcttgttttttgtttttttttaggtcctcccaatttgtactggactttggaaatctgaaagaagatttattctcctgttattacctttattgtctagatcaggggttggcaagtttttctgtaaagggccagatagaaaatattttaggctttagtaaatattttacagtgcctgtcacaactactcaagtccactgttgtggtgtaaaagcagccacggacaatacgccactaataagcacggctgtgtttcctaataaaactttgtattacaaaacagagcacctggccatatttggctggcaggctgtggttggctagcccctgctctatactcatgtaatacatagatagtaaatttattctctgagcttttctttctgtctcttaccatgtgtgctcaccagccagtcacacaatatttatggaatttttctatgaaaaatatagggccttttcttgttcttgtgtagcttactgtggaaaggggctactgggtgaacagacacggtggtacagtagttgataaagggtgatagaagagttttcaggttttgagtggtcgaggatgcccggagcctggagcccagtgtacaggaggaggaacagaagaggcgtcttaacaaatggtactgtggccaggggcggtagctcacacctgtaatcccaacactttgggaggccaaggggcagatcacttgaggtcagaagtttgagaccagcctggccaacatggtgaaaccttgtctctactacaaatacaaaaattagccgggtgcagtcgtgtgcgctgaggcaggagaatcccttgaatccgggaggcagaggttgcagtgagctgagatcacaccactgcactccagcctgggtgatagagcaagactccatctcaaaaaaaaaaaaaaaaaaaaaagtaaaaagaaaagagaaatgctgcctgggacccagaggcatttgtgaaggcttctggaagaaacgtttaagaagtgaaccctattctcaggagcagtaggaagccggtggagggtgttaggtggaggagtatgacgtggtcagtcgcgtgttttagagagagcattctgggtgttagaggagtagggactgaggggtgtgctgtgtttgtggttaggatgctggaagaccctgaggaaaccgttgcagcaatccaggagagaacagtgccctcaactatgaaggagttaggtagtagaaaatccttttatttttaaaaagtattacatgtgggccgagcacggtggctcatggctgtaatcccagcactttgggaggctgaggcgggcggatcacttaaggtcaggagttcaagaccagcctggccaaattggtgaaacctcatctctactaaaaaaaaaaaatacaaacattagtcaggcatggtggtgcatgcctgtagtcccagctacttgggaggctgaggcaagagaatcgcttgaaccaaggagctggcggttgcagtgagccaagattatgtcactgtactccagcctgggcaacagagcgagactctgtctcaaaaaacaaaaaaaaattgcatgtggtcacacaatttgtttttcccccttttaaaggacttccaagtatccagggagttgcactagtacaagaattggagcttttcctttaacaaatcatacatcttaattttcttctcataataccacaatagttaattaataaaataatcttacttatatttgggaaagaaatttgggattaaataaaaggcagattctaattatacttggattaatattgttactcctactaatctcaaactccaagagtcagaatcccccgaagggcttgttacaacacagattgctggccccacccccaagtttctgattcagctggtctgagttgagatcagagcatttgcatttctaacaacttcccaggtgatgccaatgatgccggtcggggaccacactttaagaagtgctgccttagagggtagacgtgagaagccttggggatttggttgctcatgtaaaggtaagggagtgggcagagacaaggagaatgtccaggtttctggtctgagcactagggtagatagagggtgatgcaattcacactgtgtgtaaaattcacaatgaggagcaggttgtggggatgattggttcaattaaaatcctactgaatttgaggatacctctttaaatatatacaaaaaggccattagttttttgtatctgaggtcaggagagagagcctaggagaagagagattgacgactcttcagtgtgtagatgatacttgaagccattatgctctggaaagtgccagtagaatgggaagcaagaagagactgacgtatagataaatacttacccaataaggggaaaaaagctacaaagagaatgataaagacaaaaaaacaagatattttttaaaaagaaagaaggagtgttaagtgatattcagtgttgccaagaaatcaagataaagactgaaagctactgataataccctagtagagaggaattccagtggagcgctgagagcgctgcccagatttcagcaggctgaggtttggagacgaggggtgtagggtgtggtgggaagatgggaggtgaagtcagtccacgtgtgtgattagctctgtgcacttgggctttttgctcaggtagatgtatcggaaggttagtgagggtgggaattgaaggtatcagcctaaaggggtggtttaaagagtaggctacaaagtcagaagaccagagagggtgaatggtagaaaggaggggagccaagattctcaaggtctggaggctgagggggttcggataggatgcctacaggtattattgggtagataaattggtttcagttggtaagctgctggagggtgtggcctggtgagtggtctgctggctaagattgcgtgaaggtgagtgcttgcattggcttactctcactttctttcttcctctgggtgtgaatgatttgctaatcatggttcccattccagtgtgtaaccagtttgcaggtcattgtcagttttttttgtactggtgctttaaaaaacaaacaaactgttttcagtatttaaaaacacattaagctttctatgtaccaggctctgttttaagcactttacaattattaactgttttaatcttcattacaagcctggtgagatagtttttattttccttttgcagaatacactgaagcacaagaaaattacgttcattttcttccttgctttgaagttccattaccaacacaaaaccttcaactgcatttttgcatttctggctatctctgaccctaacttgccacaacacagatccacgcaggttggaacacaaaactgtttcctcctttggatatatagtctgtaaaatgactgctggggcctgctgttttcctgagagtgacttctctttctgtgctttgtaattttacttcatgatatttacaggattttatatgtagaacagctcatgtccaggttaaattctgtggggggtgggtgggaagtctcttccattttgcagaagttttcaaggtatttcctgatttgcctatcaaacatagcctatcccaggatatgggaagaattttcctcttttaattatttcaagccatgtgtctgtacagtgtacatacttgactaatttgctgttttatgagggaataataaaaacaccaaaactgaagaagacaagtatttaatatagcccagttctcttaaattggcaagtgaagacatttgagctgaaaaggtgaagtgacttttctgtccaaaatagctttgacagagccagaatcttagtctcctgctgttcagggcagtttgctttttccccatgctgcactgacttctattagaaaaggaaaatttctttcatttacaacagagtctaactttcctcatactattggtagttaatggccctgtacatttgttaaatgtagttgggtaacaagtatttctttaacaaactaattacctgacttctgggtcaggtgaatgtgttatgaagaatcctggacatttttagagatctttgaaaaagatgtcagggatacttttaagaaaatactagggattcaaagatggaagacagcctaagacaagagtgaagcttagcatgagtaatctgcatgaaaaatctgcatgaaaaataacaggcaacggtattttatttatttatttatttatttttgggatggagtctcactctgtcatccagtttggagtgcaatggcacgatctcggctcactgcaaactcctccccctgcaaactctgcccccacggttctagtgattctcctacctcagcctcccgagtagctgggattacaggtgcccgccaccacacacagctactttttttatatttttagtagagatggggtttcaccatgttggccaggatggtcttgaactcctgacctcaggtaatctgcccaccttgacctcccgaagtgctgggattacaggcgtgagccaccacgcccagccatatactttaaacatcatggtgaaatgagaactttgaaaacaagaattttaagtgtctcctatgtttgcattttgtgcaatgaaatgaaggggacaggatagttgctgagactggatttcactatttactcttaggacaggagagaatgtgtctatgtggcacgttggacagggctcacatggtgcttctgagggaagtcctcagaagttgggtggttgagttgggacattcggcctgggggaaccagatgctcaaagccaaatctgaattggaaccacaatttctaaggtaatttagacttagttcccatgatgctatgtgtgaaaaacttggcaacactgattcattctgaagtcgctacatgagaggaggacagttttgatcacagactgatggaatgcactttggatgcagatcagaaatatatcagagtctccctgtagctttgaagttacaagggtgctgcatttaagcctgtaggtaggagtacggcggcttcattgtcatcagtgttttctgatattgagcttctcatggtcccagttaggctatattgaggctcctgctgacccagtcaggagcatgaaaagagggtgtctttgaaaaaaataaagctgctagtgcaaagccaaaatataactgagattaaagactgtaatgaaccgagctattttgaatctgaaagttacctcaggttttggtaaatattaattgtattttgattatatttactgaagatggatggacaagaagacttctgagccatggtcccagggtcataggacaagtggagaaaaccttttcatatttatttatttatttatttatattttttggggggggataaaggtctttattgaacaaccttatctcactcagtaacaaaagagcaggaggcaacaattcccccggaagtctgcagctgtgtccacccttggcagcaggatgcatggcccactgatacatcagctgcagttcagagcccctggtggtcacttagagatcataattggggttcttccgaaggataacaaaactttccagaatgggggtaacaggaagaaactcctcagtggccaattctgcccgttccccgtgggccaacgacactggggttgtatgtgtctggaaccctgtgatggtcttaggcttgccagcctggcccaccacatccactgcctggcctacatggacagacactggcaatggcctcagctcctcatcaaacgtaaccagcattcggggccgcatggcagccaccagcccatacaatacatagtgtgatttgcctagaataatgtttcgaacatccaggaaagagagaggcacggtgagcagcccagccatggccactggactcataagctgccagtcactgtggtaggggcagagggtaagtgtacccttccctaaatgtgtcaggccctgtgccaagtgcaccatgaagaggtcgttggggtccttggcatgatattgagctaactggcgcaacattgcagccagacgggcattattggtaccactgcccaccatgcccatggcaaaaatggagttataggaaacttctggatcagcatcatgagataatttgcttagggtatccaggatgttgatttgaaacagagatgagggccagtgctaaaggtacagccctccggagtgcaggctccccatatctcagcaagtggccaaaggttcatagtgccgtctctgcaccaatctcccccacagcaataagggcaatccccagaacagccactccctgatgtgctcccatgtcagcaggggtttcctttttgtccttgtccttcttttccttcttgcctttgtcttcctccttctctttggagtcaaagtgttcgctgcaaacgtggagcagctgctgcaccttcagcacattcccagagcctgcctatgcacacacatctaccagtgtgttggcaaaactgcggaatggctctgatgcaacctccagtgcagccaggattgcctcgatggcctcacccttccccaggtgattgagacccagtccaagaggaagccaacgagcataagagtccttgagctcagtacttctccctgatggtctgaaggatagtggaagttacatctccattgcaggaccccactgctatcattccacaggctagagctgtcacacctgccacctccatgctggactttgaatctcccatcacaggcagcagcagtgttaggacatcttcatgatttgagccagcgtaggccaagcctagcccaaagatggaaccaagtctcatggtgttgctgttgtggagaacatagtctgaaagcagtcccagagcagggacacactcattccagaccccagagttcactatgccacaggcaagaagaattcctgacttaatgtagtcctcaaaggagtacaggttacttctcaatctgaatgaggccaccatccacatcccacagcagcagcatcccaacagatgcagctgcactcaacattccgtggtccttgttcttgtaaagccatttgttgccatcatcgttagcagcttgtcttaaacaaaagctgcattcacaaagccactcacaaaagaggaggccaggttcatgcgggcagagtccacctgagagccactgcccccaaacctgttgttctctaggtgggttttgtagatgtcatcaggcaccttgggctccatgatgtccagctcccgagctaaggccaagaagttgctgttgagctgtacattggacatgatctctgtcaggtgctcatactccttgacatcttcactcagctccaggaacaccccatgccagcctagcatgaatgccatctgtttctgtactaccacatcctcgcaggatgtgaagatgtcttctaccagctccatgtcattgcgcatcagtgccaatctcagagctttaggaaagcggctaaactttcagaacacacccagggcacaacgcagtaggactgagttctcaggctcagacacataattcacacaactggtgagataaaggcagacctttgtgtatgcattctcatcaatgtccttctccagcatgtccacctgctcaatttccataaggtcacaggcctcatgctctgcgtcgtggaccatgttgtaggggacgatttccttcaccagagtgagcagtggctcctgctggaccttctttgcatcatccagctcctgccactccttagccacttctcctgccaggtgcctgatatactcatgactccatgatgccaattccttctgggagcctactagccgatacttgaggcactcgcactccccactcatggtcatggccaaaacagagatgatgtcagcagcaaaatgctcattctccccaggggccatgttctcatacatttccttcagtttgccatagtgtggacgcagacatttgagagacttggtcaccaaagtcatggaagttgtagaagaacgaatctgccttcgcatttcctccagcgctggtcgatacagggatgtgtccttctccccgagtcattccacaagcatctccagttcatcttgaagctgtttatcttcctcagacagctcctgttctttgtccttgtccccggcatcccgccgctccttgccgcttggcttctcatccatgccgctgagggccgccgctgggggctgctgggactgcaccagcgtcttgtcccatcctccctcctccatctccgctgccactgccctttattttttaattttcatggatacatagtaatatatatatgtatatattataggggaaaaactttttctttagtattgtatttgacatgcacttaatgtttttactacaatgaggcaatttttctttttctttttctatttttttttttttttttttttttttttttgagacagggtcttgctctgtgacccaggctggagtacaatggtgcaattatatgacactgcagcttcagactgtcgagtagcgaggaccacaggcacgtaccaccacactctgctaatttttatattttttgtagagacaggttctggctatgttgcacaggctggtcttgaactcttggcctcaagtgatcctcctgcctcagcctcccaaagtgctggaatcacaggtatgagtgagggtgctgggacaatgaggcgattttcatattcaaaatagatggcagccaaagccaggccaagggtcgaggcagaaatcttgcattatgtgtgttagaatgctacaacatttgacacaatagcctgcagacaggggtgctcaggagacaggttttgagcttcatgcatcaattagctggtctttgagggtgacatctgttggtacatataatcactcttcttcccaggtgtagattgtgtaactgaaggatagggtctacatatgccacgttcaaagtgatttaaaaaaatagtatggctgggctcagtggatcagtggatcacacctgtaatcccagtactttgggaggccaaggtgggcagatcacgaggtcaggagatcgagaccatcctggctaacatggagaaaccccgtctctactaaaaaaaaaaaaaaaatacaaaaaattagccagacttggtggtatgtgcctatagtcccagttacttgggaggctgaggcaggagaattgcttgaacccaggaggcggaggttgcagtgagctgagattgtgccactgcactccagcctgggcgacagagcaagactctgtctcaaaaaaaaaaaaaaaaaaaaatagtatggccaggcacagtggctcacacttgtaatcccagcactttgggaggccaaggcgggcagatcacttgaggtcaggagttcaagaccaggctggccaacatggtgaaaccccatctctactaaaaatacaaaaaattagccgggcgtggtggcatgcaactctagtcccagttacttgagaggctgagatgggagaattgcttgaacccaggaggtggatgttgcagtgagctgagactttgtctcaataaataaataaatgaataaataataaaaatttaaaaaatagtatatagtgaagagtagagtgcctgatttactatttagtaataaaacattcactttccttatagactgttttgaatttatttaggaacttgcccccaaataagtgaacaccaatctagtatcattattgtaccatttcacttgacagttgttacagagtctgttctttaaagtggaatcttgatagaatgggaatttcagactcattttggagataagctgtaaagaactaatggtggatgatgttctcctcagggtaaggtggaagacggggcaattagaccccgtggtgaatgcagattaatgaatctaagtgagtctatttggttttttcagtttagttggccggagtggaggagcaagtcatagaaaattggggcttttttttcttgtttcttcatgccatgccattcagtactgactgagggtcaagcactgtgctaagtacttaacatgatctcttcaattagttggtcttaacttaaataactcagttaatctgacttccattttctgatgtgaaaactgagacttagggtaatttgcccagagtcagttgttttgtaagcggcagaagatggaattccaacccacgaaggctgactctacatcttgtgccctttctccaccctccatagccaatctgttggccttttttctctttctgttgccatcactctggtctaagccgccttagtgttgaggctggtctcaagtggtagtcccctaattagtctccatgggtccactctgctctctttagttccttctccacaaaagagtgattttttttttctttttaaaagataggatttctctctgtcacccaggctggagtgcaatggaacaatcatagctcactgcagcctggaatccctgcactcaagtgatcctcccacctgggccccccaaagtgctaggaatacaggtgtgagccattgcacctggccttgatttttaaaaaccaagtccaatcttgttacacttggagatgctttaccctagggtcatactgtagctcttatttatgacctacagggacctcccttagctacctgctggctaggtcggcagcttcatcttatgctattctgtgttactgtgctgcctgggaatatttataaaatgcaaattcttgggctctgcttctggaaagtctgattgactagatctgagactgggctctgggaatatgaatttttgataagccagattcgggaaagtcttgctctagaaagtgtgttctgtgaatattagttgctacttcgccatggaagctgctcttgtcttttgttctttcactcacctttgaattctcaagagttacagctctgctcatgagagatgctgtgccagagctaagccttgtcaacaaaacgttttccctggattgatcattatggctttggttaacttcttgtgtgtaactgagaaactgctcagccaagagagacggagagacacacggagagagacagagacagggacagagacagagagagagagacagagacagagagacagagaccgagagagacaaacagagatagacagagagacagagatagacagagacagagacagacagagacagagagagagagacagacagaaacagagagacagacagataaagagagaaagacagagagacagagacagagagagagagagaaagacagagagaaagacagagagacagagacagacaggaaagatacagaaagagagagacagagagagagaaagagagagagacagggagagaaagaaaaagagagagagaaagagaggagagagagaaggagagagagagactgagactgagtttgtctccaattggggttaacagaatttttggtggaattaacaccactttttatttcttacaagaactttctctatttaattttctctatttgaaaaaacttgagatgtaaaatgcagatgttcatacccaggtatgttgctgaataaaaactctgtatattggccaggtgcagtggctcgcgcctgtaatcccagcactttgggaggccgaggcgggcggatcacgaggtcaggagatcgagaccatcctggctaacatggtgaaacccctaaaaatacaaaaaattagccgggcatggtgacgagtgcctgtagtcccagctactcaggaggctgaggcaggagaatggcgtgaacccgggaggcggagcttgcagtgagtctagatcgcgccactgcactccagcctgggtgacagagcgagactccgtctcaaaaaaaaataaataaataaataaaaaactcgtatattaaatgtaatcttattcaatatatactgtactcataagcctaaaccccagggtttttcttcctttatatattaacatgtgttttgaaatgtgcttttgaaatacaaggggttgtaaaacattgaacctgcagaatgtggacaataaagtaaccatttttgtacttatcaaagtttcaaacaaccctagaaaaatttggaaaacttttgcaagaatcttgtctgtaaggtttatattctatattaagaagttattatgtaatgcacatacagatacagataaaattacttttcacagattaatttttacagatatttttatctgcctttatcaccaagtatttgatttgtaagttgtttaggtgcacctcatatgtgtgcataaaatgaacaaggtactattcatgtcacatccatttcagttctttgttgttggttaattctagcatttgtactgcattaaattattttattgcagtgttgatttttattttccccatttgcactgaagagaatataaggttgacatttctttttggcatgtttctaagctcagcaaatatagcaaccgaggtgctaaatttcagtcaaaaatagaactcctcagcctcattttggaaatttcttctcattcatgcacagggattctagtgtcaaatttttagctctgccctctgctggtcatttcaaattatgcagaagaattctcagaacagtattcatttccaaatataaggagttacaggaaggcgtcttaaaatttcaccactgcaaaatatattcacaggaagattaattgtaatagctttacattttaaaatcaaaaattctttgaggtaaatttttgaaattagagagtagcgaaagctttatagatttttcaagaaaatagcatttgtgttttttttcccctgagtacaggtgaaaacaaatatggttatagttaaggtatcaataacattagagaaaacaatctgatatgtataaatgctaatgttgattaagtattttttgtcctcttctgatacagcacttactccattaaagtctcttgattggttaaaataacacaacttccttttcagataaaacagatttttaattaagttgtatttgctaaaggttatatgctcctttagctaaatgattaacccttattgaaatatgttttcacttttaaggatttgaacaaaaattttgtacagaagcttacatcaagatacaaagatcatggatgcttatagatacgatgaactgcaaatgaaaattgaggtcagccagccatcagacatagtcaacaaatcacgcgggtggaaactgggtagtctcttctgtgtacagaaggaaaatgattattgatgaaacaagacatccatcccatgtgctcattaattatgaacaagaaacaatgtctgtaaacacaaggaaagtttttacaacgcgagaccaagaaaaacagggaaggcatatcttgctcacagccttgttagatcaaggctttaattaaggtcaagctgatatttaataataatttgagactaaagtccagctaaagagtactgagctaggtgatgaaaattggttttgtttctcaactcttaccaacggtgtggcctcaccagtaaaagtcaaactaaatccctctagtgacccgtttaatgctaatagtcaccactttttgagctttgctgagggttttacacatgtcatttgatctttaacaccccttggaggttttgttaggtgtattttttataaagagactggccataataattagtagagaagcattgagatctaggtatgataaactctgaaatgcctgctcttaactgctgtgtctattatgcagaagtccctaaatgtattttggaataatcattacaggctctacatccacacatgttagcatttcacaggtatgttcaaaggcaaagagatgataggttttcacagtaaccttccctatatccatagcttcagaaaataagaaatatatggtagaaattaaccatccttctatgggtctatacatggatattatggataaatatcctggtttctaagtcccaattgttatgttgatttaagggcacggtctttagaaatgacttgttcaaattctctactttattctattgaagtatatttgggctcagtagatcaaagcactgcacgtgaaggcctacctcatttttaaatgatgataataataactgtagccataatggctatatagtctactaatgggtgagtcagtgcccattctaagcaccaacaagtcaccctagtctataagtagcagagcatgtcacagatcttaatctcagttccagcctgtttcctgtgctatccgtggttggtgacagatcttaaggctgagcccttattttagcttttctttctgtgaaaagagacccaacaggcagctttcatatatgtgctacttctgcttggtatgcgctttcctggggcgaattgttcaaacctcaccttcagctaacacctttgagaaaatgtaagctccggtgtgggcgaagtctggattctgagagacaggagtcttagaaaattgtgaatgcagtttcgtacagtatttctttttgcttaagaaaatctttatgataggcatttagatgttgccccactcagcttgagacttgctgtctaattttaagactgaatcactgaaaagtgtaagtctacctctgaaggagcagaactctctgtgtggcaaagcagaggggccaatggactttttctttattttatttttttgagatagggtcttgctctgttgtccagactggagtgcaatgctgcgatcatagctcactgcagccacaaactcctaggttcaagcgatcctcccaccttaacctccctagtagctgggactgcagatgtgcaccacctagccaatctaattttttttctttaaatagagatggggttttgccatgttgcccaggctgctctcgaactcctgggctcaagcaatcctcctgcttcagctggcctcccaaagtgctgggattacaggcgtgaaccaccatgcccggcctccaatggactttttaatgcatgtcactgttctaaattaaaccctgctatcagcacttttcatattcccttttcttattccttcttgagggtaggtaccaccatgggctctggcatttacagaatacacataattctcctctctgtctaatccagtcctgatcctctgtcttctctaggccctgtctagaatctgtgtgctcttcactggacccttttgatactccgagctcatttaaaaaaaaaaaagaaaaagccttacattccttttattccttcccttaactcaaaattggtttccttttataaggctatagtttttgaaattcaccccactctaattccttcctttggatcttctgctctcatagagccaggaggaggatgtgtgtgtatgtgggggtgggttccatatgcttaaccttttgtttccgtttccaaatttgtcctagcagtagcatcatgcggtagactcatacataccacgctctcttcttcttacgcttgttcccataattgctggagaacctcagcacagtggccctgttgcctgtgcctacttctgggatgagctaggactaagcagagacaacatcccgagaaactaatgtcatgctagaataccaatctatgaaattctatttctggaacctttgctgctctactaagcagatccatgcagagagaagcctgccactgtcttggcatttctcagcctttcaaccctgtggagtgtctattttgcaagtcaccacctccttctcccttactcagagccatcagtgattattggagacagctacaaaacagtggcaataaaatccactaaactttccagaggcccagtctgagttgttcaccctgtagccctgtgattttgggtgagttacttatttgagacttagtgttttcatctgtaagatgaggaaaatagaagagttttggtgaggatcagataaaatatcaggcacttatgtaagagaacattatagagtaagtgtggtggaatccccaggcgggtctgagtcatggctttgctgagtgattgctgtgtggcactggctggctcatttgtcctccgtgggcttggttcctagttgttaagatggagggttagtgatatttacaacgtgggctgtaaaggggctatggcaatgcccagcatagaacgagggctgagtagatgctagagccattttatcatcatttttgttgttatattcatggcaggactttttcgggcaaaattcttatatcatctcatttaatctcactcggttctcaaaaagtacccattgagctggttgtatttacagtttttttttttttttttttgacaggcttgcagttgtacgatcatagctcactgcagccttaacctcctgggctgaagtgatctcccacctaaacctctctagtagctggtaccacaggtgcatgccaccatgcttggcaaatttatttatttatttttttgtagagacgaggtctcactatgttgtccaggctggccttgaactcagggctcaagtgatcctctcagctcgaattcccaaagtgttgggattacaagtgtgagccactgctcccagcctgtatgatgctattttataggccagggactaaaggttctcacaggtaaatttctagaaaaagatggagttatgatttaagcccagaagttgcctcatttaaatttcatgaactttttgttggattatgataaagctaacatgcagtaaggggttcaagaagtgtgaacaccagccgggcgctgtggctcacacatgtaatcctagcatttgggaggccaaggagggtggatcacctgagttcaggggttcgagaccagcctggccaacatggcacaaccctgcctctactgaaaatacaaaaatcagccaggtgtggtggtgcatgcctgtaatcacagctactccggaggcaggagaatctcttgaacccaggaggcggaggttgcagtgagccgagatcaggccactgcactccagcctgggcgacaaagtgagattccatcaaaaaaaaaaaaaaaaaaaaaaaagtgttactacctacaaggcctacccagttaagaataattcatgtccgtgtcttaggagaacgtacgttctcactggagagagggagcagacagacaatgcatcaaagagaattctcagttcaaacacagtcaatgctgacacagatagtacagagtgctctgggaacacagatgaagcaataaacacccgtgtaagtggaggaaggccccattctagaaaggtggcatttgaagtggcacatgaaggttaagtaggagttttcaaggtggaaaagacaggttgttcttggcggaaaacctggtttctgcctcagagatacggttggctgtgaaagatcctgacacattgaagaaatggtgagcaattccagttggcagaaaccaaggtgggctgtgaaggatgggcggagacagggatgggtgatacctgttactaagggcatcttcataggcacatccgcaatcccaattccatctcagaatcattagaggtctcaaatatttgtatttactcatttttaaaggctagtcaagtgtagtagtgagaagaaggaaagagtagaacaaggaatttgatctgtaactgattctgaacaatcaattgaaatcaattgaaataactcactacccttggaccaaccagagatctcagatttgtagtagcaagaaaggaatatgctaattttttccttccttccttccttccttccttccctccctccctccctctttctttcttccctcccctcccttcccctcccctccttttcttttcaacagggccttgtgctgtcgtccaggctggagtgcagtgttgtgatcatggctcactgcagcctcaacctttcagacttaagcaatcccccccccgaccttgacctcctgagtagctaggactagagttgcacaccaccacaccctgctaatttttgtatttcttgtaaagacagggtttcatcatgttgcccaggctagtctcaaactcctgagctcaagcaatccacccaccttggctgccaaaatgctgggattacaggtgtgagcaaccacacctggccactaatctttgctttcgatgaagatgattttctgcatagtggagagctagctaccaggatgtggtaatcatgaaagagactataaatcttgttttaatttttatttttttaaccaatctcattctgctgcccaggctggagtacagtggtgcaatcatggcttactgtagcttctaactcctagcctcgagtgattctcccacttccacctccatctctggaatagctgggattagatgtgcactgccatgcctagctatttttaaatattttgtagagacagggtctagctatgttgccaggttggtctcaaactcctggcctcaagtgttcctcctgccttggcctctcaaagtgctgggattatgtgagccactgtgcctggcctatcaaaatgtttttaaactagatttgagagcccaaagtgattgagatgaataagaaacacattctacagacatatctgagatggaaataattcattttggtgacttactagatttagaaggtgtgaggttgtcaaagatcaaggtttctagttttgcagattagatgggcaattctttattgagtaatgttttttaataattcatgctcttaatttttgatgagcaatgcacaatttgttagtatataaaaggactctttagctatatcattaaaaaaaaaactgaccatctggactggcacttcaaaattagatacttttttttttttttaataatgactaaaacttggaatttttataaatatatatcaccgtaaagggacagacgtggtggctcactcctgtaatcctagcactttaggagcctgaggcaggagaatcccttgagcctaggagtttgaaaccacctgaggcaacatagtcagactctgtctctactaaacaacaacaacaacaacaaaaagtcagccaggcacagtggtgcatacctatagtcccagctactaggaaggctgaagcgggaggatcacttgagccaggagtaggaggccgaagtgtgctatgattgcaccactgcactctagcctgagcaacagagtaagaccctgtcaacaacaacaacagcaagaagtatgtcattgaaaacagcctcatgcagagggaaatgttcagctgggtttgaggcagataaaaaaaatccatttgtttaaactccaaaccattcactacttccgaaaatttattttaggatacttaaaatttattgattgccttctcttaagatgtctcggcagaggcatttccttttaattcatccatgttgctcttgttacatttccaaaggaagtgctacagaggtaatgcagagtcaggaaactggttccagtaacgctgtgaagggagtgagggcagggtttagtctctgaaatagactgtgcacttgcttcacaagagggattttttctctccaacagctgagttagagcaggctaaggtggtgggctgaaatcctagttggccctaggatggtaagagaaagcatccactcttgtgatgggacggaattatgcaaagtagaaaaggtttgtcaggacctgtctccagaaaggatcaagcagaatgcattgaccaagaagatggaatttgaacatctacaggttagtaggaatcactgaggaagtgggatatgttagattaatagatgcaattcattaatcgcctgaattataatatacaggaaagacaagaagaaagaaaaataagatctagaaacaaagaggatttacgttgctatttgagcaagcttttgaaagctttaggaagagtggacagaataatagaattattcaatttaaatggatttactcttaattgtacttgctgatatctagaaaatgaaagttaagaaaaaaactttatttcttagcaataaaaggcatttaactattgactttaaaaagtctaccgcacagcttacattatttaatatgacaaattattgtttcctctacagtgctgtgttaatagctaatactttatatagctaccttctgaagctgtagagaggcttataactttaacgtttcatgctgacatttagttgatcctagtttatctggtataaagtagttgctcacaattaattactcaagaactgagcttcgtgtatgtctgtggtagaaatctgtgggagtatgtgagttcattaaaaccgtgctttcctagtcattgctattagtttaacgctttccttgaaatatcagtcactgagagaaataatagcttctgttatggctctgcacagctgtactgaaagattttgttttcacttttcagaagtattagaaaagttgcctccatgtctgggttatctgaaggtgaaaccagtcaatgattataataacttcttttttaatttagaagggaaataaaggaaggaaggggagaaaaggaagtaatgaagtgggggaaaggaaggaatgaaggaaggaaagaagcaatattaactatagtaactgtagttggtactatttatggaacacttgatatttcaggcattatgatttgcaaaaattatctcataatatccccattttacagagggaaaattgaggttcagggagattaactattcaagactggcacttcaaaattagatactttttttaaaaaaatgactaaaacttggaatttttataaatatatatcactgaaaagggccagacgtggtggctcactcctgtaatcctagcactttaggagcctgaggcaggagaatcacttgagcctaggagtttgaaaccagctgaggcaacatagtcagactctgtctctactaaaaaaaaaaaaaaaaaaaagtcagccaggcacagtggtacacacctatagtcccagctacttggaaggctgaggccttccaggatttaaaattaattttttaaattctaagagcatcccctaatccccataagatcctacctctctcatttttttttcttgcagctggataatgttagaagatgtgttaaatatttaatccagccggaatgccaagttagattcagcttggatttgaaaaacaaaaccaaaccaaaaagaaaaccactggttttcaaggcctcagagcataagctttgtgtattacaggaaagcttctatgcttggctggaggtaggagaacctttctgtctttttctgaatttgctatgaccttgggtaagtcaactgacctccctgggtgatgttcagagcattattgatgttatataatttattcttatcaatgccacaaggttggctagatatgtttcctctctaatgtatgattaggaaagagtcatttagacttcagttaattttattttcttcaaggtcaaccaataattcagacatcaagttgaatggaaatgagcttctaaatataggtcaaatacttttataaaaatcacataactgcatctcccccccaccacgcctgaatttgatccatctcccaataagctctcccaagctactacttagtttctattgttagtatgttactgaccaagtgcaccagtcctgcattttgtgtcgaactgattaataattttcttctgaacccctaatgcatcccctattttgtccacactctcataaagactctagttgataaaaatgacaggctgaatattgctaatgtaatatttcaattcagatgtaacatctcttaaagattgagctaattaataccatgtttttatgtttcatattgtatttattattctttggtagcttaatgattacccttctacataatatttatatatagtcttttatctggaaccaataagaagatttgagaaaagttataaaactgctataaaacattataaaaactgtttcccgttcaacctgactgctttgtttcccttaattctgggattttccatcatttgcattatctaattgatgatagaatagtctcatggtaccataaagtaaaagactaacaagaaattttaattggtttgcttgtccaactgctacaaaattataaagactgcctttttctgtgttttttttttaaatccaccctatgaaacttatctttatgtctgtcttttctctgatacgctggggtttaaagtgagctgctttagcctcattagaaataaaaggtatcgtgttaatgtcttctagatgacctttagtaatttgagagatattctccatttttgtaggcttgacactctattttttccctgctcttctaactcctgtattctgtggcttctgtatttgacagtagtagccccactcccagcaaacctgagccgtcacatctctctcttttggttatggagttcaaaatggggttcctcacccatctaagagtcaggtattactttgttcttgctgtgtgagaagtggaaggctagtgaaatgaactaataggatcttcaaagtgaaacagaccatatccaacttgtagccatgtcggaaagcctgtccacactatcattacaagctcagaacagagtgtggggagaacctattctatttaacctaacctgtttgtggggagccagccctgactgccatttattacttttaattctaattacaaataatgcatgctcactgagagggtttgaaagtttattttaaaaagcccaagtcatggtggtatgaatgtttttgctctctcttgagtgcttagattttcaatccctcttggagcatatgaattatttgcatacatggagagatatatatatatatctgtgtatatatatatatatatatatatatatttgtgtatatatatatatctatatctgtgtatatatatatatacacacacacacacacacacacacatacacacatattcttttggtcttcagtttgttcctcatcttagaattttttttttgttattaataaaataagagtgttaacaaaacctctggactcaggtagtttcattggtgaattctaccaaacatttaaagaagaaataaaaccagtcttagtataaactctttcagaaaacagaggaggaatgaacactgcccagcttattttatgaggccaaaatttccctgatactagaaccagatacagtcattagaaaactatagctactatccctgataaatgtaaatatttattaatgaaatatttgcaaatttaatccagcaatgtatataaaggaatgcaaggctggtttaatatttgaaaaccaaatgacatatcaaaaccaggttaggttgattccaggaaagtaaggtcagcttcacatttaaaagccacatatttttcattatatacattgtatgtatatatacattatatataatgtatataatatatgtatataatgtgtatatatataatgattctccctagagattatcagaaaagtgtttgataaactgtatcaccattcatgacagaaactcttaggaaacttagaaatagaaaacttgcttaccctgataaaggacaattataagaaatctacagcaaatatcattagatggtgaaatattgaaggtttgttcttttaagtttgggaatgagaaaacaatgccactattaccactctgtcttgtactgaacaattattcctatatggtctagaagataaataagaaattggagaagaaataaaactgccattatttatgatgatgtgattgtatatgtaaaaatttcaaatacatttacagataaataattagaaataaaatttacataattactgaacacaaaatcaatatgtaaaaccaatgccatttctgtatcagcaaacaaaaattttaaaaatacttaaaaaataatacatttaagacagtattaaaaacatcaaataatctaagaagacactgaacagacatgtgcatggcctgtatgcagaagcctaataaacttcattgagaaaaatcagaaatgacaagtatatgaacagatttatcatgtttatggttttgaatttttttatttcatttctctccaaactaatagattagatgcaattctaatcaatgtctcaagggtgtgcgtgaatgcgtgcttgtgtgctttagtgggatgtgacaaactacccctaaactttatgttggaagggcctagaataaggaagatgatctttaaaaaaatcaaagtgggaggccgaggcaggcggaatacgaggtcaggagataagagaccatcctggctaacaaggtgaaaccctgtctctactaaaaatagaaaacaattagccaggcgtggtggtgggtgcctgtagtcccagctactcaggaggctgacacaggagaatggcgtgaacctgggaggcggaacgtgcagtgaggcgacattgtgccactgcactccagcctgggcgacagagggagactccacctgaaaaaaaaaaaaaatacaagtggaaagagttaatattccaggtatcaagacttattataatgcaacagtaattaagcattctagtatttgtgcaaggacatagaaacacacagtggaacagagtcacctaacagactctcatgtatatagacagttaatgactgacaaaagtggcactgaaaagcagcttaatacagccttttaaataaatgagatggggtcaactgggtaatcatatgaaaaagataatgaaagttgatatccatctcacaaatacaaaactttctaggatgattataaatgttaatgtgaaagataaaataacaaaccttctggaagataatatgggaggtatcttgttgcttatggagtaggcaaaaacttcttaaacaggacaataccctggctatagaggaaaagactgataatttggagtatattgaaagtaaatgggctgggtgttgtggctcacacatgtaatcccagcgctttagggggctgagatggaaggatctcctgagctcaggaggttgaggctgcagtgaactgtgattgtactctagcactcaagcctgggtgacagagcaagaccttgtttcaaaaaaaaaaaaacaaaaaattgtcaaaagaaattatgaagaaagcaaaagcagctgggcatggtggctcatgcctgtaatcccagcactttgggaggccgaggcaggtggatcacagggtcaggagttcgagaccagcctgaccaatatggtgaaaccccatctctactaaaaatagaaaaattagccgggcgtggtggcagttgcctgtagtcccagctactcaggaggctgaggcaggagaatagcttgaacctgggaggcagaagttgctgtgaaccgagatcgcaccactgcactctagcctgggtgacagagcaagactccgtctcaaaaaaagaaagcaaaagctagttatgaaacgattcacattttcttttttgtatgttgattttggtaaattgcatttttttccttaaaaattatgttttatctaatatttttaaattttggtgtaaagttattctaatatcttactactttaaagcctgtaggatcaatgttatgtttccttttttatttctgacattagttatttgtatcaatacttgattatacttgccagaggtttttaatattattagcttttccagaagacttctttggaggctatttattaacacttaaatctgtttccttctttctcccttctttgggctaaattgctggatctttttctctcctaaattctttagatggatatttaacatactgatttttgtaaccttctatctttttaatatatgcatttaaacctacagatttctctctaaacatgactaactgtatctctaaagttatggcaaatatttatattatccttcatttaaaaaatattttaaaatgctgactctgttgtctttttcaataatgtgtgatttagaattgtattgcttgatttccaaacatggagactttgttttatcttcttttattattgatttctaatttaattcattatattaagagaaaacatactcttcatttcagtatgttgccatttattgagatttaccgaagatgtgatcagctttcatcagtgtgctgtgtatgcttgaaaagaatgttttaggttaaatgttttgcttcagtccattaggtaaattgctgattatgttgttcagatcttccatatccttactttttcttttcattgtagcagctattgagaaagttattgctactatgtttgtggacatgtgtttttccttagagctctgccaatttttgctatgtgtgctttgaagccttgttatttgaagcacgcatatttagaattatttattttccttatgaattacatttttatcaatagaagactctcactttgtttcttatgatgctttttgctgtaaatcattatctgttattaatatagctatacttgccttctttagtttaaaatttacatgttatatctttttactttctagtaatcttaatcatttttataccttttcatttgtatcttcaataaagagcgtaggtttggagctcattttttatcttgacagtcttttgttttttactgaagtataactaagtccatttacatttaatacaattgtttaaatgcttggatttaaagtactattttattgtatattttctatttgtcttatctgttctatagtccttttccttttgtgtcttttggatttatcaattactctttactatttaattgttctctctggtattttaaaaactgtaattttaccaactatcttttattattattatttttatttttattattaagacaaggtctccctctgtcacccatggtggagtgcggtggcataatcatagctcactgcagccttgaactcctgggcttaagccatcctcccacctcagcctctcaagtagctaggactacactacaggggtgcgtcaccaccccaagataatttttatgtttatttttaaatttctaaatttttttgtaaaggcaagattttactatcttgtccaggctggtcttgaactcctgggctccagcagtctttccgccttggcctcccaaagtgctgagattacagacctgagccactacacctaagcttatcttttaaaactgcatacatttttgccttttttgttttttggtactttcacctatttcctgacaaattaagcaaccttaagacctgtttccagacaaattaagcaaccttgagattccctaacttaataaatttcacttccaagttacacattgttattttattttaattctttctatattatctccacaggacattaatactgtttatatgtttagtattcatttaatcttttttctttgttctttctttctgcatcttcaggaatctgtttgggattattttctttcagcctaaagagcatctttttgtatttcctttagtgcaagcctgctaggtgacaaattctttagtgtttttggtcttaaaataggtttctttcattttcttcttgaaaaatatttttacaaggtgtagaattctagtaggcagtttaaaaaagatcattacactatcttctagctttcaatgacactaacttcttaacaaaaataatctgtttattcattcattgaaggtcatctatttgtggctgctttaaagatgttatttttagcttttttatagcagttttactgtattcacccacttatagcatttatagggctttgaaatcagtagtagtttgatactttctttcattttatgttttcaggaatgatctttctatagataatgcttctaagttattctctttatgatatctttttttctgggactccaattatacataagttagagttcttcactgtatcttttatcctcttattttttctgcaatatttcccatccttttgactccatttcttcattctggattgtttctttttatccttctttgaatgcactaattttttattcagctgcttctaatctaccattaagtagatctgttgaggttttaatttggctatttgtcagttctagaattgctcagtttttaaaattatttctagttatctgttggcattttttctttctgtttaaaaatttaaatcagggtctcatgttgtttcccaggctgaagtgctgtggtgcgatcatagctcactgcagcctcaacctcctgggctcaagtgatcctctagcctcagcctcccaagtagctgggactacaggtatggacaccacacctggctagattttaaaattttttgtagggacggggtctctctgtgttatctaggctggtctcaaactgctggactcaagcaatcctcccaactcgacctcccaaaagtgttggcatgactggcatgagccaccactctttgctgaagtctattttgtcttttatcttcttggagagatttaacatagctattttaaaatgtgagtctgataacaatctaggatccctgtgtgtctttttctgttgtctgttttcctattgatttttgtttattttttatttatgtctccatttttctattttttttttttattttatgctgtgcaaatgcttagtttgatctcatcttttcccagataggatttatgtttgcttttgccggggacctggggcactaatattccaagatcaccttgaggtatgttcaaagatttagatgctttgaagttgaattttagccctgaaaatgttcgacctgccttcttctagttaatctttgttactagtgtgatggaattttagattctaaccccaagtgagaggtgttggtagggccagtctctcttagaggtcagggtcctccagtccctttccccggataatgtgtccacaaactctcacaggaatcctgtagggtgttgaggggtgggggcaaaaggatcccccatgagccaacctccgctcactaggtctgtgttctcccttgaatcctggcttgctaattttttcttaatttaatattccctttcctcttcccttcaagatatatataaactcacatttatgtgttccatgttttttatatatatgtatataaatataaaatatatatatataaataaacgttacctcattatataattatacgttatgtagccattagctcatgtattattattattaatttttttttggagacagagtttcgctcttgttgcccaggctggagtgcaatggcacgatcttggctcactgcaaactctgcctcccgggttcaagcgattctcctgcttgaacctcccgagtaagtgagattgcaggtgccagccaccaagcccagctaatttttgtatttatagtagagatggggtttcaccacattggccaggctggtcttcaacttctgacctcaggcgatccacctgcctcagcctctcaaagtgctggcattacagatgtgagccactgcacccagcctcgtgtattatatttacaatataaatttatagccaaatactttcacttggcaacataccataaacagattttacatggcattcaatgagatgtgattttaatagctcttgattgtcccactatatgtacaaattaaattttttattcttactgctatttttggaaactctactttttttcttttgtaaaaatgcaagtaacattggaataaatatattctagtacataaatatttttgcatatcactgatatattctccccttagagaagacttctatgagtggaattggtggttcaaaacagatgggttgactgggcgcagcggctcacgcctgtaatcccagaactttgggaggccgaggcaggcggataacctgaggtcaggagttcaagaccagcctggccaacatgatgaaacccaatctctaccaaaaatacaaaaattagctgggtatggtggtgcatgcctgtaatcccagctacttgggaggctgaggcaggagaatcaaaccaacttgggaggcagaagttgcagtgagccaagattgtgccattgcacttgagcctgggtggcagagcaggactccatctcaaacaacaacaataacaaaaaacaaaaaaaaccaaaagggataggtttttaaattattttgatattaaatttttctgtagaaaatttgtgccaatttgtatctcactggtagtaatgttagtgcttcttttaagcacagctaagaaaacactcctttgtcatttttattttattttgggtgggggggacagaattttgctctgacacccaggctgaagtacagtgatcacagctcactgcagcctcaaactcctgggctcaagtgaatttcccactttgtcctcccaaagtgcttggattataggtgggagccatagtgcctggcctatttgtaaacatgtcagagatctcagttcatcctggggtttaatcttttgatgttatcttattattcttttacatttgtcattttacatttgtcattttacatttccatttttaaataagcccttttatttaaaagccaaccatagatgctttgggcaatcacatttatgtgttccatgtagagctgttttaatggctatgttatagtgctgtgtgaagattgtggcagaaatagaaattataagtgtgaagatcatgcaattatttaaaaaatctgtattatttataaaaccatgtgcactatgattacagctacataaaacattcaaagaaaatttagaaaataggctgggcacggtggctcacacctgtaatcccagcactttgggaggccgaggcgagtggatcgcttgaggtcaggagttcgagaccagcctggacaacatggtgaaaccctgtctctactataaataattggccaggcatggtggcacactcctgtaatcccagctcctgaggaagctgaggcagaagaatcctttgaatgagccaagattgcgccaccgcactctagcctgggtgacagagtgagactctgtctcaaaagaaaataaaatttagaaaatatacacagtggatgctgtggtattatgatactgattagttattgtttttcttatcttcccctctcaaaacaattctatagggttgtgctattattttttaataattaaatgattaacgcaaacccagatattgtgagttcaattcaggctactgtcagtagatctaccttttatccagccagtcagtcatcttataaatggttcaaatgagttaaaataaatggacatctcagctgggcacagtggctcacgcctggaataccaacattttgggaggctgaggtggaggatcacttgagctcaagagtttgagaccagcctgggcaacatagcaagactccatctctccaaaaaacaaaaacaaaaaagctaggcatcatggtactcacctgtagtcctggccacttgggaggctgaggtgggaggatggcttgaactcaggaattgaaggctacagtgacctgtgatcacactactgcacttcagcctgggccacagaatgagaccccatctctttaggtaattaaataaatacggcctttttgttatttccccaatagtaataatgtgtttattgctacctagtccaaaaagtatttacaatgattaggaaaaaaagatatagtaagaaaataaaaaggtgctattttagtgaaaagattaaagaaaagaaaaaacaatactgaagtggaaccaggaatgagactaatcaaaaacacatattccagaatctccaaacatgtggcaggtgggccatatgtgaatttcactgtttttttaaataacaaaaatgaaaagcacatctgatcaacacaatttatattgtccctgagattaaaaaaaagaaaacacaaatggccaggtgtggtggctcatgcctgtaatcccaacactttgagagggccaggcaggtggatcatgaggtcaagagatcgagatcatcctagccgatatggtgaaaccccgtctttactaaaaatacaaaaattagctgggcgtggtggcacatgcctgtagtcccagctaatctggaggctgaggcaggagaatcgcttgaacccgggatgcagagactccatctccgtctcaaacaaacacaaactcaaaataccatccaactatttagttctttagacagagctgtgaaattataagatcaggaataaatgtgtcttcagagccctcctacacgagatattctgtaatgggatgggcattttcagtagtcttctgtggacttggcagtcttgtctcagatatcacacccaagcccaattcagttgaggcaattctttttgaggtcagtaggacaaggtgtagagccctctgctggcctgagatagatttatctacataatctagggatagattttatttgatttgatttgatattgttttgttttgtttttgagacggtttcactgtgtcgcccaggctggagtacagtggtgcgatcacagctcactgcagcctcgacctccccccgggctcatgcattccttccgcctcagcctcaagtagctgggaccacaggagtgtgccaccacacttggctaatttttttatgtaaaatttttttttctgtagagatagtcttgctatctcgtcctggctggtctccatctcctgggctcaagtaatactcctgcctcggccttctgaagtgctggaattataggcgtgagccaccagcacacctgaccaggacagattttagagtggttataaagaaatcagtgagctgcatacttcgaggcaatttttatttttaatatttttttccccttcatgcaaactgtggcatcaggtgggagatagtactttatggaatatctgggatatagttaccatattttgctactttaatatgggtctgctggccttgatagacaattgagctggggcagtgctgatagtttcttattaagagaggaacttaaactcagattaattcccacacagatggacattctgtctctactcacagataagccaatcatggaatgagaatagcaacagttcctctcagacagtaataatctaggttctgcattaatatacagtccatccctggcgccgaccagaacccgtggacatggtgaaccaggttatcaagtgcaaggctgcagttgcctgggaggctggaaagcctctctccgtagaggagatagaggtggcacccctaaaggctcgtgaagtttgaatcaagatcattgccactgcagtttgccataccaatgcctataccctgagcagagctgatcctgagggttgttttccagtgatcttgggacatgaaggtgctggaattgtgggaagtgttggtgagggagttgctaagctgaaggcgggtgataactgtcatcccattttacatcccacagtgtggagaatgcaaattttgtctaaatcctaaaactaaccttgccagaatataagagtcactcaagggaaaggattagtgccagatggtaccagcagatttacttgcaaaggaaagacaattttacattacatgggaaccagcacattttctgaatgcacagttgtggctgatatctctgttgctaaaatagattctttagcacctttggataaagtctgccttctaggttgtggcatttcagctggttatggtgctgctgtgaacactgtcaaggtggggcctggctctgtttgggccgtctttggcctgggaggagttggattgacagttatcgtgggcggtaaagtggctggtgcatcccggatcattggtgtggacatccatcaagataaatttccaagggctaaagagtttggagccactgaatgtatgaaccgtcaggattttagtcaacccatccaggaagtgctcattgagcggactgatggaggagtggactactcctttgaatgtattaggaatgtcaaggtcgtgagagcagcacttgaggcatgtcagcagggctggggcgtcagtgtggtggttggagtagctgcttcaggtcaagaaattgccactcatccattccagctggtaacaggtcgcacatggaaaggcactgcctttggagggtgaaagagtgtagaaagtgtcccaaagttggtatctgaatatgtgtctaaaaagataaaagttgatgaatttgtgactcacaatctgtcttttgatgaaattaacaaagcctttgaactgttgcattctggaaaaagcattcgaactgttgtgaagatttaattcaaaagagaaaaccagcgtccatcctgtcgtgatgtgatgggagcagcctaacaggcagagagaagcgcctcctagaccttcagcagctactccagagaatggtgtgatgtgcgtcattcatgaatctctgtaatcaaggcaaggataattcagtcatggactggactctcctccacataaataattgctagctcattaaggaatattttaacataataaaagtaatttctacaaaaaaaatacagactattggacaatgaaattttcttgcatatggaagaaccagaaaaaatgttgatctgaaatattttaaggtgggaaccaaaccctcatcttacctgtaaaaatctcagcgaagcactcttagaatgcctacctttgagcattgttattttctggtggacacactatgataaattatttgtggattatagctctgagttattttaggtgttgttatttataacctagtgaaaagatggggaaatagctgctaaaagtaacttttctctttcttaagctagcaggcctgtagcctactttacgccacttttaggttgtgtttttaaagtttctcatatgcctatggtagaaagtttgttttctttaataggaagatacaatgtcattccgcaaaagccaaaacagatctgaagaatttaaggatgtggagtggagtcatgaaaatgcatccctgctttaacccaaaaataaaactgtgatttgctctgttaaacaattcttatccatcctgaccttgtccttaatactcacagtatgttgattatttatacttgacattcctgagaaaacaagggaatgtaggatttggtaactggtagctagaaactcatataccctattcgggaaaataacacatttgtgaaatattacacatacacatacacacacacacacacagaaaaagacatttatggatggttgaggaaatatcacagggcaattgttaattgaatgcaaaactggttgacaaacagcacaaatgccaagaaaactcagtttgctcaactacttatagtcatgcaaagagcacagaaagatttagtgctggttaagtagagatgatgtgtaggtgagataatgattttcaattcctctgaaaaggatttttttaaagaaataaagtgtgactattgtaatcaaacatagatttttaaaattcaaaacaaatagtattcatggcatattacatttgaatatcaccatgtaattttcatagttcttttcacatatcatttactcttccctcatgcaagctcccccaaaaagacaagggacacatttttcctgatttactgatgagaatattgaggctccaaaaggtgatgaggtttgcttaggggggagcaatgaatatatcttaggaattttatctattccatgttttttctttaaatagttaattaccaataggtttagacataccagataacctgataccttcctttttccatatgatacccacaaagtttccttttggttccttggtaaacaaatgaagaaaatgagattagcagctacagcctctgcctatattgaccagccatctcttttatttatttttacttgataaatgtgttaattcagtaggcagccagtggcccttttttttgttttttgttttttgtttttttttagatggagtcttgctctgtcgtccaggctggagcacagtggcctgatcttggctcactgcaacctctgcctcccaggttcaaacaattctcccgcctcagctttccgagtagctgggactacaggcgcctgccaccacgctcagctaatttttgtatttttagtagaaaaggggtttcaacatgttggccaggctggtctcgaactcctgatctcaggtgatctgcccggcttggcctcccaaagtgctgggattacaggtgtgagccaccacgcccggcctcaagtggcttttatgtagtcatcatagcactgtccagagctaggggagatttacaagacctgtgtccacccttctcatcctgaagtcgtttgcagtcaatttgaggaaacatgatatacactcaggactaggggacaagccactgttttggatagtacaccattaagtgttgaaatgtggggtgacaggtgtgctgagttagctgtcccattcaggagtggcctttcagcagaggtgggtctgattcaggtgaaatgggacttcaactagattttttaatgattgattagactccttgagtgggtagagctggagaaggcattctagtggcatgaagcttggtttaggaaacaagaaatgaatctgggaaggaagatggtgggaatataggaacgttgaaatgatatttaagttgaagagttgggatttgattctgcagacacggaggaaccatggaagaaatctgttttgcttattttctgctagtggagctacgtgatgaatgggaggctttgagattactgttacagcccagtaatacattacagttctgaggtgtggttcaaagacagggggactgaccagatacttttgtttgtttatatgaggttttatagagtgcttttagcatgctttgtattttggtgaatgatgaaactcagtgagatagtttatccccttggttgttggtgctacctcttttatatggaaaaaactatgtctgaggctgttagtaggatgatggctctctaggcaaaagtctttttgtggttgatcatgatgccaggtctggagcctctcagtcactccagccctgcttctctccaccaactcccagaggagctggtaggccaagcatttttctaagcatgctatagatagcatattttacacatgaggaaccgaagctcaggcttagaagcatgctgttgtggccaatttggttctgctactctggaaaatattaggagggcaatggctgcaaagatttaagataggctgttttctggggctgtgtagaagaactgtagctaactgtagctaaaataggtatcattaccactaactggagggcggtgaaggatagagtggagagggcattacatttcagaaacttcttttctttctgtttttttgagacaaggtcttgctctgttgtccaggctagagtgcagaagcatagtcatcattcattacagcctcaaactcccaggctcaagtgatcctttcacttcagcctcctgagtagctaggaataaaagtgtgtgccaccatccctggctaattttttaaaaatttttaaatattctgtagaggtggggtctcactgtgttgcccaggctggtcttgagctcctgggctcaagcaatttacctgactttgcctcccaaagtgctgggattataggcgggagccacatgcctggctacagttcagttgttttcttaagccatcacagtatccatgttacctcttaagaactgacttgtcaattttatcatgtgctgctcttgaataagtgcatcttagctatccccaacagccttgcatttactgtttttaaaaaaattattaaaaaaattttaactgttgcaaaatacacagaacattaatttaccaccttaaccattttaagtgtccaattcagtgttgttatgtatattcacattgttgtgcaatcaacctccagaattttttcttcttgcaaaactgaaagtctgtacccgttacattgcaacaacttcctatcccccatctctccaatccgggcaaccaccatttgactttctgacaatatgaatttgacaatgttatgtacctcatatgggtagaatcatacggtattcgtctgtttgtagcaggcttatttcatttagccaaatgtcctccaggttcatccatgtggtagcatgtatcagagtttccttctatttaaaggctaaataatttcccagtttgtatatatatcacattttgtttatctgttcattcatggatggtcacttgggttgcttccacctttcggctgttgtgaacatgctgttatgaacataggtgtacagatgtttctttgagatcctgtttttaattctgtggcatatatatccagaagtgtaattgctggatcatatagtaattctatttttaattttttgaggaactgccatatattttccatagcaacagtatcattttacggtatcactaatagtacacaatgctttcaatttctccaatccttgccagcacttatgttctatcttgttgttgttgttttggatagggccttgctcttttgctgagctggagtgtagtggcgtgatcatggctcactgcagccttgacttccggggctcaagtgatcctcccaagtagctaggactacaggtgtgtgccactatacctggctaatttttatatttttgtagagatgaggttttgccatgttgcccaggctggtgctttattttgttgttgttgttgtttgtttgttttttaaatagccattctcttgggtgtgaggtgatttcattgtggttttgatttgcgtttccataatgattagtgatattgagcatcttttcatgtgcttgttgactattttgtgtatcttctttgaaacaatgtctattcaagtcctttgcccattttaaaatcaggttatttgctttttgttgttgacttgttaggagttctttctatattcaggatgttaaatccttatcagggttgatttgcaaatacttcctcccattttgtaggttgccttttcactctgattgtgtcctttgatgcacggaagttttaaattatgatatagttcagttcattgatttttaaaaaaatttttgttccttgtgcttttgttgtcatattcaagaactcattgccaaaaacagtgttaccaagtttttcctgtatgttttcgtctaagagttttgtagttttaggtcttatgtttcagtctttgttccattttgaatttttgtatatggggtaagaatttactgggttttaatgaaagcaaatctcaaatgaagttttgcccaacatgtaaacatttattaaacatacaacattagtttgcacaagagcctatccaagctgacttgagagtcagagcgtggccagcttgccactctggtaggtgcttgacctcaccttgtgtgaaaggtccatgtgatacaaacaccaaggaataggattctgtgaccgactgttggcaacaggcaaagagacatcctcctaaactagaggtgggaggtagcactctccggctgtcacaccttgacatcatcccttgcctgagttttatcctttttaagtgtggggatgttctctgatgttgtactcaatctacttacattgaattccttcaggttctccaatgatagctcattgtctaacattcattatgttaattaaagccactaatttcaccaatgaaaaactatttctgatattcagtatgctaaatagcgcagtttctggtgttggtcgagataggatagctggaagatacatgagtagctcaaatgcttagccaggtctgaaatgtggtcctttctgatccaacgctgaggctaaccccaggaatctgaattctcagttaggaccaatgactgtccctaaatgtaaagcttaaactaactggtctatacattgtatcttcctgttcatgctggagattattttatgaatttcttaatttgttaaatacagaaatagcaacatccatccgataactcatttactttgtagtctcgacccagtgattacagtggttttttgtttttcacttccaccatactgttcttctctttgctttacttgatgtggatcaaaggtattagggaaatacaaccagttaagaaaaatgtcacaaatatagggcatgcatatattgagcatatgcatcctaaaatggttgaacacattgttattctgaaatcctaatgagcagttttccaaggtgtttataggccatggagcaggcttccctgtgagatttgtagtttgtctcctggccctaggtatagtactagctgctttctcattctgtccagattctgttggtctgtagctggcgaggtctttcttggccagaagatccctattcaattctttttttttttttttttcttagcaggttcattcactgtttcatggtttctctcccagtttccaacctggaccccagataagtcggtttcctgggccttttgtggttgaaggcacgggagctattattgtcctgtggtgcccaagtacagcctgtcctttgacattcccacaagtatataaacaattttaaaagggatatcatattcagatgaattaaagatgctagttcagggagttctctgattgactgtctggactatctgattttataattccctgcagggctacatagcatctctccctccaaagaaagaggcgtaggttttactatagaaatgaagttgaggcaaatgtggttataaagataaaatgactgcgtgaaaaaaatgtgtatcttaggaatctacactgaatagtataaaaatgctgttttaatgtttcatatatgtatgcatatataagtaatttacatagaaatgattttgcaatgtattagtcatggcttatttttttgtaactgaattaatagcatttcaacattttttatttttaaatatagcaagatcaactttatacctgggctgcagttagtcaacccacacactcattggactattcagaagggcagtttcctaggcgagttccatccatggggccaccatccaaacctcccgatgaggaacacaggctcgaggatgctgaaacaggtaaccctttcctttgtcttcagagataactggaagaggcaagatagagagagagaagttttattaaatcttagttttaagtaatcttttatttttaattgcatggcattcagatataatcttcaaaaagtttttactttggggtcttttctctctttgttccttttgttgtcttattttgtgttattggctgggaagatagcgtgagatcagcctcaggtttatttggaggagttcagcaggatgatgaccccaagcctggttttaagaaaacactttatatttgtcatacagaactgagaaccatatttgtgtaacaatcaatgctttatggaatatggttgttttgtccttttttccccccttcttcttcttcttctttttttttttttttctggacaaggtctttctctgtcacccaggctagagtgcagtggagcatgactcgctgcagtctcaacttccctggctcaagcgattctcccaactgagcctaccaagtagctgggactccagccatacaccaccacgtccagctaatttttttgtagagccagagtctcactctgttgcctaggctgatccagactcctgggctcaagcagttctcctacctcggtctcctaaagtgctggaattacaggcatgagccaccgcacctgggcttttcttcattttgttgtaataaattcccaacttcctcctggtggactgaccaggcataaatattgatttctgaagcatgagtgaggagtaaatagaagaacatcattgctattcatagatttctcctccacccgattttcctaaatggtaacatagatattagagttaagaattttgattttttttttctcattggctcatagagaggaagacagtcattagaaacttattttggatgcatagtagaagagcataacttaaaagcatggagcttgggctctgccaacttattagctttgtaatcttaggcaaatttcctaacaactgtattcagttttctcatctgtaaaatggtgatgagcatagcatgtactgtgtagggctgttatgagaattataggcatttatatgaagcattagaatgtagaatgcagtgcctagctccgtgtatttaatattatttattacaattattatcattgtttcatgtcattgccttattcatgaggtccctttcaaccgacaatgaccaacaatgtaaaaggttttattccagtcccccacccaaagttctgcacttgcctcccatttgcatcccagtctctggaggaatgaatttgcgccttttttctttccactgatgcactgaaatgagggcccacacttgaccttgaatctcccttttgagatgtccagtgcttttgaaacactgtttgatattcactaggtgggctgtactccctgaaatgaacaacaaatgagagagagggtgtaggaagtgttgttccaggaagtgttgttccaggttactgagtttatcgtaacacttacagagagcagtttctcaaaggccaaggcagacttcctttaagcaaagatcttcagagatcagagacctctaacatgatagcacctgaaaatcaagcaagtaaaaggacttttcgttttcaaaggaaaacacacaattaaaagtattgatcccattttctacactactctatttatgataacatttattgatacaaaatacttaggggtagatatagttgaattaatcagttgcatggagagcccttttatcccatgttttgcatcattgattgggtgatattttcatgttttctgttccctactgtatcattctcaacttttctaactgaaacatttatatgatattcttaaattttagggaactttataaaacattatgaaacattttatgttgctggtatatatactggtggagcacttgactcgaagttaattgaatgtgataacctgaattttagtttggtaaaagatgatagttggaattgataccaggaagtttgtcacctggtttttgcttcatgatttgatgtagcttgcaaaatgctagagcaagtgatttttaatgaaataacttgtctcctttttaaaaatgcattcttgaagaggatgatggaggtaagaagtaatttaacttagtgacttatttttctcttgttgatctataaaccccagcagtcatatagcattttttcatcagagtgatctaatgggtctttctaaacttcttctgttgtgactccctgacgtaaatttggagagacacttccatgagacagcctcgttcccagaaccataccacactctcttctaatcagtcagttgtaagagtgggcatgtcagtatcataggtaacctttgcctacagtctcatgttttacatcaatcacaaagtttgataatataattattaatagtaatgatctatttgtagttaactgataggtgcacattcttctgtagtgacatcttggttaaatccactgtatataacacatgaccccttttttttttttttttttttaatggattcttactctgtcacccaggctacagtgtaatggcgccatctcggctcactgcaacctccgcctcctgagttcaagtgattctcctgcctcagcctccggagtagctgggattacatgcgcccaacaccatgccaagctaatttttgtatttttagtagagacagggtttcaccatgttagctaagctgctctcgaattcctgacctcaagtgatctgcccgcctctgcctcccaaagtgctgggattacaggcatgagccactgtgcccgggtgacccctttctattttaattcaaagtgaaagagttcagtgacattttctgaagaagaaagacttgcaggtctagcttagaaaattgaggacttttttttttcctgcgtgcttcgttcgttgtttttttcagctcattttttgttgttgtttgtttgtttttggagtctcactctgtcgcccaggctggagtgcaatggcatgatctctgctcactgcaaccaccgtctcccgggttcaagtgattttccctcctcagcctcccaaagggatgggattacaggcacccaccatcatgcccagctaatttttgtatttttgtagaaacggggtttcaccatgttggcccagctggtcttgaactcctgacctcaggtgatccactcccctcggcctcccaaagtgctgggattacaggcgtgagccactgcactgggccttttttccagctcttaaaattggttacccaattcacatgtccagctagttcagatttgtggtactctgtcttctgcctttttcatgtatctcactttaactgcatagggagcatctcactttaactttttcacgatctgttctgtgaaagatggtgttttcctcctttatggattggtgaaggaactgacccttctttgtatgaattggaagggctgaggccatggtgaggtcttggtgcctcttctcaccagtgagttgcagattcctggcagtcctttgttctcatcctggctccctctgcagttggcattgtctccacagatgggcctaaagtgttaacattgaccttttgaagtctgcagaacacccctgaaggataagactggctgggaaaaaaggaagtaatgtgcttcccatgttggtggcattaaacaaataaaaaacccaaaccagttggtggcaaaaacattgatacaaagaaaccctttctatttatcattttctctttatcttctccctcagtttcccttggctatacacagcagtctcccacccatccatggctgtttcccactcatggacccttttctggagtcccatgacatcctattcatctctctgtcatctgaatgctttacgtattgaatttttctgtttatacatatacatgtcttccccatcagctttcagaatttcaagactttctggcacatagtatgtacttaaatatttgagtgaatgatgaaattcttttgctggaaaagatctaaataaacatctacttagcacattaatgcaagatttgagggagagttttgtatgggctaaaacagttcttggaccaatttaggggctcaataccaagtttcaaaggtcattcaatagatttgaacaacatcaaataattaacttgagttttcaaattcatggagaacctggagcaggagcaaggtgtgtagatgtgaatagggacttgatcattgtcgtttcctctgtggaaaattaaatcccttccctttctttgaaaatgtgaatggctgagaggaaacagagaactgactttttagaaaggcaatcaaggcacagaaaatcctagaagaaaatatatggaagaggatctggtagaaatatggtagctgacttcctactgcaaggaataaaagaaaagaaagaaacaaagaaccatggcagaagattttcatgtgaaaatcctttaaaatgcagttgtgcactggctgaatacattgtaattcacctttgttccaaaaaaagatttgagcagcttataaatatgtaaaatgtacaaaaggatcataaaggaatatagatcaaacgaaaaggaatttaggatggaacaataaaatgaagctgagataagacagccaagtgaaatgtatctcataaggatctgccatttttaaaggtaattggaaatttagccctcaggtgcaaagcagaaaggggaatgtgagtgtcttcctcagtgtccatgagattgaaaacacagtcactcacagaagcacaactaatatcccaaagaagtgtctctaatggttcctaagagaagaaattctgtgccgtgcaatgtcaatacaactcatttcttttcttttctttttttttttttttgagacagggtttaactctgtcacccaggctggtgtatggtggcatgatcccggctcactgtagccttcgtcacccgagctcaagtgatccttccacctcagcctcccaaagtgctgggattacaggtgtgagctaccactcccagctaatttttaaaattttttgtagatatgaggttttgtcatgtagctcaggctggtgttgaactctgggcttaagtgatcctcccaccttggcctcccaaagtgctgggattacagacatgagccaccatgcctggtccatttctgtgttttgttcaaatgttttaacataagttcggttgagataatgcagaaattctataagggaccaggggagacttggtagtattctatctctctgagcccctcacttaatcaaggaataaaatgtactggaatagactgactgtgtctcccaaaaataattacatattttcaacatgtaaatatataatataatatatatattatatgattaggttatgattatataatataatatatataaattgaatatatattatatattgaattagataatatattgaatattatatattacatagtatgtgcatgcatgtatgtgtatacatacatgtatatatacacacacacatgcctacatatagttttcataaaattggccttgattttctcctgcgctaactagagcctaggtgtggctgtattttgttgacaatgagaggcagagcctcagtactattaaataatcaaataagcagatcatggaattggcctcatttaggaaaattcaggtatttaacctcatcttcatttgtggaaagacatggtatatcagaattaaaaacatcttgcatttattaggcagccaatcataagtcatgctatttaaatgaagtttaatgaattctgtttcagttaaattgactggatttgaatcaaactggtatataccattaaagaagctataatataataattttatatagctgcattttaacttaaaatgtctgtttagagactacttcattcatttttagaaggcatattttgtatgtatattttaaagggaggtttattttccattcttagctgagaggcatatcccgctcattgtcttactgtcttctctctgtaaatacacagctcatccaagtatgttttgtttcgtgagtgaaaggcttattttgtgatggtaaagaggtcagtcctgaaacatttggagtccatagggagtccagaattttagattatgctcggaattttgaggtaactttttaaaatggaatatttaaccttttttttttttttttttttttttgagacttgctctgtcgcccaggctggagtgcagtggcgcgatctcggctcactgcaagctccgcctcccgggttcaagcgattctcctgcgtcagcctcccgagtagctgggactgcaggtgcccaccaccaggccggctcatttttgtatttttagtagagacggggtttcaccgtattggcctgaccttgtgatctgcccgcctcggcctcccgaagtgctgggattacagatgtgagccattgcgcccggcctgttttttttttttttttttttttaagaacattctggtttcttaattttaaggatgggtgaaggaggtggccattttaaatgtacccttgagagctctctcaccaggttagtctttgaaaataataaccattctagtgatgaatattcgatggagatgatcagtctgtcctagagctgggtttaaggcaattcctgaaagtgccctggatcctgggaggaggagagtgttgggaacgtgggagtcgggagttccgggagtgatcactttcatttagggagctctatgaaagttggaactaggctgatatctcagattcacctatctagtgactccactcttcagccattactggtacatcaatttctctccgctccctaaaggacactttcgccatttttcatgttccctttactttctccctcctataccttccccttctctttctccctcctataccttccccttctctttctccctcctataccttccccttctctttctccctcctataccttcccccttctctttctccctcctataccttccccttctctttctccctcctataccttcccccttctctttctccctcctataccttcccccttctctttctccctcctataccttccccttctctttctccctcctacacctttccccttctctttctccctcctatacctttttccttctctttcttttattctgtattgttttctttttccttatcatgtatttttctcttctctcccagtggttctcatttattttccctttatttttcagtgaagttattctgtacatctctttcatgttaaaatcttgaccctctagaactcctattttccagcttatgattttgaagacagcatttcaacctgcaaatttctcttctgtgttttaacacacagattcaaacaaataaaaactataatgaaagggatgggattgggagaatgaattcagttcaggtagccattgaattagacagagaggagctgaaagtttgggtgtaggtgtgcagaatattttgctgatgcatctttctaatgtggttttctaagtacgtttttctgataaactgcacttgttctttaccatcagagcccagaagtttactttttgggtccagttaccgggtcaaggactatagaacaaagctagaaagcattttatgcatttctaatgtaaagaactctttgtgtaccaccaggagagcctttaggctcttgtggcacgatctaaatagaagaggaagagagacttttccccactggtacaaagccaagacttgtcttgagtctattgtgtttgggaggatttggaagtgacgaaaaacaatagaaaatgagagcgttccggagtttggatttgctttaatattaactgttaactagctttgctgttaaagatctttattaaaatttggctaactctggtgttaagttcagagtagagatttgtcaatataagagaaaagaatccatttttgattagctcaatgatatgctatatttatctgggaaaatggttgtattttaaggccagttgtttattgccactgtgacacttactggtaagtgactgcatcatgctattctcagtgagttttgttttaaaatatatactcctagctgagattcagaaaatagctaaaggcaaggcaatatctatattgtctcttgtaaaatccttactctctctttctctgcccaggataccccacttttcctggtggaacccactttcatgttcttatcattgttttgatctttcatttattctttcattcactcctacaattactcaacaaatattttaagcacctactaagtaccaggcactatttggatgtgggggacacaacaagaggaaaaactgacaaaaattcttgctttcacagagtttatgttctagtggaataagaggtataaataagtaggcaaccaaatgcattatggagtatatggtgtgatgatccaggttacgaagaaagtaagggtgagtgtgtgctgagtgccaaggagtgggtggggtcgctgcttgagcaaagccccgaaggaagcagccacagagtggggcttgcagattttgggaagaagagtgagtgcagtgctctgggcagaggcagtagccactgtggctttggcggccctatggaagaagcatgactggtgtgtgacaagacaagtaagctggccagggtggctggcctggtgagcaagttgggacagatggaggtgggtagagaggctagggagtaacagtagttgaaaccaggccttgtgggtccctgtggagacagattctcatctgagtgaaatgaaaactttcattgtagcttaacagtatgttaagctgtttaaatactaaatgccttttatttttctgtagcattgtcacatatatcagctaccatgtggctaaattggaaatgtcaaaatgaccataaagagtgactgctggccgagcacggtggctcatgcctgtcatcccagcactttgggaggccaaggcgggcggatcacgaggtcaggagttcgagaccagcctggccaacatggtgaaaccccgtctgtaccaaaaaaaaaaaaaaaaaattagctgggtgtggtggcgggtgcctataatcccagctattcgggaggctgaggcaggagaatcgcttgaacccaggaggcggaggttgcagtgagccaagatcgcgccgttgcactccagcctgggtgaaagagcgaaactccatctcaaaaaaaaaaaaaaaaaaaaaagaaaagaaaaaaacaaaaccaaaaacagtgactgctgtaccttgtgtccagggtctggtctgcatgccagtcaggggtgcaacgcgacagtcaggagatataaactctcgtcttcaccttgccaacaaccacttgcattatgggctttgaatttctcatctgaaaggtgcagaggatggatgagattagtggtttttcaggctctgattcatggagcatgaggaattccttgaaggccctttcatttttatttttatcctaaaggcccttttatttttaaatttgcacacaagcttcacttagaagaaagtgccctctcgcttacgaaaagaaatccctgacttggttatgccttaggtctttttagaatgatgaatttgcagtctcatagaatctcagatgacatgaggactaaaagagaaaaactgcttcagaatcccttcttactcagtgtctcttggtgacagtgttcgttatctcttgttgaaatcaaggggcaatttgacaacagttagatgaggcttttgagctcccatccttcaaccttggtgaagtggcttctatcgtgatacagacttcagctaagtgaataatataatctgtgaaagtcttagaaggactttctggcacaatttagaaactagcaatcgagacaaataaggatagttgatatatagagaagggcataggaatatcccaatttttaaaaatgacatgagcattctcattgtatgtattatatatattgaaaagtagtcatatcctaataacccagttatataattggaagagagactggatattttttggtacttatggttaatgatatattttagtgaaagttttattttctgattgaagaaataggaaaattgtcctttaagatactgactgtctgcttcctttccaatctagaatctcaatctgctgtttcagaaactccccaaaaacgctcagatgctgtccagaaggtaagatgatcttattaggatgtcagattcccatctgtcttatttgtcttaagattgtgacagactctgcgatttatctttccatctgcccggctggctaggatgcccttgttttccctaagcctgcagtggaatccagtcaggcagaaggggatgttttcttccatttattttttgcatacaaaatcagccttgaaatggaactgagtacaagcttttcagaagctgttttattctatatccagccaaagagttgggcccaataacagcgggctccagcaggaaacggtggccactccagggagaagtctgcgagatgtgcctgctcaaacagtcccatggctatgatctttaaaaagaaatctgtcagagctttgctaaagtcaaataaggttcttattactttggtggatgaaacattaattagtatctgtttaatttccaggaaactattttttttctgttactgtattagtccgttttcacactgctgataagggtgtacccaagaatgggcaatttacaaaagaaagaggcttattggacttacacttccacatggctggggaggcctcacaagttcatggtggaaggcaaggagaagcaaatcacatcttatgtggatggcagaaggcaaaaaagagcttgtgcagagaaactcccatttttaaaaccattagatctcgtgagacccattcactatcatgagaagagcatgggaaagatcagcccccatgattcagtcatctcccaccaggtccctcccacaacatgtgggaattatgggagctacaagatgagatttggctggggacacagagccaaaccatatcagttaccaaagaagccaaattttgtgggtttttttttcttacgctaaaatgcaagctatgctaaaatggatttcttattaaaaaaaaaaaactgcaagaaaggaaacgtgtatggaatagtaattgtggatagcaattgctcttttggatataaaaccattgcttacaaaccaatttacattttcacccaactatgcttttgtcagtaacttagtattagaaatgaacagtaaaaagatgtgttctgttctgttggtggtctaggagaaaatgaggagacacatacttgggttttacacccggatctatttctgattagtgtgatgacaacaagcttagattacctgggacatagggttcttctctgtaaaattaaattattgctgatctctgataactcatcaaataaagtaacttccctttagaaaagaatccctgtgttatacatgaaagttgtgctccccctggaggagaaattggggtacaacattggttgaaaacagcacctgggtgcttttcaaaaatgcggctaggttagctatccttaaggacagttcattgaaaaagcaagtttttccagcttattgttatgggagcagagggctacatcaacttggtggcacttggagaggcacggtgggctcaactgatggttccttaattatctgcaatgattagcccacagcgaataagagaaagaaagataaaaaggtaaaaagaaatagtaaagtcagcagttattaagaaagatagtaccctcaaatcttccctcactttttaagccttttttttggtgtggaaagcatggctaaattgtgatttaaagggatacattaagtttttctaaattcttatgttcaggacgtatatgaatcaattgttacatacgataatgtcaaagagaacctgaacaggaagtatttgataatatcaacaatgataaaacatgtacagcattgctttctatattatgctatttcaagatacatattcatgtgtgtaacattatagtgtttttcctgagcgatggaccatggtaaaatatattgcaataagcagaaaacctaatggagtaggttatttaaaaacacttgattttacaacttgaagactcaagggtgaaatagattgaataaatgttacatcttatccttgttgacagtgaagtgtctggaagtcaggaaaattaattgagagggaacaatatttggaagcaatcgattttaagcacccgacaatgacatcacttacttttggaatcattaactctttgtcatacatttattttacgggctgattcttttcttagatgatatggatatgtttcatgacaggctaaagtaactggccgtaaaggggatagggaaaactcaaattaattgtcaacctactgtatacctgttcttttactctattaccttaagaaatcctcacaataatcctttaaagtaactattataatgcgcatttaactgctaaagaaaatgattatatgagttaaaataacttgcatcagatcacaaacttgataaagggtaggctcgctatttgagtacagatctgtttgattttatacttatactatgataaaaattatacttttacatgggtaatcacccgatgccaaaatcgtcagatgaatgagatgagattctaaatttattttattatatgtaaactctaccatgtatcagttggatgtccagatacattatagaggcaaataggtatattagttcacttatacattttgaagttttactagaactttgatgtgctaagttgtgttaattttactaactttagtgctttgttattatgtaaaaaaaattatttttcatggaaagtccttgctttttccttcttagtcactagatggcagttctgtatctctaaatgcagctggaaatgagaggtttgaaggcagttttctcagtatgaatgatgaacctaagagatttttctggtccatcagcgttgcctgcgttcttctgtggtcgtaatgtgagatccccaggactgcttagtcagaggcttgcagccgagttggaaagcatcctctctaagttattcttcagatgtgtgttcagacacctgttctctcaatctgagcacattggaatttattgaatgagttttgacttttactctttctgtagttaataattctgagagtgcgatatccctagaaaaaacacatgactcataaagcctttcctcaactcacaggagtagaaggctgtggtgttgccagagagtctgatgcttaaagcaaatacagctggcactcaagtgaaaagaacggactgtagctactccttgaatgcttttattgatgaccctgtggaattaggttttcaaataaaattacattcttgagacctcacttactgattattttaatttcaagtaatatgctctgaaaatctgctctatctgaagaattatgtcataaaactgaaatgcgactgtcttttgattctgtttattaaaatctttgccatttgaaatatttaaactgtaaagccttttatactctgtagtatataatagcttagtgtcaattattttatctaagaacatttgcttctaagttaaagattggtgtatggtaacatgcttcacctggtagccacctagtttctaactttttgcttttgaaattatatatacaatttttgtttcaaagcatttttctaaaactcttggtatctttctaatatacatggactagctggaagggaaatagaataacattttgatttttaaaaactctagctttgggtaagaattgaaaataacaggtaattgaaagtcaggtctttgaacattataatatttatcatttatcaatagtcacatctattacaaagtgctagacaataaaaaggaattagacgatatcagcactgtcttcccccatatgttgtatgatctatatgcaaataaattctcaagtgtcagaaaaacgctttgctctgatcagccctaccgagtcccctcattgcccaatctaactgcaaatttatttgaagaagtaaatatttttttactggatctccttaaagtatctgttatagtactctttatgcagtggccactcagttccattagtttcagaaataatttaggaacaagtcaaggaaacagatggagtaatgtggagtagccttgtggatggtcttggttactcagaaacaaagtttgaagagcaaaagaagcattggtcagatcaaaagaaagtggagtaaaagtgattctgaagaaataatgctggagacttaataaaacaagccatttgaattggggtagaatgtcttagacatatagaaagtttctaaagaaacattgttgagtatgaggtctttctcaactccaaggcaaaaggtaatatgaatttgcaaagtaattggaaaccaacaaaacaataacccacaagacaagtaaataactaaaataaggcggagtaagaaatacaagtcttaaaggagatagagagagagatacttgggtctgaaaccatgagttagtcatccttgaagtcttcctcagtgtctaatcattcttaggtcctcaataaatagtttaaccactaaatactctgacctaatgagtctgggaaggggcaagcgagagatggttaggaagggaagagaagacaggatacccttagggcagtgctgacattgaagataggtaacattttgaaaggtattcaccatactatgttaagagaaagaaaggatttttttttttttggtgtgggaataatttttattctgtagaaactccaaggagctcagagaaaaatatagacgttttagcttagaaataatcacaaaagaaactcttctatgagttttaagaatgaaaaccagctaacatctggaaagcagttagaacttgagatgagaatgtgaagaaataattggatgtcacagattgtttttgtttttccttggggtggtcaggcttgggggtgaaatgaagtaatatctttgctctattgagttttagatggtgtaaaactagtttgcactatgcaacattattaatggcctgtggagaaaggcaaacagtccaagcagctaatccaatgggggtcgtggagctgataaaagttctctgcttataaaggaggcttgtcctttattgaacatctgctgacctactgtgtgcaaggtatttgtggtagatattgaaggaaatacgaagaattataagacaaaatcttgggtattaagaagcagacagttagaagaacatacctctttcacgtacatgaaatgatttgcgagatgcaatgtaattctgccaagataaacttaacaaaaagggtgaaggttgttgagagactacaattaagggcaatttcttaggaagggtgaaatttagatcaaatcgtcatttttggatagatggagggaagaagagtgagtatttcagatcagagaagagagtaaaggtagaaaattggaagtgaacatggcactgggtgtggggccagggagaagcgcaatagtccaggtgacctgagaggcagctcagctggcagctgccctggagacccaggttttgctttccttctcccgggcctccttggcctgcagcctgacagtgccttaacccagagcccagtcttatctggattactgcagtattctcccgatgggtctctctgcttccagtcttaacccttctaatctctcctccacaatgcctccagagttatctttctaaaatccaaatttgctgatgtctgatatctgcttagactcatccagtgactgctcatagcatttgagaaaatgttcagactcctgagtttgacacatggggttttcccttgccatcctcagtcttcagcgttatcactcactatttcctgtatgattggctggcttgttccaaccctaaaaaatacactagtttttttgttttgttttgtttttgtttgttttttgttgttgttgttgtttttttaatctttaggatccttcatatctgtcttatacatgtttcttctgcactcctctttttaaaaatctacttctattttttaatctaaatttgtctaaacttgattttgttctagacactggacttgagaagactcagtctagggtgcatttcaggagtggtagaacatttgcttatattcataccatagtggttgaggatctgggctttggaccagttttcctgggcacaaatcccagttattccacttttaactggggaactgtcaaagatgaacaaagtcagacattagttaaaatggtaaggacagattttatatcagtggcaactattgcgctagggaagagtccagcgtgaactaaactcaactttgatttgtacagaggtgaccaagcattttaaagggagaataaaggaatagggagaagggtgagtggaggctcaggagactcagaagtgaaaaactgcaagggttcattagtgtaaatgagattaggccagctgtgtctactaactggcagttataagttaggagtctgtcctccgccagagactaggaaagaggccccatcctcaggtgaaggctgaaacagtaagttgttttggcagccttgagttttcttaggcagtaatttaaagagcggtaggattatctttgggatgcagcctttagttggtagaaactatgttaatgtttgctcaagcctttacaggccaaggctaaggcctagttgagaagagggctcagaggagcctggctagagcttgatcaagaagagaatctttgttagaatttaagaatagcattttactctgtgtgccttagttttctcatctataaaatgggtataataagaattcctatctctacattttttttttgtgagttttaaatatatttatgtaaaatgctttggaggagttcctggcactcaaaatgttagctctttatcattattgttgttatagttgagcaatactctggttttgaaagttgctttcattgcataggtggtcctcattattcttggatttgcatgtatttgcgaactcacctacttgctaacatttatttggagcccccaaatcatattcatatggtgctttcacggccaatcacaaacacgctccaagtggcaagaaatttgagttgcttgacgtggactttcccagctgatgttgaatgaggtgaagctctgctttcttctttcagctctcattctgtaaataagagtgtttttgtggctgttttttcatgtttttgtgctttttcttgttggttttactgttcgaaattgcctccaggcatagagctgccgtgttgtctaatgttcctacgtgcaagaaggctgtgatgtgccttgtggcaaaaacacatgtcagataagctttgttcaggcttcagtgatgctgctgttggccatagtaaatcagcaatatatattaaataaagtgtctttcagcaggaacacacatttaaaaaaggtaatgcattgattggttgacaaaaatgtgaccaggggcttgcaggaatctaaacctgtattttttctagaagcaatattcagtattcactaatttgatgttcacaaagactttataggacaaaactactgtgaataacaagaattgactgtatctttttaaattctcacaataaggctgggtgtggtagctcatgcctgaaattctagcactttgggaggctgaggtgggaggatcacttgagcccaggagtctgagactagcattggcaacatagggagaccctgtctctaccaataataataaaaaaaacagctggccatggtggcatgagctacttgggaggctgagacaagaggatcacctgagcccaggaggtcaaggctgcagtgagctatgattgtgccactgcactccagctggtacaacagaatgagaccctgtcttgaaaaaaccaaaacaagacaaaaacccaacattctcacaatatccttttgcagtaggcagagtgagtgatggagtctccacattttatggactattcaaggtcttatgagcctaatagaggatttaaaacgttttatgctcagtagtcgggagccatgagtttttgaggaatgagcaagacagtttaaggaacaattacctggcaagggaatgtagaatgataggaagagggagagtggagccagttaggaccagctattaaactctcaaagtaattccattacttctcagctaaggtgctgatgtgatacaggaaaagtggcaaccaagaattgaaatgatgggtttggtaaccatgtctagggtataaattaggctgtgtggtttgcagacttcagtatcaactgggagctggttagatatgcagattctcaggccctacccagacctactgaactggaaactgtggaggtggggcccagcaatctgtgtgtgttttttggtttgtttgtttttgttttgatacagagttttgctcttgttgcccaggctggagtgcaatggcatgatctcggctcactgcaacctccgcctcccaggttcaagcaattctccttcctcagcctccctagtagctgggattacaggcacctgccaccatgcccagctaagtttttgtatttttagtagagacaatattttgctgtgttggccaggctggtctcaaactcctgacctcaggcgaaccgccggcctcgacctcccaaataatctgtgttttaacaaaccctctaggcgattctggtgcacattgagcttaagagacaatgaattagagaaatgatcgaaagatgttcccaagcctaggtaaactacaggacaggcaaaggagtattttgttggaggataagatgcttgatattatgaaacatacatttggtcttaattgccatctcctggcatacaactcctaaaatccttggaatcttcgaagaggttaagtgtctttttatatgctactgtttgttgtctggtaacttcaggatggggctggtccacagaaagaccaaagcatagtaatagggttgggactttctgccccaccccccagcctcgggaactgggaggggctgaaggttaagttggtcaccagtgcccagtgatgtagttaatcgcacctacatcatgaaacctccattaaaacccccaaaattgatgggatttggagagcttccagatagctgatgaacacatggttttcccggagggtggtgctccccttttcccaagcctctccccatccatctcttcatctgcatcctttgtaacatcccttctagtaagtcagcaaaagttatgtgtttccctgagttctgtgggctggtctaacacattgaacctgcggagggggtggagggatcctggatttatagccagttggtcagaagttcctagaggcctggacctgtggcttgcatatgaagtgggggcagttttgaggactgagccctcaacctgtgggacctgatgctacctccaggtagatagtgttagaattgatttgaattagaggacactcatctggtgtctataatagaattgattgcttgctggagggacgaaatctttgcacattttgatgatagaggtcacagaagtcctctgttttcattgttgagtgagagaatagggaaagcattgtggttaggttttttcctgtaccctcagatgcactttaaggaacctgggtacctcccaggttcaagcaattctgcctcagcctccagagtagctgggattacaggtatgcaccaccacgcctggctaatttttgtattattagtagagacagggtttcaccatgttggccaggctggtctcaaactcctgacctcaggtgatccacccacctcagcctcccaaagtgctgggattataggcgtgagccactgtgcctggccaggaagatttttcttgaaaaaacaaacaccaaaaaaaagatatttgagaacagttgggtgttaatgcaagggaggcgattaggaggtaaaaaactgagctgcactttccatccatagatcattcaaggaaagtgaagctggaataaaatagtgctttccttccttgcattacttgagacaattaagggatagattgctttaaagtatggtccagtacctcctgcaactctagctcaaataagtagaaagaaacttctcaatatgtgagcaggaaccaaaaaggctggttctttttgctgtttatctcccttttttccctaaatgtttattgcttccactgtgtttgttcactaaagatcattactttaaccttcccatcgtatcagctcccattctaaagagatgttaaaagtaatacagccaagtatgatttctaacgtacgcctcttccttccatatcacatttctcagtcatccgtgaaggaatggaaagagatttgccatgtccattccagttcagaaatattataatttccataattcatcatgtattttatactaaggattctagagatgccatctcagctccctgtgtgaggctctttcccataatatgttctattttaaaaagccctaggcaagttatttaccatttgccatctgttctaatattctttcttgaaatttccctttcaaacttaaaattgcttgtattttagttttgtgcaaaattatatctatataacacctcgatctctttccctatgggatcatgtgtagcagatgttaacatattataaactggaatgccattggttgttccaaaactaggatgtttcttaatttagaacatgacagcctggcgcggtggctcacacctgtaatcccagcactttgggaggccgaggtgggcgtatcacgatgtcaggagtttgagaccagcctggccaacatagtgaaaccccatctctactaaaaatacaaaaattagcccggcatggtggcttgtgcctgtagtcccagctactcgggaggctgatgagggagaatcgcttgaacccaggaggcagaggttgcaatgagccgagaccgtgccattggactccagcctgggtgacagagggagactccgtctcaaaaaacaaacaaacaaaaaacaatatgacaaatagagaatttatatgcttctgtgaagaacagaattcctattttacagatgtctagaggtatcctaacctgccagtaatgttgctttagaatttagcagaatttgaaaaatctaaatatggtagaaaattaattatatatctcatgttaaaatttataaaataaattattacagcgttaacttaccaataagcagcttttaaattctaggctttaaaagtatcctgcttacataataaacataataaagtttcaaagatgagcaaattaacttttcagcaaaagctttacttgagtgtatcttggcttcttttttgacagttgtaaccttaatgttacagtaatgttttctttttctgggaatcagataatcttctgtttggaaaaatatttttggtgaacattttattttttaatggaaacttgtattatgtgatacgcaagtgttcaaacaatttataagagctaaccatcaccacccacatataagattatacaggaatggaggaattttggctgacttactgtatataattattgagccaacgtagatggcagactctaccacttatgatttagggttttgaaacagtattttaaagtacaaataatctcaaaattggtaatctataaagcatattaattattgtattgacgaactaaaaatagatttaaccttcctccatttataaggatgcatccattatataggttctgtacaaaattgccaagcttacttttctctttttctttttttacaacaaaatgtatttaaattttttgataggaaaagccattagctttccgtaaactgttgcacaatcactggaaatgctgagtgagagtctttctgaaaactgtagaaggctaaagataatgaaaagtgtatctcttcattgtcaagtcctttgagaatctgataggctctatctagctgcaccctgaagagacaagattaagttccaggcgctggacacagaggaacaggctcctaactggagggctttccacggacaacagagcgcctggcagtctcttcgagattaaatctaggctgtgtgggagggtgggccccccagagcttcattccactttgtgtgggtcctgagagtagggtgtttgcttaaatggcaagaaaatggccctttttcctgataattactaatatctgccatgtaaatttctttataaatccctgaaagaaaacaacctatattagaaatcagctcttacttctgacaagcaatggagctttctctagagcgctttacaggaaatatctcagctgactttctgaactggtactctctgagagccagccggcccttgactgatagccctggataaggaaggccagataagattctttgaagactctcagctaaattcagagccccaaatcctacatacatttggctactctgtagtagtggattggtggccttattttacaggctagtcagttaaggtttgagatgcgcttagttgctctgcttgtgtggaatagaaaagggggattgtaacattaatacagggccggtcgggattttagggtgcaggtaaggataggtcatagggagaatgaagattctagcaggttggttttttgttctctctacagtgggaataatgtaagaagcagatagtttgttgcccccaactctttttccatgttctcttctatcaaaatgatctgtacaaaaaagttctgtttataaaaattttagtctttcatctttgcagtctgttatcatctttatgaattttttgactcttccaccttcctggcaccacaaggctagcattgctatatttattaaagattcagatttggaattttgtcctcttatcactacttcctctgccatttgttagctctggttcttattgtatcttacatttgaaaacctttgaagcttatggggtatatcaattctttattttctcaactttttattatctaagtaccctcaattatcaagttgtttaaaaaataaataaaatacataacagaaattgttctgttacgcactaataaattgatcatttataaaagtagatccaaccccaaatccctctccttttaacacagaccatctgttattatccaccatcctttagtttggcagggtcagtttatcaatgatttttggatgttttaaaccacatgacacaaatgcagcataaagtgaacttgttaatcatgcagaagttggagggtttcttgaagtcagagaaggtgatggtggagaacttgaattgcatgaactgtaattgatttgtgagcacctcgtggagttagctaatacagtaagaatgatgatgtgacagatgtatttaaaaaatgaatttgcatattaggattgtcagaggcctttggggaaattaatgaggttctcaaatactacaaaaaaggaccatcttttcataaaaggtgatatgatgtcatatatcatggcaccatatatttttgttaaaaattagcactgaaaataattttaattttaataatttgtgcatctttccattatgataaaaattgttttaaattaaaatgacacccttacttaatttttaatttcttttttatggaaaaaaagtgaatctttttttcataatttattctgaagtattggtacctgggtatatcagtcagaccttttgcaggaactggaaactatgctaggtgcatgaaacagaagtgtttactataaaatcaggtgttttatgggaagtttggaaggtttgaagcatctgtgtctaaggtgacacttttcaaagaaatcaaatacaactggattatcaggggagttaaaacttttgaggccaccattgcaatttgtagagtggacatttgaatgttgttgtagagaagctttgttttcagaccttaactgctaacagagcagtccagacacgggaatatgatccttacctcattcgactttctaaatctttgtgtggttgcatctaattggatgaatctagctgcaagggagtctgcaaatgtagtttttctttgtatttctgtaaacgggaaggggaggatggagattgcgagagccaatccaaggtaaccaaaagaaaatttaagtggattctacttaagagatctttttctggtactgggtatcatgtgtaatgatgcagttacatttttgactggctatgtaaattagaaaggttaaaaaaaatcccaggaatcttcacagtcactagtattatgacctctgttaccactaacttgggtgccatgtggaactagctggcctgtgatgtggggcagaaatccatgtagaaagaggtgtaataattgttactatgctaggccattattaggatcattttctttttattactattgttgttttttatatttttagaggcagagtctcactctgtctcccaggctggactcctgggctcaagtgctcctccagtctcagcctctcaagtagctaggactacaggcacacaccaccacacctggctatttattttccatttttgttgagatgaagtcttgttatgttgcccatgctggtctcgaactcctggcttcaagtgatcctcccacttcagcctcggaaagtgctgggattacaggcatgaccactgtgcctcatcagaatcactttttcctctgtgtgtgtatgtgtttatataataatatcctttaattttatgctattttcattatattcaaatttatgatgaaacagagctggcataggcaataacatttacaaactgagttttggaaaactcctccagaatctacttcttacatgctatttatcaactaacctttttatataatcatagttcatgaaaaaagaaaaccctagttatgtaccagcataactcaagaaataccttttaatgattaaaggtcacctttaagagtatgctggaaaaacgaaaatgatctgtgcattttactaatccagtcagaaatactaattgtactccttattaagataaatttgggtgctggttttttggcttctggtttcttcttgtactcactatcatcatacaattggagaatggaattatgtatagtggccatacaggatgttaaaaatggttatgttccattgtgaaagacagtgtggcaattcctagacctaggaacagaaatagcatttgacccagcaaccccattactggatatgtacccaaaggagtatacatcattctgttacaaagatacattcacacatatgttcattgcagcactagtcataatagcaaagacgtggagtcaacccagttgcccatcaatgataaactggataaggaaaatgtggatatatacaccatggaatactatgcagacacaaaaaggaatgcgatcatgtcctttgcagcgacatggatggagctggaagccgttatcctcagcaaactaacacaggaacagaaaatcaaacaccacatgttctcacttataagtggaagctgaacagtgagaacacatagacacaggtggggaacaaggcacactggggccttttaggaggagtatggggagggagagcatcaggataagcagctaatgcatgctgggcataatacctaggtgatgggttgatgggtgcagcaaaccaccatggcccacgttgacctatggaacaaacctgcatgtcctgcacatgtatcccaggacttaaaataaaattaaataataaaaaaaggttattttttttcccactatgggctacttaaaaactacatggcaatatagtttttccccacaaaatacataacacaaaatacacaaaatacaaactgtgcattacaaatactttagtcttttgtgtagatgttggtgaaaaataatgagcttttaaggggagagtgtgtatgtgtgtgtatatatgcctgaataacatataaattctcaaaaatcttgcctatgaaagtgtgttacattcctttattagttgaaaagtcaattatttttcagtttcctttcatagtaagggctacttcttttttttttaacaatagaaaattaaggaaatcaaccctttgtaggggttgtgtttctaaattactggttgtcttcagctgtcagcaaacatcatgattgaccttcagcaagttaaatgttgtagcaaaagatatagtttccagggaagaagtaacagaggttaggattaagactactaaatttagcagggtgcagtggtgtgtgcctatagtcctagctacttgggttgctgagctgggagggtggcttaagcccaggagttcgaggccagcctgggcaatgtagcaagactctgttgtggaaaaaaggaaggactattaagtttacatttctagaccatgtgcggtggctcacgcctgtaatcccagcactttgggaggccgaggtgcgtggatcacctgaggtcaggagtttgaggccagcctggccaacgtgctgaaaccctgtctttactaaaaatacaaaaattagccgggcgtggtggcacatgcctgtagccccagctacgcaggaggctgaggcagtagaattgcatgaacccgcgaggcagaggttgcagtgagctcagatcacgctattgcactccagcctgggcgacaagagcgaaactccgtcgcaaaaaaaaaagtttacatttccttcatagagatggggggaaaaaggtgccctaaagatttttatcacatctatcatagcacccaaaaatgcctcatttgtagtaaataccctttctgtcttgtccatctgcattttttccactgcaaatgggttggatgtctgttcagatttaataaagaagatgtttgcttttcactttgtggagatatttcttggatccagagtttaaccttagcaagcagggtaagagtttagttttatacttaatattatctttatattacctgttaattattcttccacaatatgtaaaaatcaagtctggagtataagtgtcagcctcccaggtgggtaagaagcgtgtgcatgtggacctatggctgtttaccgtggcctatggggatcatctggaacactctggaacactctgtagtgttgcaggaaaccctggaacactgaagaaatagttctcaacacaagaagtctctcatcctctctttcccttttattccagcctttagtgagcaaatccacatctgtatgagcagtaattaaagtacgattgacactgcagtttccacaaaagtgggagttgtcttcctatgtttgtttgtcttcctttctctctatcaattccttcttcctctcttttcatctgttattcatattaaataatttacccttaagaaggcaatgctctttcctttttttttttttttttttttttgagacggagtctcgctctgtcacccaggctggagtgcagtggcgcaatctcagctcactgcaagctccgcctcccaggttcatgccattctcctgcctcagcctcctgagtagctgggactacaggcacccgccaccacgcccggctaattttttgtatttttagtagagacggggtttcactgtgttagccaggattgcctcgatctcctgacctcgtgatccacccgcctcggcctcccaaagtgctgggattacaggcatgagccaccacgcccggccaatgcccttctttctactcaaaacgttttttttttcttgaagggttcctggttgattgtgagttttaggaaaggaagacaccacttatatgtcagagtgccccatatgttggccagttgttatcagccatcttttttttttttttttttttttgagacagtgtctcactctgtttcccaggcgggagtgcagtgcagtggcctgtgatcatagattgctgcaacctcaaactccagggctcaagctgtccttccgcctcagcctcccaagtagctgggactacaggcgtgtgccaccgtgctcagctaatttttttaatttttaggagagatgcagtcttgctatgttgctcaggctggtcttgaactcctgatctcaagtgatcctcccacctcagcctcccaaagtgctgggattacaggtgtgaaccaccatgtctggccatcagccgtctttataaattgtggagaactgtcagttatcactttctgaaataccctaggtaaaatattaaagttctagtaaacatgatataagcggtatggcacatgctcataatgcatttgtcttgcccatatggatatcaaaaatattttatatattattattgaacactcattcagtgatcacttttaaaaagcagtgactacctttaaaattcgggattacctttaaaatgttttcagggaacatcctaaaaaccagtgttcctaggctggaaagaaggctatcttagaaataaactggtttatcactcagagctttcttccctgttctcagtggtctatttgtcctcaatggtatcatttgaaaatgagacagatgtggacttaagattctgtggtaagtcacgtgtgttaaccactttgaaatctcagggtgcaagccaggggacacatagaaatattaataccatctttctgtcaaggagtccttctggaagtatgacaacaaacagatataattttgcttaattttttgctatttgcatttttccttatttcataactaactgtgtctgtccttgtcgcccttcaggaagttgttgacatgaagtctgagggacaggccactgtaattcagcagctggaacagactattgaggatctgagaaccaaaatagctgaactagagaggcagtatcctgccctggacacagaggtggccagtggtcatcaagggcttgagaatggagtgacagcctcaggcgatgtctgtctcgaagctctcaggttagaagaaaaggaagtacggcatcataggattttagaggcgaaatcgatacagacttcccccacggaagagggcggggtgctgacactgcctcctgtggatgggctgccagggcgtcctccatgcccccctggggctgaaagtggacctcagacaaagttctgttcagagatttctttgattgtgtctccaaggcgaatatcagtccagctcgacagccatcagcccacacagagcatctcacagcctccaccacctccatcccttctgtggtctgctgggcaaggacagcctgggtcacagccgccccattctatttctaccgagtttcaaaccagccacgaacactctgtttcctctgcctttaaaaacagctgtaacatcccatctccaccacctctgccttgcacagagtcctccagctccatgcctggcctgggcatggtgcctcccccacctccccctctccctggcatgacagtgcctactctgcccagtacagccattccccaacctcctcctctgcagggtacagaaatgctgccaccccctccccctcctcttcccggagcgggcatacctcctccgccgcctctacccggagcaggcatactccctctgccccctctacccggagcgggaatacctcctccgccccctctacccggagcggcaataccccctccgccccctcttcccggggcaggcataccccttcctccccctcttcccggagcaggaatacctcctccaccccctctacccggagcgggcataccccctcctcccccacttcccggagcgggcataccccctccgcccccacttcccggagcgggcataccccctcctccccctcttcccggagcgggcatacctcctccaccccctctacccggagcgggcataccccctccgcccccacttcccggagcgggcataccccctccgcccccacttcccggagcgggcataccccctcctccccctcttcccggagcgggcatacctcctccaccccctctacccggagcgggcataccccctccgcccccacttcccggagcgggcatacccccacctccccctctacccggagcgggcataccccctccgccccctctacccggagtgggcatacctcctccgccccctctacccggagcgggcataccccctcctccccctctacccggagcgggcataccccctcctccccctcttcccggagcgggcatacctcctccaccccctctacccagagtgggcataccccctccgcccccacttcccggagcgggcatacccccacctccccctctacccggagcgggcataccccctccgccccctctacctggagtgggaatacctcctccgccccctctacctggagtgggaatacctcctccgccccctctacctggtgctgggattcccccacctcctcccttgccaggtatggggattccacctgctccagctcccccactccctccacctgggacaggaatcccaccgccccctctgcttcctgtatcaggccctccactcctcccacaagttgggagtagcactttaccaaccccacaggtgtgtggatttcttcctcctccattgccaagtggcttgtttggattagggatgaatcaggacaaagggagtaggaagcagcccatagagccttgtcgaccaatgaagcctctttactggaccaggattcaactacatagtaaaaggtaacatgaaagtgagctcgtctttgcacagtgtgtgtcagtattagggaagtgtttaccttcaaactcgggaaaattactgttgaatgtatttttaagcacaactctaaaactcgtctagatttttacatcaatatatagtgcagcagtttgctatttaaagctttaagcttttctccagaagtaccaaagatgtaaaataaatacatatacgtatcaatgtataagatgtaggtatacccatctatgtagttattgatatatctcttaaagattgagggatatatttttcttaaaatacatgctctgttatctagttgtaagactgctacttatttatgcctaaattccagtgaaagtatgcttatatgccctttggaaaatgaatgagggcaggtaagcagagacatttgtagcgaaattattttccatgtaagaatctactctttgcttttactacttcaagtttccatttctgacaaacagcttaaaaatgtaaatcaaattcttaaatccttttttttttttttggaggggggacggagtctcgctctgtcacccaggctggagtgcagcggtgcagcctcggcccactgcaagctccgcctcccgggttcaccccattctcctgcctcagcctcccgagtagctgggactacaggcgcccgccaccacgcccggttaatttttttttgtattttcagtagagacggggtttcaccgtgttagccaggatggtttcccatctcctgacctcgtgatccgcccgcctcggcttcccaaaatgctgggatgacaggcgtgagccaccgggcacggccgcaaatcaaattcttaggtaaactgactctggagcatgatttagtgcacactttaaaatgcacagccctgtccgggtgcggtggctcacgcctgtcatcccagcactttgggaggccgaggcgggtggatcacaaggtcaggagattgagaccatcctggctaacacggtgaaacctcgtctctactaaaaatacaaaaaattagccgggcgaggtggcgggcgccggtagttccagctactcgggaggctgaggcaggagaatggcatgaacccgggaggcggagcttgcagtgagccgagatcgcgccactgcactccagcctgggcgacagagcgagagtccgtctcaaaaataagtaagtaagtaaataaataaataaataaaatgcacagccctggtttacagtcccatcttgtgggctttcttcagaaacatgcttcacaaaaatacacatatccataccccaagtgtgaaataatttagttttgaaaatttcatggcacttctgtccctcattggcaacacagcacaaagtcatacaatcatagctgggactgatcatcataaaagaatactttccaccaggtattctggtggtactttatacatttatgtgtcatctatagcccgtgttgcctagtcattgagacaatgctgtgatacttggctgtggaatgtgtaggtggcagggaaaaacgcacactgtaaacctcactggggcttccttgttctaatgtttcatgattccttgaatttcctttgtgtgaatttcctttgtgtgatgtggcatgcatttagaaacagggtatttgccaggttcgttttcatttcttatatggatttttctactcactacaccatatcgggggcaagaatctgtatattctgatgacttttaatttttcagttcatcttctgtgttgttaccacgccacttatgtatgtgggtgattcattttaaactgtgccccaaagtcattttctctagatatgacaggggaagttcttgtgttttgttgttggtttgctttttaaaaagatgtgtttaccctttttaggtggtactacacgaatctgcagtcactgagaagacaaataacaatggggtgatgggaggcagtaggagggagaggatgccatcctgtaaatatgtattttttaacccatgaataatctgcaaagttgttaagtcaagttgggattttgagagatcagacatttcttgcctccctagcccacactgagataagttttctttttacatttttatacagtggcctgatgactgaggcttcctggaaattatttctggggaaaaatttcattcatggatggtatttcaactttcccattaagttgatcaaacaaatggtggtcttaaagaaaaagaatattttttccttcttatctctcttctttttccctccttccctcctgctggccttcctccctccccttcttcctttctatttatgcttgctgtgatgtaagttcagtttgatggctgttttattgttcttttgcttaattttagagactccagtacttcacttatttgggaaaaaattgaagagccatccatagattgtcatgaatttgaggaattattttctaaaactgctgtaaaggagagaaagaaacctatctctgatactatctcaaagacgaaggctaaacaagtgagtatttttgtgctttatgaaattggacagtgtttctggcataagtgtgaactgtcattagagaaaactttgaaatagtttttgggctgtgtaaacctccatggatcttaggcagacagcaagggttagaactttagaacatgtggttaagtaagactagcccaaatagaacaacacataattatctccatccagtgataatgtcccaacttttatttgtaacatcataatacatatttccaaaatatccgccattgtttctttccagaattagttgcctagaaataaattttcatttgatttatgtccatctgagtgctcctatggatggaaagaaaggaaagagtgggcaaaggaaaacaatcaagaaatccaatccttagtaactgataatgtgtttggtattttgttgcattatatctgaagtggatgccattagaatccagttaaacagtcacactgtacttgaaatgtggaagagaaatcttgtatccatttctaacctctctattttatgttagatcctttgatctaacctgtgacatttttgagtcataaaaagaaagattggtgcatttcaagaaaaacatttccaagcaatttttttctactgatatatccattggacttgtcataaagggatattgttataaatttctcaggggtgtcatttggaaagtagagtaaaacctcatgataatgaactccagatagaaagaattgctaatggtgcccgtctttaccctgaaatggagagtggctacatttcttaacttttgcagggtggcaggaaagaggtcttggaagcaaaggaatggcaagcagctcagtcttgggaagcaaagagggaaaaatgaggctgatatccccagtgttctccttgcccagtagccccataggagttccagctaatggggtgattcctcgaatttgtgcctctgacctggaagtaatagctaggcacatgacctggagttgtttccattgatatttatttcagagcagacaattttcattagatggacattgccaaatccagccaggagaagatggatttcaatgggacagctagacccctgtgacccgtagttggctgggtgagcaggctcaccccaggcattttattaatctgagaataatgtaaacccaaacattatgcagttgaattcttttagaaatgcttgttgcattatcactggttgctggtgacctcaggtcagtaacatagtaaatgagatggcacctggcacattgtaggcactcaataaatatttattaaattaatcagctgactaagggatgaagactttataaatatcagtggctatgtccagtagtgattaaaaaccagaaggttactcatttcataataatcagtaagtccagggtgacaatgttaaaaggagtaatggaaaatcatattttctctggcagagataaatatttaaaaaatccttggtatatttgcatatagtacactgaggctgaatcatcgtatctcctcttttgggttgtgtcagagatgtaaaatctgtctgggcgaggaatatgggtggggcttacattgagaagagtcaggcagccggaactgtcacatgacaaacgtgtagatgtggcatggagcctctctcgtccagggaccaaatactcagaaaattgagccatgctctccttacttccagcaccccttttgtttttttgtgtttttttgtttgtttgtttttgtttgtttgtttttttggctaagggaatacagataaggaagaagtctcccaggttgcccaagactgtaggatttcattctctgtttgacatagtattaagttttagcttactgaaatatgatttacatgtaaatcatcaaacttcacattaaactagttggcatgaaggggtctcagcatataaacagtgcctctgtgttgagcatcatcatcttaagataatctcctcattctgtcattaaggcatttcataaattgtcggtaagagactttgccaatatcctcatttgtgtttattgatagtgacgctactgttgaccttcagcttcaaacagggtttatgggacagtctccatcatgactccagataaacctattcagcaactccttggcctgggtcttggtgctgagctctgcacttcagatctgtttttggagggacaaaagatttttttaaatgtatgttagagaaaaatcactacaaagtgatggattgctgaagaaacatagttttatttaacttcattgtatttggaagaaaaatctgtccattccatttacttgagacatttaaaattttgtttaaggaaagtgtattttcaggatgcatgcaaattgttcccctttttatgggaaatgtgcactgattgtatgtgcagacattttggtaccttatgattcatttccagtaaaattaatagcctttaatgccgtggcatatgtttatggaggtatttcaagcaattcttcttatatacaatggaagctggaagttctgtttttgtttaaatatttaaaaatagccaaataatttttctgtgatctctgttctccttgaaagtaagactgtggttgaatgcactggtgtttaacgaggtgcctgtgctgtttttaccgtcatggcagagacgttttcagtgtgataatagaagattcctcagctgggcacattgccgtttggcataaggagaaagagggttattttctctggatgctcagactgatagaaatgaagaatatcttgtatttccaaatccttttttctccaaagagcttaagacaaagcattttatacttttctcatggagcatggatttaagtttgttctatgatgatttcttcatttctccttctttactttgaagcattacacaaaagattagctgagaaggtacatagaagtttatcagaatatagtttgacatagtttttcataaccaaatgagtgtgacactttgacattagaattgtctgatgtagaaccccgtctcttaaggaataaagaggaaaatagaaaaagtgatcttggccgggtgtggtggctcacgcctgtaatcccagcactttcagaggccgaggcgggcggatcacgaggtcaggagatggagaccatcctggctaacatgtagaaaccccgtctctactaaaaatacaaaaaattagccgggcgtggcagcaggtgcccgtagtctcagctactcgggaggctgaggcaggagaatggcgtgaacccgggaagcagaggttgcagtgagccgagatcgcaccactgcactccagcctgggcaatagagtgagactccatctcaaaaaaaaaaaaaaaagaaaaagaaaaagaaaaagtgatctcttatgatgttcatgctttagcattcacacacattcacacttgcccaattttaaggaaggctttagagccagtaagtgtttagtccaatctcctccctaattccagggtagttcagtgatttttaatgtttgtaatgaccctaagtcacctcaggatctttggtgatcaaataaggattaaaaagtttaacccactgggtatggtggctcacacctgtaatcctagcactttgggaggccaaggcaggtggatggcttgagcccaggatttcgagaccagcctggggaacatggggaaattctgaatctataaaaaatataaaaattagctgggtgcagtggtgcatgtctgtcatcccagctacttgggaagctgagatgggaagatcatctgagcccagggaggttgaggctgcagtgagttgtgagagtaccactgcactccagccagggtgacagattaagaccctctctcagggaaaaaaaaattcatccgcactcattagcaggaaagtgagagaatttacttgggagtgattttgataataagggttgcatagtttttggttaatcttctatcaaataatgtcataaggaaatatattttggtaagtgcagtagtagtagtaatagtagtaattattacagcaataataaccatggaaaccacaagtcatattgtgtccattatttaccatgtaccagttactgttcttagcacttatatcagctcatataatgctcctacccctgtgagacaggcaccgttagcctcagttcatagtacagaaacctcaggtacagagatatagcggaattcaatgtttccaagctggtaaggggctgagctcgggttcagactccagccttctggcttcaaagcctctgctcttcctaattaagtgataattatggatgtggaatattttatatgagtgtaagtacagtattttatatggagaccagaatatatacttttaaaaatgaattaaatactttaaaaaaagaatttgaatgtgtattggtttttcatatatgtttggtatttaaatgactgtggttataaataaaattgtatgtgagacacttttaaaacctttaccatgttttagcagatttctttctttcttttttttaaatggagtctcactctgttgcccaagttggtgtgcagtggcatgatcttggctcactgcaacctccccctcccgggttcaagcgattctcctgcctcagcctcccaagtagctgggattacaggtgcgggccaccgtgaccagctaatttttgtatttttagtagagacgtggtttcgccatgttgatcaggctggtctcaaactcctgacctcaggtgatccgtctaccttggcctcccaaagtgctgggattacaggcatgaaccactgcgcctggccaatattttagcagattttgacaagtatataaactgtggtttcaccaacatgacatttgcacagttaaataaaagtttgagtggtatgagatttaaatacataagcttccgtaagcagtaaaagtaagagccacttgcttgtgtggcatataaatagtggttagaggcagacagccattgtggttaaaccttgccaaatgtgaaatgatgctacatttcatttatcccatggtaaaaaaaagaatcatctttgtaaaataagccataggtaaataatgtctaatcatgtttaaaggatctgtaaaggaacatgatacccagaatgtaaatttgcacatagaagtcagcaagagtgtaaaagaagaatctgatattttttaaaaagtacataacttgacattggtctaaccatttaatgcaacacaatgaatctctttgtgggtttcttctatgtaatctatcagattaaaattctttgcccagagaatgggagaaaaagtatgacagttaaatatttgttggactttagcctctggaaatctgatcagaaaaaaaatacatagttaaatgtgctacttattataagggcaggtaataaaaggatttgttagaattcacatttattacagatactaactttaaggattagatatttggtatcatgtttagtctttccgctgtgcttgatgacctaatccctaaaaaagactttttaaaaatgttcgaggtcaggagtttgagaccagcctgacaacatggtgaaaccctgtctctactaaaaatacaaaaaaattagccgggagtagtggtggatgcctgtaatcccagctactcaggaggctgaggcaggagaattgcttgaacccgggaggcggaggttgcagtgagccgagatcgcgccactacactccagcctgggcaacagagcgagactccgtctcaaaaaaaaaaaaagttataaaaatgtgtaataacgacaggaaaagaagtattcatcattcagctgctcttatatgggagtacataacgtaatacctgtaagtgttcttacgggaagcagtaattgccaataaaaggctgcttcttactatgttgaggaatctgggagaacaagagtggcacacttcaggtattgcctgccactgtattattggctgctatgaaaaggaaaaagagattacatattttatctttgatctttgctgcagttttatttattgcagatattcatttttagattgaaaactatgttttattgtaattagtagatatttcagtgcttgcagagtgacagactgaatgataatttgtgttatagaagacatgttttgtattggtgttaattgttccagttgtagttggcaagggtgtgttttggttgatttggacagttatatttgtcttttgaccaaagacataaaataatgtctgaaacactaaatatcttataataaaacaatttaaatttgttttggggatacataataaacatttggtactttgtaacttttaacatctgcttttaatagaatacattcctattgcaagccttaaaaatgtatttacatagaaaaccacatcaaaattcaaaactataattagacaagcataggttttgtggaatctggatttgtttaagatgttgaaagatttattttttttttgaagatgctattcctataactatttgtagagcatacccaatcaattcaaggaatgcaataatattaacctctgcttttaaattttcttttagccagtaagattgtttttatacttctaagtaaatggctaaaaataaaaaaaaaaacacgaatacaccagcataatataaaggaaatgtaatgaagctaattatccttcaccttgctagattatatattagggaaattatatttaggtaatcgtgctttggaattgcatacaatttaatcatagtgtagatagttaattcttttggattttatatttatataccacggtattaagattctgggctgggcgcagtggctcacgcctgtaatcccagcactttgggaggcctaggtgggcggatcacaaggtcaagagatcgagaccatcctggccaacatggtgaaaccccatctctactaaaaatacaaaaattagctgggcgtgatggcatgcgcctgtagtcccagatactcaggaggctgatgcaggaggattgcttgaacccaggaggtggatgttgcagtgagtcaagattgcaccattgcactccagcctggcgacagagcgagactctgtctcaaaaaaaaaaaaaaaaaaaaaaaaaagattctgttggactaaatgtacaagaaaggggtattaatttttaatggctagaatgttctgtgtataattcataggaattgaagaaagattatagaatagagtataagtgctctttggaatgccagacgcagtggcatgtacctgtagacccacctacaaggtgggctgttgtgggctgtagtgtgctgtgattttgcctgtgatacccactgccctccagcctaggcaacatagtgagaccccatctcatctctaaaaaaaaaaaaattttatttctatctggagcagatgatgggagagtgttttctcagcacagccaatttagagtggagccactattgcggagagccctctttagtttcactggaaaaactaaacagtgaacactttcactgttgcccccttttttgatccgatgacagcacagttgatccatttcagcagggactgcagcagaggaaatgagctaaaataccagaaagggcacagaggttctctggagggctaatttattgtggaacaacccaagagagacagttttgagtaattcaagtgactatacttgaattatccttcaggttccatgctatatactaaagatagtgcaaactgtgggtggtcagaagtagaacagagtatataggctggacttgggataaaggctgtgtggaggagatatgatttgaaatgggccttgaagaatttatttggtttaaatatgtagagaggattaagggatgatttttgagaatagcaccacaagcaaaggtttccgtgcagctcatttagcagacctggcttgcgtgcttctgtctgggagttttaggaatgtgaatgtagatcatttatattcatttctcttagctgaatgtgtttccttctcatccttctacccagcctcgggtttgtcatactagaaataagtgtgaggactgaatttagattaattggacctgaagcttattttggtgtcacggtatgaaacagcaggatgtatccttctttaccatggacagcaacaggatttgggatgatctcagggcaaaggaggattttattcgtcatttgacctacatagtcacaattatgataggtcctaccttttgtctaccagaagggatgctggtgatgacactagtcagattattcacaaccaaacttcgtgtgacctaaaccgaaaaagagttcctgttatttgagggcataagtttaagatttagaaaaaaaataataaagttcttatttgtgtctttagtttctttaatttaaaactttttataaatggaaaataaactgtttcttttttaaagccataaccatttgcaaaatggaggttttaaaattttttgtatttatttttttttgagacggggtctcactctgtctcccaggctggagtactgtggtatgatcatggctcactgcagcctcgacttccctggctcgagcaatcctctcacctcagcctcccacgtagctgggactctaggtgtgggccaccgagcctggctaactttttaatttttattttgtagggacggggagtcgccatgttgcccatgctggtcttgtactcctgggctcaggcaatcttcctgcctccgcttcccaaagtgctgggattagaagcgtgagccaccatgcccagacaacgaaatggaagatgtttagtatttcacctttagtttttgttaatttatgaatctttaaaattactttgggacctgaaactgtctgaagtattactttagcaagctgtctggaggagagtcttctcgagatagtgaggaacttggtgaatcctctccccagtaaaacaacaacttaactggtgagaattataacaaaaaattgtgtaaaatctctgaaaattgtcctaagggcacacaggaaacggagaaacagtcattcaagaaaatctcctaaaactcataacagcaagagtctctgacagttgagccacaacccactctgttaccagccacccccagctctgctctactctagacatgtgtggccaagaagaccatagttctctgtctttctctacaactatgtctatggctatgattttggtctgggagaggcaggatgctggcatttctaatttcttcagtctcctgttagagaagctttataacaggcaagcatggagaaccacgggagacctttgagaagggccctttaaggatcaccatcatcgatggaagtagggagggtgtgaatacacacctgccaggctgcagccatccaagcaagagcaatcagagcaagatgtggtgtccccaggaaagcattcgctaacctcatacagacccaccaaaaccaagcggaagcttcactggcatgagtctgtgtttgtgtgtgtgtgtgtgtgtgtgtgtgtgttattaatcccattttatttatttattttcttttattatactttaagttctgggatacatgtgcagaacatgcaggtttgttacataggtatacacgtgccatggtggtttgctgcacccatcaacccgtcatctacatgaggtatttctcctaatgctatccctcctccagcccccccaccccacgacaggccccggtgtgtgatgttctgctccatgtgtccatgtgttctcattgttcaactctcacttatgagtgagaacatgcagtatttggttttctgtttgtgtgttagtttgctgagaatgatggtttccagcttcatccatgtctctgcaaaggacacgaactcatccttttttatggctgcattgtattccatggtgtatatgtgccacattttctttatccagcctatcattgatgggcattttgggtggttccaagtctttgctattgtgaatagtgctgcaataaacatatgtgtgcatgcgtctttatagtagaatgatttataatcctttgagtatatacccagtaatgggattgctgggtcaaatggtatttctggttctagatccttgaggaatcaccacactgtcttccacaatggttgaactaatttacactcccaccaacagtgtaaaagtgttcctatttctccacatcctctccagcatctgttatttcccaactttttaatgatcgccattctgactggcatgagatggtatctcattgtgtttttgatttgcatttctctaatgaccagtgatgatgagctttttttcatatgtttattggccacataaatgtcttcttttgagaagtgtctgttcatatcctttgcccactttttgatgggattgtttgtttgttttttttcttgtaaatttgtttaagttctttgtagattctggtagattctggatattagcccttttgtcagatggatagattgcaaaaattttctcccattctgtcggttgcctgttcactctgatgatagtttgttttgctgtgcagatgctctttaattagatcccgtttgtcaattttggcttttgttgccattgcttttggtgttttaatcatgaagactttgcccatgcctatgtcctgaatggtattgcctaggttttcttctagggacttttttttttttttttttaatgaagtcttgctctgtcacccaggttggagtgcagtggcgcaatctcagctcactacaagctctgcctcctgggttcaagcaattctcctgcctcaacttcccaagtagctgggattataggtgcccaccaacacacccagctaattttttttttttttttgtatttttagtagagatggggtttcactatgatggccaggctggtctcgaactcctggcctcaagtcacccacctgcctcggcaggttttaggtcttgtgtttaagtctttaatccatcttgagttaattttcatataggatgtaaggaaaggggttcagtttcagttttctgcatatggctgccagttttcccaacaccatttattaaatagggactcctttccccattgcttgtttttgtcaggtttgtcaaaggtcagatggttgtagatgtgtaacattatttctgaggcctctgctctgttccattggtctatatatctgttttggtaccagtaccatgctgttttggttactgtagccttgtagtagagtttgaagtcaggtggtgtgatgcttccagctttgttctttttgcttaggatgacttggctatatgggctcttttatggttctatatgaaatttaaagtagttttttttttaaattctgtgaaggaagtcaatggtagcttgatgggggtagcattgaacctataaattactttgtgcactatggccattttcacaatattgattcttcctatccatgagcatggaatgtttttccatttgtttgtgacctctcttgtttccttgagcagtggtttgcagttctccttgaagaggttcttcacatcccttgtaagttttattcctaggtattttattctctttgtagcaattgtgaatgggagttcactcatgatttggctctctgtttgtctattattggtgtataggaatgtttgtgatttttgcacattgattttgtatcctgagactttgctgaagttgcttatcagcttaaggagatttggggctgagacgatgggattttctaaatatacaatcatgtcatctgcaaacggagacaatttgacttcctatttgaataccctttatttctttcttttgcctgattgccctggccagaacttttaatactgtgttgaataggagtggtgagagagggcatccttgtcttgtgccagttttcaaaaggaatgcttccatcttctgcccattcagtatgatattggctgtgggtttgtcataaatagcttttattattttgagatacattccatcaatacctagtttattgagagcttttagcataaagcggtgctgaattttattgaaggccttttctgcatctgttgagataatcatctggttttttgcactggttctgtttatgtgatgggttacgtttttgatttatgtatgttgaaccagccttgcatcccagggattaagcaaatttgatcatggtggataagctttttgatttgctgctggattcggtttgccattattttattgaggattttcgcatcgatgttcattagggatattggcctgaaatttttttgttttgttttgtctctgccaggttttggtatcaggatgatgctggcctcacaaaatgagttagggcagagtccctctttttctactgtttggaaccgtttcggaaggaatggtaccagctggtctttgtacctctggtaaaattcggctgtgaatctgtctagtcctgggctttttttggttggtaggctagcaattactgcctcgttttcagaacttgttattggtttattcagggatatgacttcttccttgtttggacttgagagggtgtatgtgtccaagaatttatccatttcttctagattttctagtttatttgggtagaggtgtttatagtattctctgatggtagtttgtatttctgtgggatcagtggtgatatcccctttatcattttttattgtgtctatttgtttcttatctcttttcttctttattagtctggctagtggtctattttgttaatcttttaaaaaacaccagctcctggattcgttgatttttttgaagggctttccatgtctctatctccttcagttctgctctgatcttagttatttcttatcttctgctagcttttgggtttgttggctcttgcttctctagttcttttaattttgatgttagagtgttgattttagatctttcctgctttctcctgtagacatttagtgctataaatttccctcttaattactgctttagctgtgtcccagagattctggtacgttgtatctttgttctcattggtttcaaagaacttatttatttctggcttgatttcgttatttacccagtagtcgttcaggagcaggttgttcagtttctatgtagttatgtggctttgactgagattcttaatcctgagttgtaatttgattgtactgtggtctgagagactgtttgttatgatttccattcttttgcatttgctgaggagtgttttacttccagttatgtgttcaattttagaataagtgcgatgtggtgctgagaagaatgtatattctgttgatttggggtggagagttctgtagatgtctattaggtccacttggtcctaataggaccaaagatttcaagttctgaatatccttgttaattttctgtctcgttgatctgtcaaatgttgacagtggggtgttaaaatctcccactattattgtgtgggagtctaagtcttggcatgagtcttaaacatactcttactgaaacaccaggggttcagtctagttcgtgctgctcgccgcacagaaagccaatcactgagatgacaagtattgccaaggaagaaggctttaatcatttgctgcagccaaggagatgggagctcagtctcaaatccatctccctggctgactaaaattagaggtctatatagtgggggagaaatgtagcaatgtgtaagaaaacaagaactagcatgcagcaaggagtcaatcatggtgaatgaggggtctggtgtggtgagctggtgagttttagttctttgatacttatttagaggcctgaaggtgctttttggaggaaggaactcagataaaacaaatataagtttcaagcattaagaccaaatgatcaatttctatgttcatcaaaaagatctgtctatgggactattgggtcagtttcaatacctctgttaaaacactgagcaaacaataagctattctgacacaggggcaattcctaagaaacgaggcttaaaaataatattgcagtcatctctggcagtctgaaagctgtgtacatacccaaggctgtaccctcacaggagcaactggagagggaaaagcccagtggctagtttccagatgaacatggtagaaaaaattggtaaattccctgaatgtgatagcagactccaaggcacccctcagccccagtggttaagggtaaaaccctaagggcccaggggccttaagaataatctttcactgataaatggctcatgcccattcaggggtgacccataggtagccaggctgaaagattaaaaacgtgaaggaaaaatgtgtgcaggaatgtcaggctgctcactgagccagaaacagatttcactgaatgagcctagtgaagtaaccaagtaaataaataggcaaaccagaaacacaagaagctctggggcagggaagggaaaaatcaatatctggaattgataaaatataatgcgtgaaatgtctagttttcaacaacaaattcaagtcatgtaaagaacaggaaagagtggcctatacacaggaaaacaaacaggcaacagaaacattattcaaaaggacccagatgttagacttaacaaagaactcaacgcacccattaaaaatatcttcaaagaactccaggcaactatttgtaagaaatcaaagaaggtatggggacactgtcaagtagggaatatcaataaatagattgacattataaaataattctagagttaaaagtacaataaccaaaatgggaaaaaattactagatgatttaacgatcgattagtggtgacagaagaaaataatcagcagacttgaacatagatcaatagagatggcacaatctgaagaacatacacagaaaagaatgaaaaaaactgacagcctcagaaaaatgggggtacaccactaagggaccagtgtatgtgaactatatccaaaggagaggagagagaaaaggggcagaaaaataattgaatgtatgtggctgaaaacttctcaactttatgaaaaacattaatacacacatccaagaagttcaatgaattcctcatagataaacataaagagatccacaccccctatatcatagtcaaattgttgaaagctaacaattaaaaagtatgaatgcagtgaaagaaaaacaacacatctcatacaagggaaccccaataatactaacagcagacttatcagaattaatgaagaccagaaggcagtaggatgacattcaaagtactgaaagcgaaatgttcaaccagtcatcttacatccagtgagagtttttctaaaatggagacaaaagacagacatttccagataaacaaaaactgagagaatttgttgctaaaagacctggctttcaagaaacagtaaagaaagttcaagttgaacgaaaatgatatggtaatttgagatcacatatacaaaaacaaggagcactggtaaacattttttatctgcacaaaacatagtataattacatagttctcttaagtgatagtttgtggctgcagtgagctatgatcgtgccactgtactcctgcctgggtggtagaatgagaccttgtctctaaaaaagaaaaaagacaaaagtccgtgaacatctcaatagctgtagaatccgcagttaccaaatcgtatacactttagtgacacacacacacacacacacacacatacacacacacacacaaatgggactagaagggaacttcctcagcctgatagcatctgtgaaaaacccagggctcacattgaagactggatgtttttcaggaaaaagacaaggatgttcattcttgttacttctgtttagcaatgtgctagaagttctagtcaaggcaattaggcaagggaaagaaataaatggtctcctgattggaatggaagcagcaaaacattttgcagatgacatgatcttgtatgtaagaagtcctaaggaattcattagaagaaactattagacgtaacaaggaatctaattgtatttctagacattagcaattatcattgtgaaaatgtaattaggaaaacaactccctttgcagtattattaaaaagaataagatactgaagtatggattttaaaaaagaattttacactgaatctagaaagcattgttgaaagaagttaaggaggatctaaataaagggaacatgccatggttatggatgggaagacttgatattgttaagatgatgatacttgccaagttgtcctacagattcaacacagtgtctagcaacatcccaaccatttctccaaactcatttttttttagcaaaatagacaagctaatttaaaaattcacgtgaaaaatgaaggatctcagaatagccaaaacaatctagcaaaagaacaaagttggaagcctcctgatttcaaaagttattacaaaactatagtaattaagacaatatagtactggcatactaatacacatattggtcaatggaatatatttgagagtccagaaatcagttcttacatttatggtctgttgatttttgacaatggtactaagacatttcaagggtgaaagaatggtcttttcaacaaatggtgttgggacaactgtatatccacatgcaaaagaatgagattaggcaatggtttcttagatctatgactctaaaagcacatatgacaaaagaaaaaatagattattctacatcaaagttaacaattttgaatctacaaacaataccatcaaaaaacttaaaaagacaaccaacccacaaaatgggaggaaatgtttgcaagtcacaaatctgataagtggttaacatcctgaatatctaaataactcctacaactcaataacaacaataattttaaaaaaatctaatttcaaaatgggcaaggccgagcgcagtgactcacacctgtaatcccagcactttgggaggccgaggcgggtggatcacctgaggtcgggagtttgagaccagcctgaccaacatggagaaaccccatctctactaaaaatacaaaattagctaggtgtggtggcacatgcctataatcccagctactcgggagtctgaagcaggagaatcgcttgaacccaggaggcagaggttgtggtgagccgagactgtgccattgcactccagcctgggcaacaagagtgaaactctgtctcaaaaaaaaaaaaaaaaaaaaaaaaaaaaagaaaaagaaaaagaaaaagaaagaaaaaaaatgggcaaaaggtttcagtagggatttctccagaaaagtataccactctcaaataagcacataaaaggatactattcaacactattagcattagggaaatgaaaatcaaaaccacaatgcaacaccacctcacatgtgcaaggatggctataatcaaagagaaaggccatagctagcatgataaggatgcggagaaactggaaccctcatacaccgctggtggaaatgaaaaaaggtgcagccatttgaatttcaataagaatttcaagtcttagcctatttatgcaagtatttgctagtaagtattttttatgagaaggtaaataattttgctggtagcacttgttacccatagaatgatcatgatatcagactataattttctggataaataatatatttttcaacctcaaaaaaccttaagataaacttttttttccctaaaaataaatggtcaaaagtttaagctgtttttaacttaaagcataatatagttttataggcaagagttcattaatctcagaaggagaaatttataacttttttctttgcttttgatgaagagactaaagatatatggactgtgatttttctcttgaggagtctgggctctgggaatataattaaaacccctttggaaaatcctttctggccttctgggggattctggtgactttcggacacagtcaccagaatcccccagagacagatttgctgtgtttatgaagattacctccactgttgttttaatatttgacagtaaactggttttattgcctattttcataaaagttttgaagactctttcttccatcaagtcttcatggaggaaggaggattgaaagcaaaatctaaagacttctgtgtttttaacttacacgttgaacagacctatgtggaaatagagatttgcattattgaacctaaatttgaatgcacaaattaaaattagcccataccccaccattcttccccctcttcctcaccttatccatctccctccctctctctttctttcacgtgctgtgatgtttgatcttctcttggtaatcaacataccttaccctttatgctcatatacagagtgaagatcaaaaagtattgatttattggtgacagttaatgatgcctccctagaagagtcaggacttaatatgctgctatgatagtaccaatgtactgtttataaaaaatgactatgtttggtggttctgtggaattgtttcatgtgatgatgcgccaggtttaaaagtgaatgaaatgtctgtgctatccttccatagctgactttttttttatttttatttttttaagagacagagtctcagactggagtgccagtggcatgatctcagctcactgcagcctctgcctccccggttccagcgattctcctgcctcagcctcctgggtagctgggattacaggcatgcaccaccatgcccagctaatttttgtattttagtagagacagggtttcaccatgttggtcaggctggtctcgaactgctgacctcaggtaatccactcacctcagcctcccaaagtgctaggattacaggtatgagccaccgtgcccagcagaaaagtatctttgaaatatcaagttttagtaaacacattttaagaaactgtagtataaaccttgctaaccaaaaatttatagaagagaggccggcgcagtggttcatgcctataatcccagccttttgggaggctgaggtggcaggatcacttgaacccagaagtttgagaccagcctgggaaacacaatgagaccacgtctctacaaaaaaatacaaaaattagttgggcatggtggcatgtgcctgtagccccacctactcccagctgcttgagaggctgaggcaggaggatcgcttaagcccaggaggtcaaggctgcagtgagccgagatcaagccactgcactccagcctgggcaagagagtcagaccctgtctgaaaaacaacaacaacaacaaaaaaactaacccaatagcttatagaaaagaaagagaatagtgtaaatgaagttaaaatgagagcaggaagagctgacgtcccctaaagctttgatgccacctaaagtatttctgttttttcctattttttctcagagagccataaaaaaattttgttttgaggtgtgtattagtaggaatgtaggcaaggcttttctttaattgatccatgtgttaatctttatgtatagttctgtgtatttttctatatggattgtaatgttgccattaaaactttttacaaaacatgtataggtcactctttaaatttccttagctgtaaatatagtacagaatgactccttttctcttttaatactctcctgtataatgttgttggtgtttttacttgcagctccttttactaacattttgtgtacttaattacccctgtaagtaaagcttttcataattaggatggaattttgcctgcttttttctagtgccaacaaaagaaactagcatgttcttcatgctagaagctagaatctgagttgaaatccacttgcagctgagtgctttttaaatgatcagcttttcttcaatggcctagatcggcacaaggctccatagaaattggctttgagttggtctccatcctttgaactggcaaggaaagacacagtaacttgttttgttttgaaagctagattgcagtattcccccagtgatgccagactgacttggctgttgtgttgtaagtaaaaactttcctattccagtaatgccagccttcttctcaatactgccacacacgaagcaggtagacacacagctattccaaaaacaagaaaacaaaacaaaaaactctctaatttgaccatctctttgcgttccacattaagccttccaaaaaataaaacaatacaaacttgccaaatataagaccaaaacaaagctttttctttttaaaatgattgaaaatgtatttcgctatgtttctaccaatgtgaacaaagcttgactgtattaaaaaatctgatcattataaaatgcagatgaagaagatcaaatggcaaggtggtttcagtttattctgaatattttagtgacagaaagttgaacaggaaggaaacaggtgttagtgtaaaatacacagtttaaaagcaaattataccatcggctaaattagaatcatttatttaactaggaggaaaagcacagcttctgaatagtgatttgaaggcatagaaatttgagggcctgaggtgtttaatctggcatgatttgtgaggggcttgtagtaggtacagtggtgacttgaaataataattaggtttgaactgattcagtagttttgcattttcaaacttggatttagtttgcgagattttttctacccaaacagcataaagagcttatgtaaggcaagcttctttgggtttatgttatttaataaatgtcttcaagcactagaaatagtggttttgaagaagtcctcttgtcacatctatccggtcttatcatcctctgagtttatcccttttaaaaatccctctgttctccaaagcgtttgtaggcacttcttgaattcattgatcctcattgcttggtttccttcctggtaacatcttccatatgttttcttcactttttcagataagagtattacttatattctctaccatgagcatcttaacatttatgttgttgaatctcttccatttgctcattctttttctttttcttttttaattttttttgagatggagtcttgctctgtcaccaggctggagtgcaatgatgcgatctcagctcactgcaacctccgcctcctgggttcaagggattctcctgcctcagcctcccaagtagctggaactacaggcaccaggcacacaccaaccaccaggcccagctaatctttttttttttttttttttttaagtagagacagggtttcacaatgttggccaggatggtctcgatctcctgacctcgtgatccacccacattggcctcccaaagtgctggcattacaggcgtgagccactgcactcagcctctttttcttaatttgaaattatgcaacactatggagttgaaaacctacttaaaaatatctttttcatacacgtatactttaacaaatccagaccatgtcagcttctgatgtttctaacaggaaagaatacatccctcttaactacacttaacattttagattgttcaagaatctctactcttttctgtattcatgttgagatacaattagcatctcatgtatggcaaccaggattgcatgcaaaattctagaaagaatctataacatatgactcataccaaacagtaatttgtttgttttcagtttgccctctttttttcttaatccaacttaataagtcatgtttgccattcttgaggttactaatatggtttcacagatttcagtaccctgttttaataaccacggcattccttccttataatagtctactatacattttttttccccgctaggccacccaggactttgttgaatctgtcacatccttactgtttttcttactcatcttactgtggccttgctgttttgctcagatatttattttatcttttctgtgtgtttactcacatcaacatcgtagttttaaaatgtaagctgttgtaaatttctagtggtttattgttgcccacgcttttaaaaaattcattcattcactgtaacagccacttaataaattcagattattagaaaactactgtgtatgatggccgggcttggtggctcactcctgtaatcccagcactttgggaggccaaggcaggtggatcacctgagctcaggagttcaataccagcctgaccaacatggtgaaaccccgtctttactaaaaagacaaaaattatccgggcttggtggcgggcacctgtaatcccagctactcaggaggctgaggcaggagaatcgctcaaaccctggaggtgaacagaagttgcagtgagccgagatcgcaccactgcactccagcctgggtgacagagcgagacttcatctcaaaaaagaaaaaaaaaaaaaaagactgtgtatgggtctatcttccttttaaatttctttctcaaagcatgtaaaaccatctctcttgctaagactattctactgagttttaaatttaattccacagaagtcatctagaggaagtgacatactattgttctgaagactcatgctgagtttaagagaaaaattcacatttgaaagatgttgcttattctgaaaaactcaatatataaatcttacaaagaataggaccacctcattaattaattagtaggaccttacaaagaataggaccacttcattaattaattagtaggaccttacaaagaataggaccacctcattaattcattagggataaaaccagcctatgatattcctcctctttctgtatgcgcataaaaagaactagaagcaagaggcaggcggactcacacattgcacattggccccctccctccttaacaagcaaaatagcccattttagtgatccagaaaccctggaaatggattctttacaactattgacgatacccactggcaatgatggtctatatttcatagttactttaaagtcccaggcagatgtgattcagcctttcagatggatgaaagggatgttggaaggatagaatttttgcagggcatgaattcattatttcttggatctttttaactgataaggtattttaaactcatagacagccgtgagtttaaattcattcctttccatctattccagtcagacttcccttgagctcatagtgccagctggtttttctagggggacaaagcggaaaagaaaaagaggcagaaaaaattcgaagaaattattgaatttttttgcattaacaacctcctcaggtgacactcatcccccctaccctcgccatgattcttaccttcttcccgatgacccctgaaaagaggagaaaaaggtgagaagggccaaagaaattttacacaatgggcagaacttctgtcggagaagatatcaagggtgtagagatcttccagaaaagggaaaacccattgtagaagaaagggaaacaggccttggaagggtgagtgcacctgagcattgtatgtgaagatgctgatttgtctctttagcccaaatccagtctgagtttgcatgtctgtatcttttccaccacaaagagacatatatcttgcttgccataattgtgatgttggacaataaccacatgatttctgctttaggagatgtgtaaaaaactttctgtcatcaccaccaacccccccactacaaatgtgtgtatcagcctccccacagattagctataattagaaaaccatgttgaatcacgttgagtcagatgaggataacttcctgtattccctgtatccctgaggaaactaaggtttattctcttcatgacaagctagtttccttactttatttctccagttatgttttagcaaagcaattatataaaaatatttttttcatatacttataaacttttaaaaatcctggccatgtcagcttctaatgtttgtaagaggaatgagtacatccctcttaactacacttacaatttcagattgttcaaggatctgtattcttttctgtattccatgttgagctacaattagcatcctgtgtatggcaaccagtattgcatgcaaaattcttcaaagaatctataacacatgactcatactaaagagtaatttggtatttatacaaactaaaattattctctttcctgcctctactttagttttttggcttctaattcaaaaatgagaaagggggaaaagatgaagtctaagatattgcgataaatcaagagtgacttctttctgtccagggtatcctcatatacaagttgagaaagagtgcatggacgtcatctttgcacgattaaatagaaagacttctaagccaagatatcagtctatggtgaagttaatattgctatgatattcatttgcttttcattttaaacgctccttttatttggatcagattttgatttttaaataatttaattaattttttgttttttttttcagagatgagggtctctctctgttttccaggctggagtgcagtggtgtgatcatcgctcacgacagcttcaaactcctgggcttaggtgattcttctgcctcagcctcccaagtatctgggattataggtgcatgacaccatgcctggctaattaaaaattttttattattttttttagaaatgggttctcactatgttgcccaggctggtttcaaaatcctgggctcaagtgatccacccacctcggcctcccaagttgctggcattacaggcatgagccactgtgtccagaccccagattagttagttgtgtaatcttgcatcagtgaagggcataaacctcaagcttttcctgtcttctggtgaagtcaaccagtacctttgagaataaggagccatctcccctcttcttcctctgccccatatcaaagttggcctggcagaaaaaaatcccacccagaatgtctggtaatgtattcattagtcactcctgatcattcagatgtttcttttttaagtttctagttttttaatatcttaggttattcatgtctattgtatcatgtgtgagggtttcttcttccccaggagagtgtttttggtgtggaattaccttgtacccgtttggagatagacacaaaggaggtgggtgtgtgattcatgcttgagcaaatttactccatgcatgatctgcggtgaaagttgaagcctaggattctgctgatcattatggcgttttttgcatgacttcagctctttgcactcattcagttctattggtagaaaggtgatttcctttcaggtgtgacctgaaaatggaattttttctcatctccctagcaccatccatactgttcagaatggaagcttttagctttagtgactctcactctcgccatgcctttaactacatacttcaggcccctaatacagtgggacaccccatggtatttcctcgtcgccagcattaaagattatgtgttccagaatcattagactttttgaaaagacccctgtgttagttttgcactgttataaagaaatacctgggactgggtattttacaaagaaaagaggtttatttggctcatggttctgtagaccacacaagcaaggcacccacatctgctcagcttctgaggaggcctcatcaccttctgccatgaaggttttactcacggcagaaggtgaagaggggagcagggatgtcacatggtgagagaggaagcaagagaaagaggaggaagtgccagcctctttttaacaatcacatctcgtgggaactaatagagtgataactcactcattcccatgaggagggcacaaagccattcatgagcgatcctctcccatgacccagtcacctctcgctaggactcacctttaacagtggagaatcacatttcagtgtgagatttggaggggacaaacatccaaactatatcagccatataaaaattaaactcttccagggatttctttcagggattttgttttcctttttgctactttgggtttaactttttatggaagtgcctttacaaagttaagtgacttattctttatgtcttcagcaaagtcaatattgcttccactaatggtagctaaggacaggaaggatgtgagtttttgttgttgtttttcacatagctgggaatagtcatggagtaggctaggatttggatcttagtttcttaagccacatttctacctcttatctcatgaaacaaaacaatgatttaaagactgggctaacagttctgtctttctaagagtttgtttgattgctgactgtccctgttgatggttcttgtgcggataattaacaggtatagtcggataagttgccaccaacttagaaaacagtcagggatctttttttaagagctgcttacagttgttcaagtcagccttgactcagctctgcataccagctgctggtgaccccagcttgcccctttgcacagaccatgtgattttaagtgtcaaggtcttgtccgttatcagtttcctaccctgtagaactgctgttatgcattttgtttactgatatgcattttcagtatctttcccttctctggatttttcgaaatagactaattaaataccgcagctggtctttttatcttgggatggaatcacttacagaatgggacacgtcttcctctcagattgagtcatggtgtggtgacagaagggaatttcattggagcattaagataatcagagactccatgtggcattaattcactccattactgtttattgaagaataactgtgtgccaagcactgggcttagtactttatcttgggaggggtgggcagggtagggggcaaattgcagaataagactgggctttgagagagattggagttgagttatacatgcagaattctagaggatacttgagtttctttgcctacttgctgccttaaatttaagagaattacactaggcttgggaaaacaaactttcataatcccaaatagcatctgattctaaaattgcttttatttgacttctcaatgagtcttttaaaagatgatttccttcctcagggttttgatctggctgtgtttgtttctatgaacacattgtctacagattctaggcattaagcagaatgaactagctggaaaaatccaacccagaaataaacattcacctgtagtcatttccagcaaatgcttgtatacttatcgaaaattcaaatttacttttaactaaatacctttatgcagctgactgtagtgctttggggaagataatggtgttaaaataaggtaatgatgattgagaagaaaggactgattcgaggaacatttaggagttagaatgacatcatttagctatctattagatattcaatagagatatttatgaaaacttgaaatatgtttaacattgtgtatccttataaccactgcttctgaatgttcagccagtgatcttgggtaaagacattaaaacttatttggtgaatacctaacagtgtatctcttcatcatgtgtatgtatctgtagatgtggtattagaaaccactgacacatataatgacttttcaagatatttaactagtttataggctcctgcgtgacttatttaatcttgtgattttgttctgaggtagctaataattttatcataacaagataaatttttaagaaaattattggaaagtatgaagtttttatttgttcatttcattagttgctctgctagagttacaaacaagtacaattacgttggaaatctacttcatagtaaatactcaggttcaaatacatttaccctaggacccagtagtcataggagtagcattacttgaaaaaccctaaactgcaaaccttctaaatatctatcaatattagatacacggtggaatagtaacaatgaaaaatagcaatctgttatactcaacaacaatatggattttacaggcaaaagccattataaacaaagtgtttccatttatgatgctcaagaacaggcagaagttatctgtgacgatagaagttagaaggagacttttgtgtgggggagtattgaaggaggtataaatggagccttcaggagtgctgataatgtcctatacaatgatctgagtgatagttacaatgatgcatttgtaagcaataattaaatgaactctatacttgagtttcgttcactttactatagaataacaatattttaaaaactaaaatttcttaatagtggccactttagaaaaactttttattgaacagcaaaacgctaatttgagactctgggacaatagagttgaagatgtcttcagggataggaataatgaatgatttggctattgttggacgaggatgtgatagaattgtttgacacaatatgataaatttcttcaaatggatttgttaaagaaaggaaaaatgctaaatatatgatctctgaaaatgatgccatcagaaagaagactatttggtctgtaaaggcttaaaatcacatgttgaaatttttattctctgaaaatgagcatcataaattaactcactgacatgccactgtttatctctctttaacttccaaactctaggaggtctttgaagaatcagccacttgcttattcagtatgtcatttctaggaataaagattgtagactttcaaggaagctggacatgtcttcctccataggatagggtcaaatccagttttcatctttgtgtcttcacagtgctaaaagcaccagcatactctatggatggagcaagaaatcaaatcttgtccctataaaagggccagaaagaaacatcatgccattggccaaagagcaggaagtgaagcaaaacgcctgaataccgaatgaccatttactaaatcattaaaagtttattatgtgattctagtcaataaacatatgctcagtgattcatttgttttctgaatatttaacattttctctatcaaacttttcatctaaatttctcataggcattttgttgttgttataactacaaaggaagggaactattttggttgttatttgtttttcataatttccctgaaattgagcaatacataagacagaatattcagatggaccttaccgtctaaggtttgctttctagttaacaatttgaaaactaatttattctctttatgttccgtctgcccatattaattatatttgataacacagggcgttaaggaaatagtggggaaaatgaggcatcgtgtgtctcattccttggtaggagtgtgctctccatatggctgaggggtagtgtggaatagtggtcaagggggtagagcctggaaccagactgcctggctcatttcctagctctgccactttatggatatgtgaccttgaacagccacttctgctgtaaaatgtggaccgtagtggtacctgtttcactggattttggcagtgattacaaggaagaataaactaaagccctttattatgcaccaaataatgttctctgaatacatacttgctacaacataataataaatatgcacatggtctcaataagagtcttttattcctttgtggttgtcattaaccttattatctgcatcacgtcttttatttgtgatgattaatatctctcattgaggtaacgaagtacaaagtgagatgctgatgcctgtattttgtagacacatacttgatatccaaatatttttggcaatatcatgaaacatttagatatggtactcacaatgtattggttttcttatattttaatttttattgtaaactttgatgcttctaactgaattctaagtgctgaaaacataatatgaaaattatagataggatacatatctaaaaccagatttttagagggaattctgaagggaaaaatatagctcagcagacttgtatgcaaccagataggtgaaacattgttttctcctttccaagatatttgaaatagcaaaggtccaaattatatcttgcaaatgtttttcatgccaaaattggctagactggcaaaaagatatgttcaaagaataaaagattgtaatgttattttaatttcaaggagtttaaacatctgtgcatattttctttttgctttaaagagtggagacttaggatagttggtttaaattagaaaggcattttgttttaagagcctgctgatactgcagcattatagtgcatgttactgtgatatttttaaacaaactgtgaaatttagaaatgcaacctgctagaataaaaactttaataaaatatatacctaatgccattttgtttcttcatcggtttgtttggaatcactttggtgtattttcaactctggattttttttttaattgtattttttttttttttgtcaaggtcatcctaaatgtttcagctttttctaagaaaggaaaagttaatataaataagaaattgagtttctaattcttttaaacttatccctttaaagaaaaatatcaaaaagcctaagaagttcccttggttttttgttagcaaattcctgtgctgtatttagtgttgtgttatggcagaggtgtgtgtgcacatggctctcagggactgcctacagcagaggacaagtgaactttggagtcggacttagctgacaggaaatcccagcctgcctctctggctttggtctttcagccatttttcatactgaacatcattcatttctgtgactcaatacataatagttattatttttacagatgtgatttatgcgtgtcacgctgctgggacatttaattactctattcaacttgactgtatttagaaaaggctatggcgctactcctcttgtttaacagcttctattctaagagaagaatctaaccattgattgggttggatcataagtgtggctaatcttgtaggctaggtaggtatcattttctttattttagtgtgccttgctttttttttttttttttttttttttttttgagacggagtctcgctctgtcgcccaggctggatctcgcctcactgcaagctccgatctcggctcactgcaagctccgcctcccgggttcacgccattctcctgcctcagcctcccgagtaactgggactacaggtgcccgccaccacgcccggctaattttttgtatttttagtagagacggggtttcaccgtgttagccaggatggtctcgatctcctgacctcgtgatccgcctgcctcggcctcccaaagtgctgggatgacaggcgtgagccaccgcgcccggctagtgtgcctttcttaaaatcaactggaacacgtatgtcttagagtttaccaaatcgcttttatataacatgcatttgcttctttttaaaatgacacatctttcatgtctgacttgatttctggtttaacagtgatttataatggtatattgaatggcaaaagatagtcgagggagatattgttatcaagaaacaatggagaagtcagatggacactagtttttacttggtgggaagatgtcctgcagacttacttgcacatatttgaaattctcgcttctagtttgttagaacaacccgagggatgggaccaggagaccggtatcaggatcatagactaaataagaatgaaagcaggaaccaagaagatggtgtcaggagagattgaaacaacctactcagttgaggaacaacatccagatgatgttacaaccaggagacacagctctccaaactgaagtctaaaatatacatcaagacaaccaaatgagagagacaggctaggagagcacaagaggctcttcttggtaaccttaccaaattccacagctgtcagtctccttctgaggctgactcagacccaaaggcaggacaaacaaagcaagacgctttcacccacactatagcttgatcctctgccaagaggcacatctgggaccaagttcagaagcaggcttctagattcttaatcagtgagaggtgtcaaatgtcacctcaccaattagcaaactgtaattctgctttgcttctgagattgaatctaggctgcccgagtaaagaggattgtctggtgccaaccagatagtctggagataccacttgtgggcatggtcagtgtcagtgccttctgtggtctgcagtgccttggaatgctgttggatgcctgtgagatcagccaccctcccctgaggcttaccattaatctgagtaggagaatacggtagtgtaagtaagactgcagtcttccttggttgcgggagtagaccgaaaaaaaaaaccaaaaaacaaaaaaccctgataacctcttgctctgcaaaatctcatgcaagcattcttcacttttgagtgtagactagttaagatttaaaatgactgctgttttcatgaaatagtatcagacagttcagaaaaggctcatggttcctgattctcattgggtcaaaaatctagagatgaatttatctttccaaagtaagaaaactgaatccaaatcaaggttatgagatagccaacaacagtatgtctaaagagttcttggagaaatcacactttgtaaattcccaaggggcaggagttggccaatgtatgggttgttctccttcttaattttagatgtttatttcttatcgccttctattgtctctgctgttcctcttgttggaataaactcaagtgattttacaacatcataaatataactgccggttattggattacaaaataaaacactagcacctggcatttgcaagacattttatgctttgaaaatattttatactttaccgaatttgtttatctcaagttatgggaatattgcatatggattattaactgtattctacaggtaggaaaatttagatcttgaggccaaggagcttgtccaaagttacatggatgctaatttaggcaaagacatgtcctgaaatatggatctcctactctgatacagatcaaatcattggaaatcttgagtttgggaattgttctctttgcctttccttctattcttacatctcttgttcactttggatttactatttcatatttacttatattctcctggtcattagggtattcttgggtgcatttgatagctcttattccttgaatacattgcatacctctggatataccaccttgtgctctaatgtcgtttgagaaacaacagttttcacattctgaggttctgctttgaaatttaccttaattcatctctatcgttgagtaatcttatctttttctcttcagagaaagatttgccttattggatctggccatttatcccttatttaatgtccacttttcagcaaggtcatgacatgccatttcagaagaaagcaatatgctcttttaactaggaatcaggaaactaaaacttttgttgtggctctacatttagactgtgtgcaaattatttactagcttgtaaaaaattgtgagattttactagcttataagaaattgtaagattttactagcttgtaagaaattgcaagaaacttcaagttatctctattggatatttaatgtggagctctttgatgtcatcttaattagctaatattccatgtgacacatataaaatgcatactatgtttaaacttccgaattagcaataaacaccatgttgactgatcaaataattatttaaatgtggttttggctacttgtgtaataaatatagttcacataaactttctactatgtcttgatatgattctaagttacagaagatattatcttgcagttcttgaatttaatagtagaatcacagttcaaccattattcaaatacttccttttcaaaagaagtattcagtggttcccaaatctgcaccagcatcagctgtggtatttttttaaaacatacatattccagggccctactctagagaaaattgacttttcagaaggttgagcaggatcctttatttaagaaggtacctaagtaattctgatgtctagccaaggttggttgtctaaccatttttccaagtttattgtgggacatctaagctgggcatagcagtttaaacaaggtttacttattcagcggacatttttggatgcttacaatatatcaatcattgtgctgagtactacagtaagcaatatgacacagagtttgtctagaggtaattatactttagtgaaaattgcccccaaatcactttatcatgtatatgttgcagtaggagagtatatagtctcaaaagagtaaagaagtggctcctaagtcagctcctgtaagagttctgtgggaagtacagggatgttcaggagaagcatcacagtggaatgagacttgaacattcctgtccactgaatagtcagagtttgtcattttgaaaatagaaaatagaagagaaatacattatcaggggccactaaatatctgttaaaaggggactgacaggatgaaggcagtacagaatgctgggctgagagcaggactgagatcctagaggcagaatcccagtctacccgtactctctgggaggaagtgatgagaacttgcagcagggtggtggtagtgaaagagaagaatgaaagacaaggaagcatcagtggaacttgatgtgtggctggataccagaaatgcagaggaagttagtcaaaggttcccgtcctgatgactggagatcatggtatcactgactgagctctaggggttgtgaaatagagctcattaggcagaggatggtaagtgtctggtttttttatggttttccgtgcatttaccctactgcctagcacaatgcctgatgtgtagtaggggtattagttaaaatactggtttggtggtctctgttgtgacttgtaaaagatgaaaagttaattttatctttctcatggagaaatctaggcaggtaagtgcccagggaggtgcagtgcctgtgttccatcaggttgtccagagattcattccccaggccttctgttgcttcaccctcagggcatagtataactgatgatggctcacttccataattctgcctcagcctgagaggaaaaggatagagaaagtagagggccagccaggcacagtggcttacgcctgtaatccaggcacttggggaggccgtggcgggcggatcacgaggtcaggggatcgagaccatcctggctaacatggtgaaaccctgtctctactaaaaatacaaaaaattagccgggcatggtggcggatgcctgtagtcccagctactcgggagactgaggcaggagaatcacgtgaacccaggaggcggaggttgcagtgagctgagatcgcaccactgcactccagcctgggcgacagagcgagactccctctcaaaaaataaaaataaaaataaataaaaaaagtagagggccagccagccttttgaaggctgcgcttttatcgctctccgcattctgttgtccgtaacttagtcatatggctatccctggataaaagtaggatgtaggctggcgctgtggaacatggctgtaatcccagccacttaggaggctgaggtgggagggatcacttgagcctgggagttagaggctacaatcagctataaccatgccactaagagtacctcactgaatatccactgcagtctttggaatttgatactgttttaatcatttttctaggggaggtaactgaggctttaggatgttggggtagcttttctccaacacattagaaagcaagtaggagaacctcacaatctgtgcaccagaagaactggcatcacccgaaagctcgttagaaacaaagaacctcagtcccacccagatttagggatcagaatctgcattttaaaggatcccagatgattcaagtacacatgaagtttgagaaatactgctttattttacagagaccgtgttcataatctctacacagtcctgccttctagggaagcctgagatgataactttattaagagaattattaagagacgtgacattaaagcagattcaagataattcttttttctgattataagttctaattttatagatttcaaatgtgttaattctgcattttctgcgttttgcctcagttctgagatcatcttagaagagtgtactctcctcttcattgtattgtggtcactgaattctaagaatgttctaactttaggttcttcttctccaaggtgttggaaaaaaaggtcagatcatagcagtggttcgtaatgcaaagtttgggttacttaaggacactgtggaatccatccttttagacatctgtcctcttctgaatgtctgccttctgaaaggtggtagatgattattgttcctatgtaaaatcttaggcatttaaatgtaaaatccagtttgtgatcaagtgtgtttgaattataatagaaaaagcaggctgggagtggtggctcaagcttgtaatctcatcactgtgggaggcccaggcaggcagatcacctgaggttgggagtttgagaccagcctgaccaacatggagaaaccccatctctgctgtaaatacaaaattggctgggcatggtcccgcatgcctgtaacctcagctcctcaggaggctgaggcaggagaatcgcttgaacctgggaggcggagattgcagtgagctgagatcgtgccattgcactccagcctgggcaacaagagcaaaactccatttcaaaaaaaaaaaaaaagcaaattccatatatgaaatgtgaaagattctataagactttttaaaggactaacccttaaacatgagccaattgggtttaaaacctatgattaaaaagcaacatgcagatatcagcatttttagagagggtacttgggtatcagtttggagaatggacaggaagggatgagatgaaacgggtggctttggaattacttggaaggctttcaaaattcagagtgatggttcctactctcatgttctgattagtaggtttgtgatgaggcctgagaacttgcatgttcaatgtttattattgatacataatatttatacatatttatgatacatcatatttatacatatttatgatgttacatgcatagaatgcgtggtgatgaagtctggatatttagtatccatcattttgagcatatatcatttctgtgagttaggaacatttcaagtcctttcttctagctatgttgtaatatataatacattgttgttaactatgctcaccctcctctatcattagaacgtatttcttctatctaatgcttgtacccattaatcaatctctcctcatcacctccccctccaccacccaccctacgcagcctctgatatcttttgttctactttctacctccatgagattaacatttttcactcccacatatgagtgagagtgtacaatacttgtctttctttacctggcttatctcacttaaggcttttctcactttctttacctggcttatctcacttagaacctcctgttctatccgtgttgctgcaaatgacatgattttattctttttttatgcctggataatattctgttgtgtatgtatgtatatgttttatggattatatatatatatataacatacatgttattggatacattatagtacatacatgtgattggatatatatatatatatatatatatataacatacatgttatatatatttaaaaatattttttctttatttgtccattgatggacacaggttgatttcatatctttgctattgtgaacagtactgcagtaaacgtagggtgaagatatccttttaatatttattttccctttgggtacatacccaggagtgggattgctggatcacatggtagttctatttttagttttttgaaatatttccatattgttttccatagtgactgtactaatttaaatccccttttattcacatccttgccagaatctatttttttaaataatagtcattttaactgggtaagataatatctcattgtgtttgatttgcattttcctgatggttagtgatgttgagcagtttttttcatatacctgttggccattcgtatgttgtcttttgagaaatgtctactcatatcctccttaaaaagtgggcaaaggagatgaattatttatttatttatttacttacttattcatttttttatgtactgttgagttgtttgagttcctcatatatggatattagtcccatgttgaatgaatagtttacaaatattttctcccattaaacaggcaatgtctttactctgttgattgtttttttgctgtccagaagctttttagctcaaaatagtcccatttgtctatttttgttttagttgtctgtgcttttgaggtcttagccataaaatctttgcctagaccaatttcctgaagtattttccctctgtttacttctagtagatttatagtttcgagtcttgcctttaagttgttaatccgtcttgcactgattttgtatatggtgagagataagggtcaagtttcattgttctgcatatagatatccaatttttccagcacaatttattgaagagggtgtcttttccctcatgtatgttcttggtgtctttgttgaaaatcagttgcctgtaaatatgtggatttatatctgggttctctattcttttccattggtctatgtgtttgtttttatatcaataccatacagttttgattactataaccttgtaatatattttgaggtcaggcagtgtgatacctccagctttgtttgtttattcgttttgctccggattgctttgtctattcaggtttgtttttggctccataagaattttacggttgcttttgtatttctgtgaaaaatgtcattgttttgataaggattgcactggatctggagattgttttggggagtagggtcacttcaacaatatttattcttcctgtccatgagcatggaatgtctattcgtttctgtcctcttcaatttctttcatcaatgtgttgtagtttttcttacagaggtcttctgtcttcttggttaaatttattcctaagttatttattttttgtagctatttgagattggattgccttcatttctttctcagctagttcattattgttctgtaggaactagtgatttttgtatgttgattttgtatactgcaactttactgagttcatcagaactaatggttttttggtggcatcttatattttctagataaaagcttatgtcatttgtaaagagaaacagtttgacttcctgtctttcagtttggaatccttttatttctttctcttgcctgatttctctggctaggaattctagcactatgttatgttaagtaggagtggtgaaagtgagcatccttgtcttgttccaattattagaggaaaggctttcatcttttccccattcagtatgatgttagctgtgggtttgccatatatgcctttattaagttgaggtatgttcctactatacctagattattgagaatttttatcgtgaagggatgttgaattttatcaaatgctttttctgtgtccattgagatgatcatatggcttttgtttttcactcttgatttgatatatcacatttattgatttgcatatgtacaaccatttttgcatccctgggataaatcccacttgattatggtattttctttagatgtgctgttgaacttaacttgttagtgttttgttaaggatttttgcatctctgttcatcaggatattggcctgtagttttcttttttgttgtattcttgtctggttttggtatcagggtaatgctgacctggtggaataagttagggagcattcccttctcttctattttttttggggggtgggaagagtttgaggaaaattagtgttctttgtacgttttgtagaatttggcagtgacaccatctggtcctggacttttctttgttgggagactttttattactgattcaatctcacaactcattgttagtctgttcaggtttgctatttcttcctgattcaatcttggtagattgtatgtgtccaggaatttattcatttcctctagattttccagtatattattgtatagttgttcataatagtctctgatgatcttttatatttctgtggtatcagttgtaatgtctcatttttaatttctgattttgttcatttgggtcttctctcattttcttggttagtctagctagcagtttatcaattttgtttattttttcataaaactaactttattttgttgattctttgtgggtttttttagtctttattttgtttagttctgttctaatcttcattacttatttcttcctactgattttgttcttgcttttctggttccttgatatacactgttagattgtttatttgagatctttctacttttttgatgtaggcgtttattattttaagctttccttttagtactagttttgttgtatctcataggttttggtgttttgtgtttccaatttcatttgcttctaggattttttttatttcttccttaatttcttcctggtctcagtagtcattgaggagcaggttgtttaatttccatgtatttgtgcagtttctaaagttcctcttgttgctgatttctacttttatttcattgagatctgagaagatacttgatatgatttcgatatttaaaatgtgttgatatttttgtgtcctaacacattatctactctgaagaatgttccatgtgatgatgagaagaatgtgtgttctctagctgttgaatgcaatgttctgtaaatgtctgttaggtccatttggtctaaagttcagtttaaatcctagatttctttgttaattttctgtctagatgatcctactgttgctgagagtgtgatgttgatgtctcctactattattgtatttgagtctgtctctccctttagatctaataatatgttttatatatctgtgtgctccgttgttgggtacaatcatcctcttgctgaattgaaacttttatcatgttatcatcttctttataagcggaaagtttaatctgtttacattcaaggttattattgatatgtaagggcaaattcaagtcatttccttaattgatttctgtattttattttgttttatttatttatttttgagacgaagtctcactctgttgcctaggctggagggcagtgacgctatctcggctcagtgcaacctccgcctcccgggttaaagcagttctcctgcctcagccttccaagtagctgggattacagacgcccgccatctcacctggctgatttttgtatttttagtagagacgagatttcaccatttcggccaggttggtctcaaactcctgacctcaggtgatccacctgcctcaccctcccaaagtgctaggattacaggtgtgagccactatttccggcctccttaactgatttctgattgctttgtatatcctttcttcctttctttttctcttattgttcatcattgtggttttgtagttttctatagtggcaacatttggatccttcctcttccttatttgtgcatttgctctaccagtaggttttatacttttgcatgctttcatgatggtggatatcattcttttgcttgcaggtgtaggactaccataagcttttattgtaggcccagtcttttggtgattagtaccttcaacttttgcttgtctaggaaagactgtatttctccatcatttatggagggtaactttgctgggaagagtatcttgggctggcagttttttttttttcagctctttgaatatatcattcagttctctcctggccagtaaggtttttgctgagaaatcagctgttattctgacggggggggtggttctcttataagtgactagatgcttatctcttgctgtttttagaatttgttctttgcctctcacttttgacagtttgactctaatgtgccgcagagaaaacctttttgaattgtatctatttggggatttctgaccttcctgtatctgtatgtctaaatctcttactagacttgggaattttttttagctattgttccactaagtaggtttttgatccctttcatttattcttcatcttctgggacactgaaaattcaaatatttgtttgctttatggtgtcccatgtgtgatgtagtcttgttcactttttttttttttttttggagacagagtctcactctgtcaccaggctggagtgcagtggtgcaatcttggctcattgcaacctctgactccctggttcaagcgattctcctgcgtcagcctcctgagtagctgggattacaggcatgcaccaccacacccagctaatttttgtattttattttattttacttttttaagtagagatggggttttaccatgttggccaggatgatctcaatctcctgacctcattatctgcctgcctcagcctcccaaagtgctaggattacagacgtgagacactacgcctggcctgttcattcatttttattctttattctttatttttatctgactaggttatttcaaaagacctgtcttcaagttctaaaattctttcttctgcttaatctagtttattgctgaagctttcaaatgtattttgtattttattcaatgaagtcttccatcccagaatttctgtttggttcttttttacgatatctatctttttgataaatttctcattcatatcctaaattgtttttctaatctctttgtattgtttatatgaattttcttgtatatcactgagattctttaatatcattatcttgaattctttttctggaacttcatgaatgtctttttcattggaatttgttgctggagaattattatgttcatttggaggtgtaatatctctttgttttatgtttattgtttatttacattgatatttgtgcatctggtataacagtcacttattccaacttttttgaatttgcttttataggggaggactttttcctgaagatgtatctgtggtgttggtttgatgtagcattttgcctttgattctggatgaatacagcagtgtagtctctgtatgatttttttcatctgtaagtgtcagtagtgcttgtaatttcctcagtggcttagggtgtggttgttagtggaggtcatggtaaagttttgctggtgatgaggatgctaggtgggccagtcctcaatcactggcaggtgcttgaggtggcagtggcaggctgagcatgcctgtcctttggtcttagggtggtgtatgctggccctgatattagcaggttcagtcaggccagttggacctccaggtggcttgcttgggtgccagcagtggaagaagtgggctgggtggctgggagggtccttaggctcctaggcagtgggcatcgtgctgagggacgcagtagtagtggtgagacaagccttaggctcccaagtggtttgcgctggtgttgcagtggctatgacaggccacgcggggcagtctcaaggcttgcaggtggcatgggtgagtggatggtgtgggtgggtgggtgctagctgtggtgttagcagtaggttgggtgggtttgtcctcaggccctcagaaggagtgctcaggtgtcaatggtggtgaatggggcagggccattcccaagcctctgggtggtggtcttgggctctgggggagtgggatgggttttaacatggttaaatggtcctgttctctggcccctaggtggtacgtgtgggtgctggctgtggtaagtaggataggggtggaccccaggtcccccctacccctggcagaatagctggatgggggtggcagcgactgtgtggtggccctgaggccctgctgctggggagggtggagttaccatggcagcagttgtaaacaggtgactgggggagcttgtgctgtggctccatatggcggctgcaagaggggtgccccatcctcagggtgctcttaaatgcacagaggccttgttgctaggggcagcagggtcgttggcaaaggcttgtgctttggccctggctgcggttggaggatatcaggggagccccggggatgtggagatgcaggggctattgggccccaggccaggatgcagtctggtgggggctgacatttcaaaacagtgccctcctgtaactgcttgtgacacagcaggtgagtggaactcagtgcgcgctccctctggaggggtgccgctgcctgatctccgggtggctcccaatgttagcctcagggcctgtgcaggccgcggggttctcccatggctacgattgcaggagtctgtggtggaaatgtgggctgctggggtcgctcacttaactttaccacatgagggagcctggagaaccttaatcacattagagaacctctctagctcccagccgatcctggctgagcagactgccccacttccctcttcttctttgcctcccatgttacctgtcacttatttcttgaattccaatgttctctcttatgtgatctgtttgacctgtgatatctactcactatttcagttcttgtttgtggaggaggcgagtaccaggtgcctctagtcagccatcttgaaactcccctctaacttttccttggatttttgataacttcccaggtgatgatggtgcccatttgtccaaggaacacactttgagaaccactggactagagtttgggagatcaatcagaaatcttttgcatttatctatgtaagataaagtatagaactaaatgctgaaaatagagttaaggaggaggggtggtttccgcaaatacagagcagctgtaattggcaggacttgataccagaccagagtatgcaggtgaaggggaggtaggagtcttgactggtttctagattcctaacattggtaggtggatgaagaatagtggtacctttatctcaatatatagcataaaggagaagaagctggctggtggtgttggggtggaactgatatgtgtgtcattttagacatgtcaaatggagattatggggacaatttaaatagagatgtcttttcacgaagtaggagactgccaagttgaagatgcagacatgtatgtctctacaggagaaattataggttataatgtgatgagaataggttataatgcgacgaaaataagatatagagaacagaactctaggatacgcaaatatttaaggtgaaatcagaataattcatcttcaaaagaactgagaagaaatgttaggagccctggaagagaagttactacaagggtgtgatcaacatgtcaatactatagggaggtcgaatgatagatggattgaaacatgcctattgcattgagaaaccagaagatgatagaaaaccttgataaaagcattttcatcaagcagcatgattcagcccggattgcactgacttgtggttacaaactggttttcaggacagagtatacaccttctgcttctctgatattaaattcctactttttaagctcttaagaggacaatgctatggatagaaatactttgctgtactaataggcccatattctagttttaacctcatctttctaggtggaatttagaaaaatgtttagttaacatttagaatcaaaatgtatatgttgctttttcttttgcaaaagcagcgccttttgggagatatcgtgccttaccaagaggctttcagaaatgatcagggcagggccaggcagcagtggtttatgcctgttatttcaacactttgggaggccgaggtgggtggatcacctgaggtcaggagttcgagaccttcctggccaacatggtgaaactcggtctccactaaaaatacaaaaaaaaaaaaaaaaaatagctgggcatggtggcatgcacctgtaatcccagctactcaggaggctgagtcacgagactcacttgaactcaggaggcggaggctgcagtgagccgagatcgtgccactgcactccttcctgggtgacagagtgagactccatctcaaaacaaacaaacaaacaacgacaacaaaaaagatcagagtggttttcgtggttggtccttctgaaagtgttatgttttattcctcacccccatccgtgctggggcacccagagtgctattattgctattaagaatattgttttactctgtgactttgtgtaacagttgggtatgattattttattactatcctgattgacccaacttaaaccataagggaagacagggtacaaagatgcaatagctgttagagcagctgtcacttctggtaatttgactataaccactttctttccttttcctccagtgtttttctaagcagatttaaaacaaaacactgggagtaaatagaaaatgctgcccctcacacgatcaggcctgggataagtttcataagcagaatttcctggtgatgctgttgtctggaaaacatggtcaaaaaatatctatctgttctgtaacagccttcccacctctgttttaggaacccttcgcatgggatcgtgtgccctgattctttaagacttgctggaaatccagacttgagattgtgctgatgcagcccttttaatttgatgcttgtatccctctgttaattagtaggaaagttctccccaaaatgtgggtcaaatgcagaatgagaggaacttccagtaaaatagtgagctttctatgtgacccaagtgaaagcacttttttaaaaaaatttttcatgacacaaccaaactaatctagcagattctctatgtgtgtacttttattttgcgcttcacttgctgacgtgtttgaagtttcagtgtgtcaaggctccacattgaaagaaaaaagaacacttcaaatctcaggctgcaaatgatcatatgtgtaattgtgattttacagagaccagactaatttcctagaccattagaaattttacttgttgacagatcaggctctcaaaagactggttaaaaaacatgtctttgaggctgatggtgaataatgggggaaaatggtggattttgaagatttatgatataaaacccaaaagctctcttcaaacattaaaaaaaacactgttttgaatactttaggtaatgacgtgagatcttttctctgaatttgttcttcatttaggattttttaaaatgctagtaagcatattggagttcaaattaacattttccccttttactttctttctcgagcaggttgtcaagttattaagcaacaaaagatcacaagcagttggaatactaatgtctagccttcatttagatatgaaagacatacaacatggtaagtgtcaaaatgaaaatttagcttctgaatattaaaatttgggctgagggatatgatgtttgttggtaatgttatttcaaacttagagtttctgtgtaaaccgaggttagtatatatcccgtaagtgtgatcaagctatctcccatgattgtttctggaaggattactattaatttgcctgtggtgttatttatataccttactaacagtctaattatcatgtgacattattatcttagttcaggctactataaccaagtaccccagactggtgggtgataaataagagaaatttatttctcacagttctaggaggctgaaagttcgagatcagggtgccagcatattcggttctggtgagggccgtctttcaggttgcagactgccatcttctccatgtatcctcaattggcagaaagaaggaaagagagctctcttgtgtctgttttataaggggactgatcccacgcacgagaattctacccttgtgacctaatgaccacgcgacctagtgaccaccacctaggatcctgtctccttgtaccttcacatgggagtgaggtttgcaacatatgaacagaaatattttctgtttggaattagagtggttcttaacattttataaatggctttagtgtcaatattttaatacttggattctactgtacaattgacggccattcttatgccatatcctcctatgatatttatgctgagagatactgcccaaaggtgaatagagtaatgaagtgtaaattcagagtgtcccttaagctgactagaacctaagaatagatttaaagcagattgaattatccaatggaatgccagtttacctattaaagaaatatggtttcaagaataacacagaccttataatcacaaaagcatttaactggctttctagcttacccctttatgaatgtggattctatttgttgggcttaaaatcttgtgtgggataattcataaatagcacaagcttggtatgccctgtcaattgatgagtaactcttaatcacaatttaagtttttattaaattgttttgatggggaggagacttcctcaagctgaaacatttggggtaatagtcatagaagagaaagccaaggctggcgccaggcagtacttggtgtttctaaagctggcagatgtagcccagttaagtcataggatgaaatctgaaaataatgatatggttctttccttcagtcaaatattcaactcgggttgagttgataatgagaaccttatgaacaagagtccgcctgacatctgtgtctgtggtaaagccagtgagagttcattgaaaatttgcttgctttaacatgcaacgctagcaataacatggcatgaaaggcagtagttgaagggtcatacagaatcatgcagaaactttatcccattaggatgtgaagtgattgctttagtccctttgaaaccctgtacacttttttttttttttttttaatatggtggccttccaagtctaaagcagcaagaggttgtgccctcctgcaggtaaagtcctattctgccttggtgtattgtctgcaaacaggatttacatgtgtgaatcgcttgtgtcctctagagcaaacttgacttctctcaggatatgcctccactgagaagtccacagaagcataaacatcattgattttggatatagaagtggccacagaatttatctagacctccagcgtcatttttaaaaaatactttttatttccataggtttttggggaacaggtggtatttggttacatgagtaagttctttagtggtgatctgagattttggtgcacacatcacccaagcagtatacactgaacccaatttgtagtcttttattcctcaccccctcccacccttccaccaagtccccaaagtccattgtatcactttttatgcctttgcatcctcatagcttagctctcacttatgaatgtgagaacatacaatgtttggttttccattcctgagttacttcacttagaataatagtccccagttccatctaggttgctgtgaatgccattaattcgttcctttttatagctgagtattatttcatcatatggaatatgccacaattctttatctactcgttgattgatgggcatttaggctggttccatatttttgcaattgtgaattgtgctgctataaacatgcacgtacaagtatctttttcgtacaatggcttcttttcctctgggtagatatccagtagtgggattgctggatccaatggcagttctacttttagttatttaaggaatctccacactgttttccatagtggttgtactggtttacattcccaccagcagtgtagaaatgttcccgtttcactgcatccatgccaacatctattatttttttatttttttttaatgtggccattcttgcaggagtaaggtggtatcacattgtggttttgatttgcatttccctgatcattagtgatgctgagcattttttcatgtttgttggccatttgtatatcttcttttgagaattgtctatttatatccttagcccactttttgatggaattgtttgttttcttcttgctaatttgtttgtgttccttgtagattctggatattggtcctctgtcagatgtatagattgtgaagactttctcccactctgtgggttgtctgtttactctgctgactattccttttgacacgcggaagctctttagtttaattaagtcccagctatttatctttgttttcgtagcatttgctttgggttcttggtcatgaagtctttgcttaagccaatgtctagaagggttttcccaaagttatcttctagaatttttatagtttcaggtcttaggtttaagtccttgacccatcttgaattgatttttgtataatgtgagagatgaggatccagtttcattctcctacagtgtcttgccaattatcccagcagcatttgttgaataaagtgtcccttcctcactttatgtttttgtttgctttgtcaaagatcagttggctgtaagtatttcactttatttctgggttgtctgttctgtttcattgttctgtgtgtctatttttataccagtaccatgctgttttggtgactatggccttatagtatagtttgaagtcagataatgtgatgcttccagatctgttctttttgcttagtctttctttggctatgtggcatttttatcgataggcaaaataagacctgtgagtggtccagttaccctctcagtatcacgcagctcattaatgaaatggattgaacttgcactcaggccccttcattaaccagtacttttttttttttcattcagacatgctgcttctccaagattgtgctttttttttttaccaccagcattggtttatctaaaacaaagtatatgtaatattgtaataaacagcaagaatcattttctctccttctttgctgtcagtactctaggttttcatttactttgtaatgtttatatttcaaagtgctccattagagtaattagtgtgtaaggtttggattctaggtatcaaagttctaaccctggtcctgctgagcaccacttgctcagtctgttatttgaatacaggttatttcccacaataatagatgtggagcattctcagcaacacatacattcaaaaggcagagaggagagaagaggtcaggttcctaagtttattaatgcggcaaatataagggggcatccccaaataattacctgtgtgtgtgttagtatataaaagttataatgaaggcctgagctgctggctatttggtaatgttcaaactggcctacagttataatacctctgaaaaaatctcaccctgtggtttatagtaatttgaagtctgagatgaaagtgccttccagagaagatttaccctttttgtgtgtgtgctagggtctgggggccctgtggatttaggaacaccttgaatcacactctgggggctgtaggagggtcccttcagccagtgctgtttgtccactgaatgggttggttcccctgccagtatagcccttttttttaattattattatactttaagttctagggtacatgtgcacaaccagtatagtcctttgagtcccatttcattgtggggtatgtctaggatctctatgatgagtgggttctgggctttgatatttggcccctcccaccgtgaaactgtcaagagaaagttgacatttgttaggataggcaaatacactcagggcaaaagcagtttgtgagctggatcacttctctgagttcgctcttcattttgtttagcatggtaattatatcttgtcagctctttgacgtccttatgatattttacaaacatgttttactcagcatttttagttgttgttagtggggggattgatttcaaataattttggcctgttattcccataaattgatattataagagtatcctacagcttcatagtggtagttcacttctgtgaaaattgattaaatattttatacaatgtttggtctgtatttcaggggtcagtgtgctcttcacagatcttaggtccattttcatagataacagtagctgcaaaagaatttgcaattccataagcttcagctttatcccccaacaatgtcacggttagatagaaatactaactgggatgctttaagagtagaaggggatgtcattgataatattgcctggataacaaatgtaaagtgaaaacttttacttttttttttttttttttttgagacagagtctcactctgtcatccaggcatagttcagtggcgcaatctcagctcactacaatctccgcctcccaggttcaagcaattcttatccctcagccccccgagtagctgggattacagccacctgccaccacgcccagctaatttgtgtttttagtagagacagggtttcaccatgttggccaggctagtctcaaactcctgacctcaagtgatccacccgcctcagcctcccaaagtgctgggattacaggcgtgagccacctcacccatccccaagaacttttcagataagctagtagtattgtcaccctactaccagatcgaactgaagcaagtttcagactgaaccctcccccacacacagatatatattacactggtatttcctggccatctcaagcaaaatagtttgaaaaccctgcttcataaacttgaggttgtttacctctctgtctttataggggctctcactgtgatctatctgaaaggtttgcttcagacagatataagcttggcacagatgtaggaatctgctaccctcatagtctgcacgagacatctagaaagtcaactcagccagtggctgcacccagtactgtttaggtcctaggcctcaggcagcctccttaaagaacaaagctattagcccccagtagactcttattctagctatggaagaggtaggagtggagcatctctaagagattgcaactaatccacacatccagaatgactttaatttcaccattgaaagcccatttcagacattagtatgcgtattaaagcctcggttgttgatttagatagagatagctgagcagcttgcgttaactgcctctggagaatggcctttcttgcgtagtgctggtcagccatccctgaggtgtggtctcttagacactccctctgcaaaaatatttgaaaatagattacagatctcatcacaaggaatacctaatatctatttagtagtctgacacgttaaacttacggaaacacgtttcaatatactgcagggatacccagcccagggtatgaatggctctgattccttcctgtcttttatatatgtcctgtctaaagctaactggaattatgggcccttggcagtaaatgctatgttacctccttgctgaaatttctatcctgtttaaacatgatttatgaaaatcatatatcttaaaatttaatgagataataatgtaaactacctagcattccatcagaagtacagttgatacagtcaataaaattgtagttatttttatgttttaatttctgagcctaatgattgctttcccaaacagtttatttaaattatatagttaagggtaccttacaaggacaatgcacaggctcttagatttcaattagaaatgccagtgagatctcagtgttaattatgacttctcattggaatcatgtcatgttgctgctgttttggtctgccattgtcctccctcaaaagggtccaaagctgagaagccttattctgataattgtttgggaagaaattgtcctaatgtagcaggtaccaaaaagagaaccggtattggcatacaggatacatattcttttttaaatttgtttatttatttttatttttttattatactttaagttctagggtacatgtgcagaatgtgcagatttgctacataggtatatacatgccatggtggtttgttgcacccatcaatctgtcatctacattagctgtttctcctaatactatccctccctttgccccctaccccctgacaggtcttggtgtgtgatgttcccctccttgtatccatatgttctcattgttcaactcccacttatgagtgagaacatgtggtgttcagttgtctgttcctgtgttagtttgctgagaatgatggtttccagtttcacctatatccctgcaaatgacatgaacttattcttttttatggctgcatagtattccatggtgtatatgtgccacgttttctttaacaggttacctgttctaagatcttttataatcatatctttttattagtatttgaagagatggaattagctattggtttgaactttgcttcttccgcctccttccctctgatattattggtgatagttgtgtaaaattgtccagaagaggggagttaattcccactttatagtagggggaattcaggtttatagatggagtctgcctagttctttatctccatagggccagaatgggcatccaatttttttgagtcctagctcagggctctctgctctgggcagtgtgttagcttgttactgaatgaagcatgtgttacctaataaaatcagaatgcgcaacatatgcaaaaataaaactggcaaacaggcatactacttttggctaccagttgtttcatttttacagttgaaaataaatttatcagacttcatttattatgtgtcatataatacaaattttgcagtttgcatattgactatgaaattttttcacatctgtgaattaaatgaggataaaattcttttaacaaaattattaacagagttccttgctcttgattgaaccaagcaaagaatgaaatacacttatatgccacataacaacattttggtcaacaacagaccatgtatgtgatggtggtcccataacattataatggggttgaaaaattgctatcaccaagctagtttgtagtgtatcacattactttttctaggtttagatatgtttcaatacacaaatgcttattattgtaagagagttctcaccagtgactgagtcagctggcaccttgatcttagacttcccagctttcagaattatgagaaaatatatttctgtttaagcaccccagtttgtcatattttgctatggcagcccaagctgtccaagacagatttgaatctcagctctgccactggctggctgaataaacctgggcaaattactttatatctctagtcctcagttttctcattagttcaaaaggctattgagttctgattgtacacacacctgcacccatattaagcacttaatcaatgttagtttccttcgtgtgtttcttaggaaatgacctatgtctgtaggctttggaggtgtttgaaacttagggcaaccagtaagagagataacttaaaggggtttgtttttttttttttttccttttttcattgccctgaacagactctgtgataagtctttgtccatgggacaaaaggagggtgtagaatccagaatctgttacttccttttttttttttttaataaatcaactattatttttgattcaggggtacatgtgtaggtttgttatctgggtatattgcatgatgctaaggttttgggtttgattgatcctctcacccaggtactaagaagagtactcaatagttagtttttcaatctttgtccctttctcccccatctaggagtccccagtgtctattgttgccatctttatgtccatgtgtacccaatgtttagctcccagttataagttagagctagtggtgaaggtttttgggggggtccagtttcattcttctacaaatgggtagccacctagcaccatttattaaatagggagtcctttccccattgcttatttttattgaagattggatgacggtagatgtgtggctttatttttatttttggattctctattcttttccataggtcttttccatgtggtgtttgcttttctgttcctgccttaattcacttacatagcctccagctgcatccatgttactgcaaaggacatgattttgtttgttttttggctgtgtaatgttccgtggtatatatgtaccatgttttccttatccaggccaccattgatgcacacctaggttgattctaaatctttgctattgtgtatagtgctgtgatgaacatatgagtgcatgtgtctttttggtagaacaatttattattacagagaccaaaacagcatggtactggtacaaaaagacacatagacctatggagaagaatagagaatccaaaaataaagccacacatctacagtcatccaatcttcaataaaatcaataaaaataagcaatggggaaaggactccctatttaataaatggtgctagatggccaaccatttgtagaagaatgaaactggacccccaaaaaaccttcatcacatataaaaattaactcaagatggattaaagagttaaatgtaagacctcaaactgtaagagtcgtacaagaaaacctaggaaataccattcgggatattggctttggcaaataatttatgactaagtcctcaaaagtaattgcagcaggaacaaaaattgacaagtggaacctaattaaactaaagagcttctgcacagcacgagaaactctccacagagtaaacggacaacctacaggatgggagaaaatatttgcaaactatacattccacaaaggtcttttatccagcacctactaatacaagaaacttaaacaattcaacaagcaaaaaataaatagcctcatgaaaaaaatggtcaaaagatgaagccataaaaaaaaatgagatcatgtcctttgcagggacatgaatggagctggaggccattatccttagcaaactaacacaggaaaagaaaaccaaataccgcatgttctcacttaaaagtgggagcttaatgacgagaacacgtggacacatagaggagaacaaaacacactggggtctttcagagagtggagggtgagaggagggagaggatcgggaaaaataactaatgggtactaggcttaatacctgggtgatgaaataatctgcacaacaaaccctcatgacacaagtttacctatgtagcaaacctgcacttgtacccctgaacttaaaaaaaaaaaaaaaagagacctgcaactttaattaaaacaacatataacaaaatgaattttgctataggctaattgatataaacaagagttaagttcatatggcatatttctggtcacttttaaataaagaccccaaacacttataatattaaacactgaagtaaatgtgagctatacatacatttaataaagactaatttttaaagatgggtaaaaggtgtgaacacacacttctcaaaagaagacatacaagtggccaacaaacatacgaaaaaatgttctacaccactaatcatcagagaaatgcaaatccaaatcattatgagataccattttacaccagtcagagcaacagatactagcgaggctgtgagaagagggaacacttatatactgttggcaggggtataaattagttcagccactgtggagaacagtgtggggatttctgaaaaaaacgtaaaacacaactctcattagacccagtgatctcattactgggtatatatctaaaaggaactgttacttctgattgagttgggagtgagataagagggaagaaatgggagttaagttcaaggggaacatgtctgaggcagatttgattgttttgtagtttggcttttatttttccgtcagttttcagtaaactagctgaaatgctttttaatactgggctgtacccatttctgatttttgagtacagataagtatgagaattatctaacagctcttagaagttgagcatgactacatgtttggactgttttatctgcaaggaggacaacttgttttggaaacttgaaaggctaaaatctcccctaactgtgtggcttcttaaacattgtctctgtgctgtgagagtcagccatattctatattaattactgttggctctgtaaagcatgtgaaggtagtgggggaagaagtttagctttgttggggaaatgaatattggtgtgggccatgagtagaatctaagtagagacatagacagatgcttttatttcttgctttgacattttatttttcctgatagttaaactagtttctagctatgaatataaagtataagaacactttcatctttttttgctgatggccattctaacaggtgtgagatagtatctcattttggttttaatttacatttctctgattagtgatgtagagcattttttcatttatcagttggccatttgtatgtcttcttctgagaaatgtctgttcagatcctttgcccattttcaatagggttatttgcctttctgttattgagtagtttgttatatatttagacatataaatatattagatattagcccctattcagtgcatgatttgcaaatattttctcccaatttgtggttgtctctgcactctattgttttgtttgtgtgcagaagcattttgatttgatgccatcccatttgtctattttctactttcattgcctgtgcttttgggtcatatccgagaaataattgccctgaccaatgtcatggaacctttcctaacccctgtgttttcttcgagtagttttatagttttaagtctttaattccttttgagtttattcttttatgaaggatgaaataaggatctattttcatttttgtgtatatatagatgtacagttttaataacaccttttattaaataggctgtcctttccccattctgtgttcttgacacctttgttgcaaatcaattgactgtagttagctgggtttatttctggacactccattctattccactggacgatgtgtctatttttatgccaccaccatactgttttgattactatagctttgtaatatattttcaaatctggttgtgtgatttctctggttttgtcctttttgatcaagattactttggctatttggttttttttgtggtttcaaataaattttaggattattttttctatttctgtgaagaatgacactggaattttgattgggattacattgaatctgtagattgctttaggtagtatggccattttaacaatattgagtcttccaatccataaacacagcatatctttccatttatttatgtcgtcttcaatttttttcatcaatgttttattgttttcagtgtacagatttttcatttccttggttaaattttctcctaagtattttttgatgctattataaatggaactgttttcttttttctttttcagactgttgttagtgtatagaaatgcttctgatttttataggtcgacttttgtatcctgcaacttaattgaatttatcagttctaacagttttttgatagagtctgtaggattttctatatacaagattatgtcatcagcaagcagaggcaatttcatttcatccttttctatctgaatgccttttatttatttttcttgcctaattgctctggctaggatgtccagtactatgttgaacagatgtggtgagagtaggcgtccttgtcttgtttctgatcttagaagaaaagctttcaacttttcaccattgagtatcctgttagctcttggcttatcatatatggcctttatcatattaagaaacattctgtctatacccaatttgttgggagtttttatcatgaaacgagtttgccaaggatgtggggaaaagagaactcttccatactgttggtggaatgtaagttaatatagccattgtggaaaacagtgtgaagatttctcaaaaaataacaatagaatttccacatcatccagcaatttcactactgggtatatacccaaagggaatgacttcagtatgtctaagagatgtctatacttctatgttcattgcagcattattaccaataatcacacctcggataaacctcattggcttcagtagtactgcaacagcacctcattggctttgataactgccacagcacaaagctaattgtattattattcacaagagccatgaaatggaaacaacctaagtgtccatcaacagatgattgcattaaaatatataatatatatatacacaatgaaatacaattaaaaaactaggtaattctgtcatttgtaacaacatggacaaacctagaagacattatgttaagtgaaataagccagggacagagagacaaaatctctacgatcacatttatatgtggaatctaaaaaagtcaaagtaatagaggtagaaagtagagtggtggttactagaggctgaggggacaggatggatggggaaaggggagacttggtcagtgggtacaaagtctcatttagataggaggaataagtcctgctggtctattgcacagcatggtgactatggttaataataatgtattgtatatttcaaaatagctaaacaagagggtttaaaatatttgagatgatggatatgttaaataaataattaaagcacaagaacacttctttaaaaatctgcaaataaccctttgacccccctaggaactttccacgatggtttttttttttttttttttgtgactctgtttgcatgtatttggatagcctacacatttgcacttcttttatcctgttggggttgccactgaatcatggttttcttatgaaatttcctatggaacaagttgtacattacaaactccaggtccttttcatagagtctggcttcattcttggagacacaggctttttcgcttccctattaattaccataagaaagttcattcatcatcatttgtttatttttgtaatagtctcaaaaattaggctcagtgtgagcaatgttgtttttccccactaggcttttcagtgtctgatttttttttttttttaatgaaactcaagcttataaggcttgcttagaaattgcttcatgcccccatttttttaaacctttttttttaaagtgttttcctcacatgggatatagaattttaagacctgtttattatatttattgagacattaaaaatgtactaaatgctgttgggaggtttagtgaatggttttcattgaaatgtaaagtcattgagaattagaaatttgagaagaaagtaggctccagtgagcctgtgtaaccttttcatcaattgtagccttgtagtggagaaaagtacatgtgagatactaggctttcataaaaacctactctcagaaatttaatatgagaatttgttttaatttaaaatataagttcattacctagagctttttataaaaagaaatacctcatatgtcttttgaaatcacacataaattattagatcaaggtcaaatgaattataatgtcttttactacaagttcagcaaaaaacttgggttgagcttagattatatttttaatgacattgttccatagttggactttttgattatacttctatgggaagaaagaatgcaatacttggggttgtaccaaagccatgagctttgcatatggttattcttttccctcattgtacttactgtctgaattgagaatcatgtatttgtttatttgtttgtttgttttggccaacctcttgaccctcactaggagggtgactctgtgagcctgaagacagcccactgcagctcaaggccttcctccccataatgttgcatctgttctttaagatcagtgggtgactgcgaatggaattgtccaggaccacatggagcatgcatggaggtagagcccaagtttgaccacagagcacttagtgtgagcccataattaatcacatcaactttgacccttgaactactttgtgtaaaaggtgtggtttttgcaaaaagattcctttggcataatccttgagaggggtcggattggcactgttattttggggcaaggggaagcccctttcataagtagagttatgtttgtatttcaaaattggctgattgaaagttctttgtgttttgacaagcacttctccagcatccctaagtggatactctcaggatgctccctggccacctttatccagttggatgaagtgaggattctgagagttctggagaagatgcaataattgacacttttcacctttcccttatggagccgcatgtgtcctattcttgtgaggtatattctacaaatataatcatagtccttcctctcagctcagtgtgccgagacatcagctaaaacatcaaagtcatgtgatgacatgttatcttttggcatggctgaagcaatgacatttcgtgctgttgactatcttgcatcttctttcacggtcaaacatgaatacagcgagatctttattttctcagccaaatacctctgactacatttttacattaaacaatttaaatcagataattatatgcacgtgattaagaaaataagttgtatagaaaggcctataatggaaaaagcacagtttccaaatctccgtaagaactttgtcacttctccgatagattataaaggaaagaattgttcccttgctttagccactagagcataatagcaggctcatttgaggaaatggtggaacttaagaggagggttctctatcattgtcaaaaacagcatgaaattcttatgaattaagttgtaaagagaatttctgaattgaggaagacattgaaatagattgtctgcaagattccgattaatgctatttttatggttccaaatttaagatagacaatagctgatcataatagggaacacttacagacattactatgcaaagacttgcaacaactgtatgaggcaggtgtttttatctccatcttcaggatgaaagaactgaggcatagagtagtaaaagaaacttaattagcaggtggtggggctatgatctaaacacaggcattctgggtccaggtccatgctctgaacctctgctgtacttgctgagaactctcaatgttacttattctatcagtggcttaagctggaaaaacagtgcatgatttgtttttttcctgtgtggttcttagctatagagctagtctactggttagaggctatggttgctgtgtgcagtgctttagtgttgtactgtctcgctagagtacacattcatgttctgtgtatgggagtggcatgaggggaaaggcagagggggcagagacacacacacagggaggaaaaagatgtgatggataacttgagaatttgctttattccttctattattaccacttgctgtatcttctctctgtgattcaggtgactctgaatcaggtgagttctgtgattcaggtgactctcaggtgttgggggatctctctatgccaacttctgtgccaagtagagagataaagagaatgcatggaaagactatgattgccttagtgaagtactttcatatgaatgttagggtgtatgagagtgactgattttattgttgtacttactagtccctgttgtttccacaaagaaagatgccagcattgacattaacatcagggaggccataattcgttcactcctactgctttctttccttccttgatttcttccaatgcttcagcattcactcaacattaactgtttgcctactctctgccaagctccactcctggcagtgggatacagaaataaagacagagagacaaaaatccatgtctgtgttcccatagaagaaaaacaattttaatatgtaccatgggggaaacgaaaaaaaaaaaaaaagagagagtggaaataaggagcacatcatgagaggagagggaggagtcagggaaagcccaattggaaggtgatagctgaaggccatgacagaaggaaccttgtaaatatctgaggaaagagcatgtgagggaaaacaaccaggcaactgcaaggatcctggggtgactgaaggatcagcacgatgtgagagtgcctggagagagcactcagcggggagagaattggagacgtgatttggataaacaatggggtctgcgggggagggagatcatgtagggctttgctgactttttaagaagtttggcttttactctaagaaagaggaaatactaacagagggtttaggtagaggaacgattggtctgatttgtcttccaagggatgctctgctgagtgcagaatatcaagaagaagggaggtaggcaagaagagcagtgaggagactatcacagcaacagatgtgagatgctggcggccaggaccagagtgggagcagtggagacgtgtgagatatcagattcctaatatgtttcgagggaggaggcaacaggttttggtgatgtagactgtgagaaaaagataggactctaggattattggcctaagttaatgaaaggttgtcattgcatttactgagatagggaaaactgcagaaagagcaggtttgggagcggaagatcagcaattccaggtcagactttgtttgcttgagagagaatggaaagacagtgatttggagactacaggtgtagactttttgctgagacaaagtgcatgaacctggtggtatacctatagctggtaggggaaattggggtcaagaaagggtgttcttttttttaagtttttttttttttttgtcttttattatactttaagttctgggatacatgtgcagaacgtgcaggtttgttacataggtatacacgtgccatggtgttttgctgcatgcatcaacccgtcacctacattaggtatttctcctaatgctatccctcccctagccccccaaccccaaacaggccccagtgtgtgatgttcccctctctgtgtccatgtgttctcattgttcagctcccacttataagtgagaacatgtggtgcttggttttctgttcctgtggtagtttgctgagaatgatggtttccagcttcatccatgtccctgcaaaggacatgaactcatccttttttatggctgcatagtattccatggtgtatatgtgccacattttttttttatctagtctatcattgatgggcatttgggttggttccaagtctttgctattgtgaacagtgctgcaataaacatacctgtgcatgtgtgtttatagtagaatgatttataatcttttgggtatatacccagtaatgggattgctgggtcaaatggtatttctggttctgggtccttgagaaattgccacactgtcctccacaatggttgaactaatttacactctcaccaacagtgtaaaagcattccttttctccacatcctctccagcatctgttgtttcctgactttttaatgctcgccattctaactggtgtgagatagtgtctcactgtggttttgatttgcatttctccaatgaccagtaatgatgagcttttttccctatgtctgttggctgcatacatgtcttcttttgagaagtgtctgttcatatcctttgcccactttttgatgggaaagggtattcttaagtagaaagtatagcctgtttgttatccatgcaaatgacctctaaggaatggaagaatccagcgtataagagggatcaaaccaaatatggtggctcacacctataatctcagcacttagggaggctaaggccaaaggattgcttgagaagtttgagactagcctgggcaatccctatcatttctgcaagggaagtatagtatgaatgctgggcagcagtgaagggcccacctgaggttagtggccatgattttaagggtggtttgcatttctctctgcaatgttcagctgttcaggacacaggcattagaataggtgaagaggtggttttaacaagggttgaggtcttgtcatttgcatatgatattttattatagaggaattaaagggtgtatatgaccctggaaggcatgaataatggtgcgtggttaagaatgtgtgttaggatgtaagggaagagtgtgagggacaatataatttgaggagaagcttcatgtgtcctggtgaaactgatgagaacactttgaccctaccttgggggttaagtagaggataacaatgcacttgagatgagtcaatcatctgaaataatcatgtgaacacttagttgcaccaaagcaaaaggaaaatgcacaattcatattgttagtggaagatgcagttatctattggggtgtgtgtcagtgttttccatccttttccaaatgacaccccatttgccaccatgaccctcatggtgcagactacacaggctgctcaattttccacaatcatgtaagtttgtaaaatatcctcaagattatatactgcttgaatctactatgttgcatgtagagtatttctagatgggtaagaatcagatcaagtggcaaggacgaagagagatgtattctatattgagcatattttctatttttcgaggctctgcctggaaaggggacagaatgctcagtgttgcctcattttctcatcaaacttgacactagttcactggggaaattgcatttccaagttgttttaaatcaggaagttgttttaaaatcaggctgtgtgtttgtgtttgcactgttgccacttaatccttgatcctgttaaatgtttcttccatacagaggaacataaacaatagcggctttcttgatttcctaacattcatgtaaagataagttggaaatattatatttaataaacgtaaaatactgtaattaaatgtaaacagaaaattcaattaccattttggtggattgttggataataacattgaatatttgtcacagtagccatttggaagagaatacagattgagttattgatgggatccaagttgacattaattatttcattagaaaaatatatttcttctaattcttagaattttttattttaaaatctggtatgatcaatccgtttaagaccagcaggtctaaactctcccggactctaggactgccatgtttgaatacagttatattgaacctttctgccttttctttttttttttttcaaataaatggagggagaaggatgtgttttatgaagattatgccttacccaactttaagtacctgcatcttcttctttttttttttttttttttttttttgagacagagttgcactctgtcgcccaggctggagtgcagtggcacaatcttggcttgctgcaacctctgcctcccaggttcaagtgattctcttgcctcagcctcccaagtaactgggattacaggcacctgccaccatgcccggctaatttttttgtatttttagtagagacgaggtttcaccatgttggccagcctggttttgaactcccgacctcaagtgatccgcccgtcttggcctcccaaagtgctaggattacaggtgtgagccacagcgcctggcccgtacctacatcttctaacattgccttatttaccagagtgaaggcttttgaaatatttagatgtctggtaaacaataaacttaaaaatattgagttcgttaaaaatggaactcaaatgtttatttaaattctaagaggctttactgttttttgaaatatttgaaatgtttagaatagttaccaacatgcatactttacacttttgagatgaattatttctaattcaaatgtacttatcagtggtccaatgaaccccgattcctattacactgtgcatatattaatgcttcttgctaagtgcccacttttaaaagtttatttcataactatataaacaggcatttggggctcctggcctcactgctgcagagtgtctggaatgagcatttgtagggtcagttgtcattatcttggtcacgatctttggagtgctgtattcccatcacctgctgcacatagcacaaggtctgggtgtcacaaagacatgacgtgactcttctagcatctgtgatactcttgagtagtaatttcagaatacttagtgaaaggctcgaagtgttgaaatacgatgaagtctggggagttaacttttagcctcgactttaactcatttattctgtgccaaagaggaatttgggggagaggttgagttttcctttgtggtagcctggcaggtgaggacaaatccacttactctcctctttcctcagctagaagagacgaggaatggaaggagatttgatattccttaggaattttattaataggaaattgcttcttctttaacaatgaggatcataacttcagctgagattaacttttaagggctttattaaactgttttagccactagcaacgatttcccttacacagatacatttagattgactttgcacatcttgaaaataagaaacaaatgaaaataccagagtatctttatatgtataagttgtgaaatttgaagtctgcattacttcttattggttcagttttcatgggattatttatgtataggagcagccaaggaaaagaccatagcagatttttgtaatgatggaatgagattcctggcctgtcaagccagtaggtgtgggactatggagaaagttcctaaattttagtccagttatttgaatggaatcttgaagagacatttactattcatagagcaacctgagctcgaactgtaattttgttctagttgggcagtgggggaagagaagagacttgaaactagtgttatatgatggacacgtcagtgctgaaaattcacggtgcctgaggtaggttaaaccttcctccaaccaatggtttccatgcaagctttttaacacagtgatgcctatcctatatttttactatttgcacatattacgagcgattgaaggatgttaggaagctctgacaataaaaatggttttctttaatgaaaaaaaaattctgataccgtgagaagaggacagatacatcttgctcaattaaatcaaaatgtgtgggacacctcatttctgcagttgcagaaatgctgaaagtcactggatacttaaagcaatgaaggaggaagaggttggggttgggaaaagcaaaactgataatctcctttgtgaagacatcactgtaagaagcaggtggtacttactgaactctggagagaatggaaagtgtgaggacagcacagtaaatagaaggaaaattcccttagcagtccactttccaggcaccagtcacctctggaactttaattagaactcaaaaatgtgagtggaggaattagaacagaggcctttctatcttatatttgaaaagtatttattttacttagaagcaactttttattaattaaaagcacatcagataaatcctaatatttgaaacacctccccatatttaactaattcctcattcttctagacaaggaaacattaaagtaatttttacacatcaacatatacttcagaagagaaaaaagaaaccttcattaactgaacaaataacaaaatatgactcaacatacacaaaaaccagtgtatcatatttttgcatatattaactacatgttgatgtaaataggaacaaaattattccaaagggagggtgataaatatgtgggttttagatttttcatgtttttaaacatattggaaatgtaatgaaatacaagttgattaaggtgatctctgtagtacagtggaaggtattaccctaacatgtctaattttggtatgtgagctctgatcttctcagtcatatgttacaaattcacaactgagttttcttttttttatgaatttttaatttttagtgaccaaacttcttagttcttccccctacctcagcatgtctgccaatatataaatgtttacatatactaaagaagttgaatatttaaatgaagttttaggtgaactattttaaaaaggaaaattttttcccttaaaattgtgattataatcattgtgtttataattcaagcttttctgttttaggtttctttcagtgagacatgtttgtgtagcactacactgaaaaaagatgattcttattggtatgaaagttattttggcataagacattttagatttctgatagattctggacttatggagcaatatatatgcttacattcaaaataaagtttatcactgtgccccttttagagcatgtgttagaaaacagtggcaaaatgtgatcccagagttagggttctatttccaggggaactcactaagccctcttttacaagagcataaatgtttacctaagcaagaaggtgaaatctgttatgcccaataaaggacattttgcagtgctggtttacggaaaacattcaacagacagtggatgttttacataaagtacagtgcgttgtttgaaactctttgctcatctatacactatgcttaaaataaacactatctgggaatatacccgtcttttttctacctcccttattccacaccctagattttgtcacctgccaaagtcaaataaatcttatctaaacagttgagataagcgccgagtcgtacccagtgtggtcaaatcaacaaacctctccaaaaacagaaatgaaatacaatatcgctagattaaacagtctacaatggtaatcatgtttgcatttaaagattttattccaaaaggatcacagtcttggtatccatttttttccctcctgcctagacaagacggcgacatactgactcaaacaaaatgcatttgttctctaacaatttaacttgtacagctcttataaacaaggcccataggtgtatgaagcctaccgacttaatcagtaacttatgtcgttaaccttgtataagcaagtatgcttgagatgtaccagtgttggattgtgtatgggatttagttttttcttgcaggaaagcctttctttatgtagcctgagtgcaaagtctatggcattctgggattttattgtctgtatcttacagtaaagctccatcatgctaaactgttcaaaaagagaagatagtacaaattaaagtgatttctaaattataggatattataaaaaatgcagttttcttccttcctaggacatatggtattttaactgtttgataacaaggtgtaaactctactagggcaggaaccgtgtctgtctggtttatgctgtatcctcagggcggacaagagtacctagctcagaattagaattctgaatatttgttcaatgaatcaatgatgttttccagaagatattctgtcttctctgtggatgaataaaaatattttgtaattattacattaatttctgatatttaaaagcatgtctctcgagagtacatttttgtcttacagtttttaataaatggtctcctttcaatgtcgtaccatttaattagcaaaatttaaaatacgcaataaaggaaggacaaatgacacaatatcactcattttttggtaatatctctaaggtactgtatttgtgcatttcttactgtagagcaatttatacactgactgctggtttgaaaataacccatttttccattattctttaagcagatcttcatttactttggttcatgaaattgggaattagcccagttgtatatagatgcgtgatttgaatatactgtccttttatttttaaggtccaaacaataatacgaaacttatagtcttattttctaatttatattttgctttatgagagcaaatatatctacaaaggtatatgtgctatttagacattgaccgaaaactgaagaacctttcattttagagtgcctgctataacaaggactgttttccacacaatagaggagttacctctaatctttataatatccatttaaggggataataacattaccactgatatgtctatttcccatgtgaataaaccaaagctcatagagcttaccaagtctctccaagagatgcacagctggttagtcacagagccctgtttttagttcaggtctatctaaatccaaaacacaaggtctaagtctcatgtaattctggagaaaaccacaacttttgagttattatattggtgagttaagacttctcagtaaacatgttactgtttaaactagagcttttaatcagaagagagtaataaaatttagaagtcttacaaatacaaggaatagaacgccactatttaaatttgggatcaaaagaagaatgctgttggtatatgtgccatttaactggcctttatcatggtctttagataatccagaattacttgaaatattactcacgagcgtgtgtgcagggtttcaggtgtatgttaagaatgcctggcagcacgtcttctggcaagatgcccacgtttgtgtgcatactcaaaggccccaggtttccaggtgcccaagcatcttagtggtgagatgcagaaagaatgcaagtagtatttcctttcatcttatcatcgagtgtaaaatgttccgatgaatatggtagcaagtgtcttccttcctttgaaatatgagttttcatcagctgttggatatgctcacgtaactaagccaagcaaaatccaacacaaatttaaaagttgcttggctacctctttagaaaatttttgttatgtaatatacattttggaagtttttaatgtaactgcccaggtgtgcagattttcagctggagattgatgcatcagcattctattccttagaaaacaatgctgggtgtgactcttgactcctttcacatccagttgcacagtgacatgcacctcccgaaggtttctatgctttattgagtttcaaataaagattgagggatgatagttctaggcatttctgccaagctgtgtttttcttttttttcttcttccttcttacatcttctcagcagattaattagaacagtaattgaaataaataaaaattaaggcagccctgaaaataaaaatgagccttttgtatccaccacagattatagatgcagaggaggaaaaggaggcttcttcccctagtaatgtctgtctgttgctcttttctttgcagttcctctcctcattactatttagaggctcatgcttgtattaccatttgcagcagggatttttgcctatgccagtatttatttggctttcactttctcaggcatttcggcctttgtgcatttctggagccaataaggcaaatgtgtgagtggtggcatcctttcttaaggttacctattatgacttttccctggaggttcagcaatgacttttgtttttcacattacacacttcttcagttgtctgctatatgcaggacactctggcatgatacaataatgtctaagacaagatccctgctattaggctcttaaaaatcttcttggagcgaccaaccacatacttttatacaatagagggagtagctggagtgtatcagatggcttttattaatgttaaagggtggaatccaaaggtagggaaagtcatgagccttggtatttatggagtgttttggagattacttagactggagcttgaaattgctattttgttagaaacagcagttcgtccacatttagagccatactttccagtttccctttccttccaggtgaccataggaaactgatccggtcagtgagatgtaagtagaagtctcctaaaaatttatgatccatcggcattgtgcatttcttcttgttgctttcctctttcctccttcgtctggcctggaatgtgaaagtgatggctggtacagtagcagcaattgttccaagtgaggaaaaggaaaaggcatgtgaagaccacttaaaaattttgggccctaacatattttatcccctgaatcaatggcaacctaccttagctttgttcaagtctctatctactcagatattcttttacttactgctgaaaacaattttttaactgattcaaatgtatttagcactttggccatattgtcatgtgggtaattgtcaggatttcattcatatttcaaataatcttcatcactatattctaactagatgcccatatcactccctaatatgagccaatcttttaagctgggggggaggattgagttagaaacaaacagtcaggaatgactgacattttccccctcatctagaccctgtgttttcattttacttcctaataaactcaaagatattggaattcagtttttatttctctttaattccactagaatacagatgatagcttctataaaagcactttcccttccccagctgtccactcttggaattctttgtccatctacacaacttttcctcaactttatattgttttgtcttttaacacctaaagacaaacacaaacttagctaggtaagaagagggaaatatttctactattagatgaaggattataaaagaaaggcagagaaactttctaagttgtaatctgtcttctagcttcagagtccctcaaatttttaaggaccttttctgggtccttaaaaacgtaaaaactaataggcaatgtagtgagtaagttctgtgaacagaaggatcaccagggacacagcttctggctgggctagagtgtgaaccaagtgctttatatctggcaggcatatggtcagagggagtacgtgattctatggtttttgttaatcttaactcgctgggatctactctcaggaactggtcaaccttttctttcctgttatttggatgttggccttcctaaatttgtctaaatttcttggctttttcctcttcgtttcctttttgatctacttttgggaaattctcacatgtatttcccaaatcttctattgggtttttctgttaccctgttttttgtttgaagaaacattttgttcaattaggagggtgttgcaagaattgcaggcaataatcgggaatgtctgagaatggggtggtaggggtgggtgtggtgaggtgaagtcatattctggatgtgtttggaatgtgaagccaacacgattcatgatgtgttggatgtggaaggtgaggggaagggaggaattaaggacagttcctctgaacaccaagcagatggaggctccgtcatgtaagacagaagaacatgtatagagtgtgctgtctgttagacacccaagtggtgatgctgagaaggctgttggttctataagtgaggagttcaggaaggaggtcggaagctggagatgaaagtgctggagtatttcaagcccaccgtgagactgggcgagaccaccaaggcggtgagtgtagatagaggtaagaaagggtggcagtagtgagccctaggacattccaaaaatgagaggttagggagagaaagagccagcaggggagactgaggaatggggaacattagaagtaggaggaagaggaagagagagtggtatcctggaagctaggataaatgtttagcacgtgtatcggaaggaatttataactgtgtcacatgctgccaagggttgagaaatgtgcatttggatttcacaagatctaaaacactggtgactcagtaatcagagcaaagacttgatgagtgggtttaggaagtgatgggcagagaagaaggtggggacaacaagtattgacgacactttgtaggagttggaagagttttactgctttatttttttttcctttttttcccccgctctggtttctaacatcccttgtagaggcttcccatagatgatttgatccttggctgtctgttcttgcttaagtctaaaaggtgatgagaagccctgagtcttcatgttgggctcttggactttgagttcagtgtagcattttcggtgtgggttttttgtcgggtattcacccatgtctttatcttttggtcttttttcctgggatggagagatttcctggagacttcccatttctggcttggggtgtaaaggcctgtctggcagtgttctggaccctaaattgggggaggagggctgaatggaggtatggaggcttttgtattcaacatgcagtactccacatggtccctgtgtattcagcatagcaacctatcctacaattgtgattgctgtgtctttgtccagagacttagatttaatttctcaagaaaatcaacctgatgaagttgggaaggactttttcagaatgagcatgtaactgactgactggcagcattcatccagtgctccttgtttctgatattccttgctttaccctcagttggacaagtgcctgttgccagttccttggccttcagggttggtgctcagttttctcagtgaaagttatggttttatcattttaaggtctacgaaactgagtagagctggcttccacattttgttgctgtcatctcatcttctttcttccagtccttatgggtttacttttttaaatatgtttttactatagctttagtgaaacttcaggagagaacaaaatcaaatgtgtgtacttcctgtgccatcttaatcagagatgcttcccagcagtacgtattaatacatatcacagtgcaaatggaatgaagcaatctgaatgttaggtgatgctattaagatttagaccatctatttagtagtcgttcactttcaaactctgtcactttgaggatcttttacacctgacaacgcagttctttctgctgtttgcacaagctctaccttgtgcttttattgtggtgtaattgttgtgtagttatttgtcgatgtgtctttctacttcactatactgtcagctcttctagatgggggagtgtgtataactccagattcccaaaatgttttgtaggacatttacaaaagagataacaaatactgtcagatacatttcaattacgcatccccaaaatgtaaaagtttctatttcactgaaatatacagtgaaacaaaaattaactgcttacatgtcctcgtcgtcctgattttaaagtcgaaatgacatgctccctgcagttcctcagagagatctcttacaaaatgtagtttcctggtagctagagtaagatgacaaacctgactcttaaatgagaggatgcttctgatctctgctacataagatgagtgtctgctcaaacaaaggtctttgcttctcagcagcttgcaaagctaacttcatcaaagcttttcctgtggcttctgtattttaaatggggtaaagatgctttcttcaagcccttatactctgccagtgaaaagagggcatgaaccgtaaatatgggctgatttgtactcattttgtgtttaagcttctgctgactctacttctctttccatgtactttaacccaaattagtgttaatggcttccctctggttacttgtttagtcttctatgttactatcagtacaactgaaactgtcatttttctttttgctgagaatgttttcaacctggttcatctgaaacctctcaatctaagatactgatttggagagagattaaaaaaaacattttccattataggaatgtgaaatgggccgtaataataatcacaacaaccaacattttctgagtgtttgctttgtgcgtggcactgcatttgacttttattatttaatctcctgcaagaactctgtagggcaggtcctcttcttattaggtccattctgcagatgaggaacttgagactctctgggttatgcagataataagttgtgtggtcactgtgccccactgccttccagtgccatcaggtggcaatgtgacatgacatattatctttgtgttctgtatttttgagctatgatgtcagctagagtgaagttagttatttatgaaaggacaatcagagtgatctcaaagaaaggtcagtttatccagtaaaattaaaggcagagttgattttcaggaattgctaacctcagcctgttttagcctttcagcattcgagaaagatgtttttccaagtcttttgtgtactgggttcttctagatagagaaaggatacaacagtgaatgaagcatgaccatgtaattatggagggaagggtctgtccatattgtctcacacgtctctgtatatctacagaacgtatctcatatgatctctatttatagaaatgatgaggtttagctgatttgataggttatgcctaaaccagaagccagccttcctgactagtgcactttttctttccactgaatcatgatgcttctccatgtcttttgtcaacctagagcctaataggagaataaaaacattcgaattaatgaaattaacacaaggtagagacccatagagcaacacaagttggaagctgaagtccaaggaacagagagccatgggttagcaatgtgttgtgatgggcagcccctcagatggtccctggagatccccaccttctgagactcacggccctgtgatattccctagcccttatatgtgggctacactcacgactcacactgaatagaatagaacagaacaggggtgatgggatgtcacttccaaaataaggttacaaagagaaggaggccctgtctcgtatgccctttctgtctcactctaagggaagccaactaccttgagagttgtctatgaagaagcccatctggcaagaaactgagtcagacttccagccaaccagtagtgagatgctgaggccctcagcctgaggaactgaatcctgccaacagcctgtgagtaaggctggaaacagatcttcctgcagagccttcagatgagaccgtagcccccgccaacactgtgattgcagtcttatgggagaccttgaggcaaaggcccctagctgagctgcacctggatttgtgacccacagaacgtgtgagataatccatgtgtgctctgtaagcccctaagctttggtgtaacttgccctgcagaaatgaataacacacttggtaataaacactgtgagattttctagtttggggcatctttaccaccagtttagcaggtcacacaggaaagattaaagtaggtgactgcagtggctgggataagtgttcatggcttatgaaaggaaggggccatcaagcacagccctgagagactgctccagtcctgtctcatccaacagatccctgattttaaaaaatatcaatgtaaggcatgtactaacactgttccatagcttaaaatgttgcattcaacaagagtaatcctatcatattgaattatacaaataggttgggcaccgtggctcatgcctgcaatctcagcactttggaagcctgaggtgggaggatcacttgaggccaggagttcaagaccggcctgggcaacatagcaagacctttttctctacaaaaaaattaaaaaaatagaaatattatctgggcatggtggcatgtacctgttgtccccgccacatggagaggctgagatgagaagattgcttgaacccaggagtctgaggctgcagtgagctatgatcataccactgcaccctagcatgggtgacagagtgagaccctgtcactctgtctctctctaaaaaaaagggattacacaaataaagtgaactacttaatctggctattcaaaatatgtgaaagatcaacaaatttgtctaataatgttttgttgaagtgctttgttttaaatgagttccttttaaggcacatttaaaataagtcctttcccttctgtgcagttctttgaaagtatagagacaggattcattttatcatgtaaacattcatacagatagattactttgctctctagcctgtgggtaattcaacatttgtagtaagttagaataagaagcatgtaccacatttctggtgctgacaaaggcagccacggaggagaacacgttaatagcaaagaccaagtgtccaaggatagacacctgcctgcgcacagtcaagagtgggactgtttcttatgttgagtctataatgcttggttgttttgaattgctttattcttttatttttttaatgtaatgcagtcatcgatcaaaatcttaaaatcaaaagaaaacagatttctttttctgtttggacattttgagacattttaaatatcttaggttaaattgacgattggacttccaaaacaggccatttcatttttcattttttaacagcatgctttaacaacaatgacattggatcttagcgagctcataccggtggagcaagttcgtaccggaggagttcatgatgagaatagctattgtgaaattaacttttaactattgaacgcaaatgtttagtcctgaacctagttttaatttagcacctagttttaatctaatttctgaaccaatgtgtttacaggtaacatacaccttaaaattaatcacacccattattccaagcctttctgaattatttttctactatataattacttattttccccacatgataagcatatgctataaacgaaagttatcccacttgataaagtctcagagaagtttagtgtcttgatcaaagacacacagccatttggtatgaaagcctgaaagattactatgttctactctctatctagacattggcatttgataaaatcgtagacaagaattgttgtctattttggtctggagtgatgtctgtttgtttggttttttttttttgtttttttttttttttgagacagagtctggctctgtcacccaggctggagtacagaggcatgatcttggctcacgtagatcttggcctaggtagatctaggccctctacctcccgggttcaagtgattatcctgccttagcctcccgagtagctgggattacaggcatgcaccaccacacctggctaatttttgtatttttagtagagacaggatttcaccatgttgtccaggctggtctcgaattctgggcctcaggtgatccgcctgccttggcctcccagagtgctggaattacaggcgtgagccaccacatccagctggagtgattagtaacacgtggtcatttgtaggttgtttaaaggaagtggtaaatatctccgttgttttaatcctggaaatgtagcatatttgacaaataagtgaataatcttttaatgtgcaaaaaaggtctatagttcctctcaacacctttctccttgaacccactcacataaaaacagaacagatgcttcctggttaaattgatttatatatatttttgagaaagtgattaaaactgcattgtagacctgcagggggtgggtgggggtgggaattgtaaagagtcgcagacaaggatgggtgttactcagcatcttaaagcagcaaggaggaaatgagtgtgagatatctgacctccaatctgaaatgtaatcacattaacaccttgctgaatattagagaataaagtaatctgaactaaacatttatcactgaatattcttttaaattttggatttatctgaaatctagtcttctgcttaatcatttaaatgctaataaacaagacagagtataatgaagaagcccaggtagttctgtaccaggctctcttgtttcactctaatggtttatcattcaggtaaaggttccatccctcagtagatgcagttggaatggattttttgtttttcttttttttggatacacggggaagctaaaacacaaattgaaaaaaagtcaactcgtttaaccttgggcttcatagcaaggctcacttgagcaggaaggatgttctaatagttgaatttatgtgaaaagttggcatggggaggtaacattaaccaactacatgtcagacccttttacttgttattgcctctaagccccacaaaaaccccaaaccaaaacttggctaatattttccattatttccttgcccctgccccataaaggaactgaaacttataaaaagtaacttacttgaagtaatgcagcagcaaataaaaatttaaatttaaacttagtttagttcgattccatgttctatgtttgttccacatcaggaaacagcatcttgtaaaaataatattccctttggaggaactgtcaccttgatataatttcaatactcaggttctttcctccgaaacaaggctgaaattttggacttggaaccaagaaatttctgaggagttttttctttgaatctttttgccaccgaaataaataaatacataaataagtaagtaggtaagtacataagtaaataagtaaaaaataaaaaatgcattcagtcattcttagcatgatctagaactctgatcatggtattctcttctctgtgcattaccagttgtctgcagactttcaaggctgggctattcagcatattcccacccaaatagctccaacttcaaatcattattactcaagtaactgttaacacttctagtatactagtgtaatccctgatgtataggaaacacctcacatttgttgaatacatttgggaatgcttatttccttgattttagaattccatccattgaaaatgtaccattgaccaaatcacagattttaaggaagggagaaatggaagatgctactaaacgtctagtaacatagacattttgatctaagtcctgatttctgaaatgttagcatatgctttttaaactggggaggaagtatggcacttcgataattgtaatctttcccaaattgcttcttttacctttatttcctgtctagaatttctatcactgcatccattcatctgtcagtatttaatctttctttctttttggctacaaaagcatgattagattttgccctgaaaactgctcgttcccatttgaattgtgttaatttctctcaggtcaactagggggaagttatatggagaaacagtaacagtgctgctttccagtgagattttctgtggatgagtaaaaaatgagatttcatgggttaggaccctttgagaacttgtttaggagcacataacatgtattaagatattcattattaagaatattctttcgatctcatgtatatgacattgcatgagatagaaagatgagaaacctcaggatattcacaagttttatgtggggaaaacttgtgggtataatagtatggtttaaaatgatggataaagtcaaaggacaactgtgtactttatgagctttgaattgatcatgaatgattttattgtgtttctttgccttgttctggggatgaaatctgacaccaagttgaccccttgcatttcctttatagttttcttatcatgtagagaattactggattattagctagctgatgaattccaaaatcagaaacctttggattcactgtaagatattcttgaagagctagactctgcacaaattgaaagaagataattccatacataaatttactgtttttacttgggttttgtgccttttcttacatattatcacagcaaaattattagctaatcctttttaattaatttttgaaatatagtcaaaggtatttggactgtgcctttactactttgaaacattaaagttcacgatatttttgccttatatggtctaatgaataagatttgtctgagactcttactcttagatatgtatttcacacctaatttttttggaaattgagatagtggattattattagggtggaagtatcatattctacttggtacaatattttttggtgaatctgggctcccttcccagctccaaatacaaatgctaaattaccttgtttagatttcttatccatcctgtgcttcgatttcccacttgtctttttaaattctttcttgggattttgccagagtcaactagaaaatgtctcatgtgaaactttgagagaagagacattgtaaaatgcctcttatcaaaataaatatatccagtttgtgattattcacttggtgatttttgtcccggaaatttttaactccccaagagcttcactggctacttggcacaaattctatcaaggcaaattcaccttgtttctaccaaatatccatgtagaaaacacagaatgatttgtattaacctatgcctaaagcaagtaataaagcacacctactccaaaatacaatacaaatttccccaggcaacaaatgcgtaaagaaaatattgctgatttttctattatctatcctgcttcttccttgtataaccatgggtagtatatatttgaaggatggatttttaaggtaggatctgtgctaataccactaccaatataaaagattcatcctttgattataatattttgaggaattataataggaaatgcccccatcatttttatactaagtccatctgtttaatgattaaatttcacctttgtcaaaggtcctagatatactggtgaatttaagcatttattgatataaaactgggatgtagcattcactggagtgatttgcttattttgctggtatgaagcagatttttcaaattcattcagttcggctgtgaaaaacagacctcacagtttctctctgacctttgcctgggccattttcatgggatttagtatttgcggagcaagtgaaagctttaacacttgacacctggcccagcgaaattcctggtgcaggctttgcagtgggggcaaggggaaacattgaagttaaagcccctgctccctctggctgctgagccgtgagcctgctgcctgagatggtcaaacatcttttcacaggtggcttatggcaatttatattcttcttttttttccacagctgttgtgaacttggataattctgtggttgacctggagacccttcaagctctctatgagaatgtgagtaatagaaggaattttatgtgtgagtatataatatgtacacagtacatgtctatgtgcacatataggctctttgttttaaggtcctctaaagaaatttgatccgagtgtagtgaatttgcctaagtaggtgtttgttacaatactttctaggaacatatcaaacaaatgtgtggtctcatggtttgaaaaattgtgaatcaaatcatattgcatatgaggtcattcattatttttttaaatttaaataatagtactgatgtgggggctaacttgagccaagcattgttctgtgcacttcatacacacacacacacacacacacacacacacacacactcacacacacttaaaattttaaaatatgtaactgaaaaagattgaatacattcattccaggtgtatgtattgaacatattcatgctgagttgatatacacattgattaccacaatcagattaacacatccatcaccacccacacttatatataagatctctagaagttattcatcttataactgaaagtttgtaccttttgaccaatatctccctattttcctacctcccacccctgggcaaccaccgttatgctttctgtttctatgagttcaagttttttagattccttatttgtctttctgtgtctagcttatttcacttagcattatgccctccaggttcatccatgatgttgcaaatggcaggattgctttcttttttatgggtgaataatattccatggtgtatatgtaccacattttctttatccattcatctgttgatggacactggttggttttatatcttgtctcttatgagtagtgctgcagtgaacatgaaagtacagatatctcttcaacatacttttcatttcctttggatgtattcccagaagtagaattgctggatcatatggtagttctgtctttaatattttgagcaacacctacactgctttctattatggctgtaccaatttacattcccatcgacagtgtgccagggttcccttttcttcgcatcttcaccaacacctgttatctctctcctaatagccttgccaacagatgtgaagtcatagctcactgtggttttgatttgcatttctctgatgaactgtgatcaaatgctattattatcacccctgttttacatgaggaaagttagagaggttagatgacttactcagggtcacatagctagtgttgtgatatagctggggtttagttcattctgcctgtttctctatactgctacagtttatttcactaggtggcaggacatttagcttttgttatgtagtactttttttttttttttttttaacaaaggtggtagagaaagggagtaaggtattgaaggagaataaccatagcacgatatagtcagtgctattgggaagtgtgatatgagagatgtctttagctagaatgtgacattaaataatattgattcaagtagtaataaagcaggttgttttcagtgcttttgattatatttaaggtaaagtctcagtgtggtcctattttgggtctaatatctttgagtgcttttttttttttttttttttttttactttatttctgttcttgcctttgatctgcctggtatttaagcctctgctctttggggcatggccttagttggtccttaacttttctgtctcaagtcaaataattcttggctctggggagacccatgtggtgggcaggatgcagactctgttccttgatcactcccttgaggactgtgtattcaacctgctcatccactcttgagtttggttttttttttttaacatatgttatatggtggtctcatctgtgagattgagaccgatgtaagacaaaatatgtctcatggtgcattgtacagaatctgtgggccaagtgtagaattggtacccattaagcatggtgagcataagcattcagtgaaactgagtcagaaacaaagattgagagggaagctttcagtgatttattatacagttgtcactatgcaaagggaaaactggaaaaagtaaatcgtgtgtttagtatattcacattccaatgaaattggtatttaaaatataaccattgggaggtacagagagttttcatttctcttgagtctttcatactaaccctcttccaaccaggagggccatatggaagaaaggaggaaatactagaggaaagtaatttcttcagcaggtcataatgatttaagatgttggtgtgtgtgtatctatctatcttgcacatatatattacatatatacatttggtgtatacatggtgtgtgtgtgtatctatatgtgtgtatgtgtatctaggaatgaatgtcttatttacacttgatgtatttatgtgtagaaatatacccagaaaatacagaacattgaatgtttattttatgatggtttagaatattttatttgggctgggtgtggtggctcatgcctgtaatcctagcactttgggaggccaaggcgggaggatcacgaggtcgggagttcgagaacagcctggccaacatggtgaaaccccgtctctactaaaaatacaaacataagccaggcatggtggcccgggcacgtgtaatcccagctactcgggaggctaaggcaggagaattacttgaatctgggaggcggaggttgctgtgagccgagattgcatcactgcactccagcctggtgacagagtgagactccatctcaaaaaaaaaaaaaaaaaaaaaagaatattttatttgggagtgtttagcctttcaaagtaaagtaatttcacaaaatataaatttatgactcaggacaaactggatagctacccagaatcttatcttacttcatgaaagtagaaaaagtactgtgtcttagtctgtttgggctgctataatagaataccatagcctaaatggcttatgaagtgttatttctcccagttttggagactgagatttccaagatgaaggcactggcagatttgggatctggtgagggccctcttccaggttcacagactgcggtgttcttgctgtaacctcacatggtagaagggacaagggagctgcttggggtctcttctacaagggcactgatctcattcaagagggctctgctctcatggcctaattgcttccaaaaggccctaccttgataccatcatcctggggataaggtttcaacctatggaactgagggtggggcgtaaacattcagcgtatagtatactagctggcactggttaaacttaattacaatttttattgctgctgttctcaaactttaaggttcagactttcattgtttcaggaaaacaattattttgtgagagggtgattcacaattattagtttaggtagtaccaggttagccctctgcagtacaggaacttgaaggatccgttatgaacaataacaggtcattgtgcgtattttatatgccaataatacatatatgcaaattcctgattaatatctattaaaaaataagtcttgggaaggcaaaaatagttgttttatccacagcaatagctccagaacctagagttaagtagtatttggaacagttcttccctaaacgtcctgtatatcaggggtcctcaaccctcaggccaaggaccagtaccattctgtggcctgttaggaactgggccacacagcagaaggtgagccactggtgagcaagcattactgcctgagctccacttcctgttggatctgtggtggcattagcttatcataggagctaggagtacaaacccttttgtgaactgcgtatgcacgggatctaggttgcctgctctttatgagaacctaatgcctgatgatctgaggtagaacaatttcatcaccaaaccatccccataatgccaggtctgtggaagaattgtcttccacaaaactggtccctggtgccaaaaaggttggggaccgctgctgtctatgtaagacattgttgaaatcttatagtactcctttcttcctttcctgggaattttccactttttgctttatgttatctttatgtatgcatatgtcttatcttctcacttaactacaaattccttattagttgaattttttttttttgaggtggagtctcactctgtcacccaagctggagtgcagtggcgcagtcttggcccactgcaacctctgcctcccaggttcaagttctcctaccccagcttccagggtagctgggattacaggcacccaccgccacaccgggctaatttttgtatttttaggagagactgggttttgccatgttggctaggctggtctcgaactcctgacctcaggtgatccacccgcctcgaccttacaaagtgctgggattacaggcgtgagccaccacacatggcctgagtttttatattccatattgaacaatatggtttgtataaaatattcataataattactacttaaacaatgacctgagaatagtaatgttttccttttggtattattttataattgacagaaatgaaaatggttaatgtcattatttacatttcaaatgctctgctttttttaaacatcagtataaaaggaaatctggctttcttaaaaataaggtaatttcagaaatatttctgcagagactcagaagtgatacctttaccatggataaagctaaccattgctatcccagcaataatctgatcccgttatgtgtaatttttcaaacaatggtttaaattcaaacggtgacattctattttagggcaaactgagtagatttgcttccttcttgttgatgtaatttcagacgtgattgcctcaggagcccctggaattgctaaggaagctctttccatttcccatgttaccttagatcttttgagtgtccgctggactgaaaagaagcttgagcttccttttctcagtttatactagataatgcatactgcgatgaacccaagatggacctaagattacagaactagtagtagtttattttttggtgcacaaagcggaacaagtttttccatgttttcagttgctaatagactgcatttttacgcaagactagtaggaataaggtggcgcgctgtatgaaggcacatttgtggtgtaccttggctggaggccttcctacttcctgcagactctccccaaactttacagctatgtaatagctagattaaaataggccactatttcatctccatgtgacatgaatatgtgcttacatgttccatccctcctctatcaccccaaatcacacaagggtataccagaagttgtagttccaactgcatgaaaccaatatggttgctattactaaggggactgggattctaactacctcttttcattcatgctgtatcaggtaagggaaggctaggaacccagtgtaactataatagaagtttcatatgatctctatgctatttaatcccattaaatgactgttgaatgaatgaaccctttgaaacgggagctcagcatggtagaacgtttaggcaacatgtgatgccagcttcttttccatgcattttcctagattcccaacttacaaatataggaacattaagccatctgatttgtatttaccattgtttcctcatttgtcactactgttttctctttgtctaaaaaattctatgacaatctttgtacccccctctgatgttccaatcaaagagctcttctcactttgtactagtttctttctcctatctctcctttgttatagcatgctcagatgcccatcaaaccgaaatgaaaacaaaataaagagacatatataacttaccttcttttactcattgtttctttcattgaaaactatttctagaaagctaactaactgtcatgcagtttgctaagatcagtgctaggtagtatattaggcacatgcatatttggaatcgttttttctcttggatgttgctttttatcagtatgaaatattcttcttcagtttagtaatactctttgtcttgacgtttttttaaactgatatttaaatagctattctattcttttgatacttactgtgtgcatgttttttttttttccaactccatctgtgtactttcaacttccctgtgtctctgtgtttgaattgcatctctcatagacagcatgcatttgggtctgtgttttttattcattgtgataatctttactttcttggagcatttagattgtcaacatttattgtaattgttgttatagttggatttaggtctgtcattttttgtccctctaattcttctttcctaccttattatttacatggtattttttgctgttttgttttaacttttatttctattttttttttttagcttcacctctttgtgtcacatatttttcagttatgctaggaatcacaatgtatattcctaaccttttatactctacttagatagaattttcatataaaatatagaaaccttgactccatatagggctttttgctgcctctcctgctccatttaacttattttgttgtgacgtgagtagcatctgtatgtgattgtatttttaaataattaaacatatttaaatatagtttttttatatttagctacatttcccccatttctgaagctcttcctttgttaagaccaagtttccctccagtatcattttatatcgtttttctttagcctaaggaagtatctgtagtgtattttgaaaacacatcttttcagtgatgaattttcttaattttctttcatcttagaattttttttatctcaccttccttttttttgaaggacattttaaaattggatatagaagtctgggttgacagtttttttctttcagcataataaagatatcccaattacctccgatctaccttgtctctgatgataagtctgccatcattgttactttgtattaatacataaattgtcatttttttccccttctactgcctttaggtttttctttttattgggttttaatcagttttattgtaatataagtaggcatggttttcttgtattctgattgagtttgatggacttcctgattataattgtgatttttcaccacatttgacagtttccatctctcgtccttcaacctgaaactattcttttgtactctgttctcccagtttctctcctctctggcttactaatgacatacatgttacatcttgagtactttttcacaagtccctgagattctgttcattagattttccatcatttttttctttctgttcatcatattgtgtactttcactgattctttcttttgctgtctttattcttttattcaacctctcaaatgaaaacattttatttctaatgctataattttcctagaattttcattaatagttctttttttgagactccttatctttgttaacattgataatttttgttacaaattgaatagttatgttcagttttttaaaaggcacctacacacatttaaaagataaaccagaagctagaaaaagaaatttgcaatacctgggccctcagaaaatcgggacccagaatattgaaaaattcttacacttatcaagggacaagtccaaagaaaaatgaataaaagagataacaaggcaactcaaaaaaagtaaactggtatgtccaataaatacaagaaaaagtgtgtattctcaatagaaagcaagaaaatggaaataagacatcagtaagatacttcttcatctccagtgaaaaagtttgacagtatcaaatgttgaagagcatttgaaaaattagtaactattatatactatattaatataatttggtataatctcaatgggaagcaatttgcaatatctaatataattagtccagtaattacacccttagtcatacattctagagaaactctttcaaaaccagttttccaaccatcagacacattaatgggtccaacacttgggtctagtcagatttgcctgatatctaagtataactatcagacaaatcaacctaggccaaaagattatgaaaattaataattagagtttcaagctactaaagtttaatttctttcacataaaaatgttagctgacacttttcccatacatttttatgccctatatggatataaatatagtgaaaataaaaatagggttatattaccattatacaataatatagaaagataatttctatgtagagcaagatatttgtttttgttattgtctctatgactaaaaaaaaaaaatcagaaaattaagtaaaaagaagtatatttcccttcttattccaggaaagtaactgagccttttgtaccctgaggctgcgctctcctgcctcagatgatctttggggaccttggtttttcttgatcacaaagagaatttgctttgtcttcgtcaagtgagagagactgattataatagttaaagtagctgacgtgctcacatctgtatttcttcatacagctttgagttatggtctagtgtcctgtcatttcatcctgcaggactcccttgagcatttcttgtggtacagatcgagtgataataaacttttccagctttagtatatctggaatgtcataatttttccctcatagtcaaaggatagttttactggatatagaattattggttgaaactttattttgtttcagtactttgaatatatcagaccactgccttctggtctcccaaatttgtgacaagaaatctgcagagattcttattgagcatttcttgtgtgtgaccagttacttctttcttgctagtgttaatattctctctttgactttgtctttcaaaagtttgtttataatgtatctcgatgtagggctctttggattaacatcattttgagttcattaagcttcttggatgtttatgttcacatctttcatcaaattggacaagttttcagccattattttttaaaaatatcctctctgttcctttctctctttttcttctaggacttccataatgcatatttggtctgcttggtggtgtttcacggcttcctgaggctgtcttcacttttcttccatttttctttttctgttctttagagttgatactttctgatccatcttcaagttcatggattcattcttttgcttcctcaaatccgtctttaaattctctttgtgcattattttatgttagttattgtatttttcagttcttttcagttattgtatttttcaccttctttttgatttattttcaggttttctatctctttattaatattgccattttgtctgtacattgttttcttggcttgctttctttagttctttgagcatatttaaaacaaaatttaaaaagcctttgtctttactctgccatcaggtctttttcagggataatttgtattgatttatctttatcctttgaatggtgcatacttttgtttctttgtatgtcttgtgattttctttcttttttattttgaaaagtggacatttgaatttaacaatgtaattctggaaatcacattctccctcttcccaagggtttgctgggtttttattaattgtttttatttgttgttttttgatttttgtagtttatctttgtgccaaggataagcctgaagtgtaaacttaaggtcttctcagggcatttttcagcctgcacctttccctgggcacaagtggtcactttctaattttcccgatatatatacagttgcttttaaatgtcctaatctttaatgtctggctcccaaaaggtgggaaagattaaaaggaatcatggaaaaaagagggctctggccgtttaatcccccagctgtcacttcaaccagataaggaggggcaactacagtggggggacagaggctcaacaatggcctcctgcttctttgtttgcacctgagtgatcagaagcagtaatcagggatcagagcacagatcctttatatttggaaggtgaggacattgggaggttggctcactttggctcctgcaggctgtgtgcaggttgctccagaagcgcgtgcacagctgcctgccacagggccgggagtgggggataggtagctgctgatctgctaagagctgacattgactaaaattaactgtaatttaagctccaagcctttctttggaagttgtaagaccaacagtagaccccaaagtttccaacagattctgctagtacaattgtctagatggggaaatagatccctggcactttctactctgctatcttcccagaatcctttctggggtttctaattttttcattcattcttaatatatttttgttcatatcatggagcatagttataatagctgcttttctaaagacgttgtctgataatatgaacatctgggtcatcttgaggttggcatctgttgattgtattttcctttgagatttagtcagattttcctctattttggcacattggataattttgtatcttggacaacatagtctgtgtaactgtatttaatcatttcttttcatttaacatttaaatgagcttattactctctgtaatacaagatatattcaatctaggttttgctgagaaagaaactcattcatttttgaaagcatgcgtttcccagtattgtgtttttcaaactgggttcagtgaaacactattgttttgtagtctatagtaaaaaacatgttgcataatcaaacaggttaaaaataagttaatcaaataagttaaagttaaaaataaaactgtgcagagccataatgtatgcctaataaagtggtagtttccaagtggaggacattttaaactatattcttccttcaattaaattattaatctagtgaaaacaatagtattacgtggtttggaaaatgctactatagtgcagtctaaataaatccagacttgcagaaacgtagctattgtataatgccaaggaatgtgtctattgtgtatttttaatttaacatagttactattttacttattaccaaataattacatgtatatcccttttatgtatctcttccacttatacttcttgtcataagaattattacatgaaaaggtcatcttagtagtgtagcatcattattgtaataggatataaaccattataaggtcagcataattgttttaaagtcattagtcatacagttttctagactagatatgcttgtaagttttttttttttttttgaggtgaaatcttgctctgtcacccaggctggagtgcggtgacgtgatctcggctcactgcaacctccacctcctgggttcaagtgattctcctgcctcaacctcctgagtagctgggattacaggcatgtaccaccatgcccagctaatttttgtatttttagtagagatggtgtttcactatgttggccaggctggtctcggactcctgacctcatggtccacccacctcggcttcccaaagtgctgggattacaggcgtgagccaccgcacccggctgcttatagtttttattttctttttttaaaatccattttaattttagattcaagggatacatgtgcaggtttgttacaagggcatattgagtggggctgaggtttgggcttccgttaatcccataacccagaagctgaacatagtatccaacaggacatgtttcagcccttgttcctctccctccctccttttggagtccccagtttctagtgttcccatctttatgtgaacccaaaatttaactcctacttgtaagtgagaacatgtgatatgtttctgcatatggaataacagtctctagctgcatccatgtttctgcaaagaacatgacttcattcttttcatggtgttgtagcattccgtggggtatatgtaccacattttctttatccagtccactgttgatggacatctaggtttattccacgtctttgctattgcaaatagtgctgtgatgaacatacgagtgcctgtgtctttttggtagaatgatttattttcctttgaatatatacccactaatgggattgctggattgaatggtatttctatttttagttcattgggaaatctccaaactgctgtccacagtggctggactagtttgcattcccaccaacagtgtataagcatttccttgtcttcacaacctctgtaacacctgttattttttgacattttagtaatagccattctcactggtgtgagatggcatctcattgtggttttgatttgtatctctctggtgtttagtcatgctgagtactttttcttaagtttagctgcttgttatcatcttttgagaaatgtcttttattgtcctttgccactttttaatgaggttgtttccttttttcttgttgattcatttaaatcccttatagattctggatattagtcctttgtcagatgcatagtttgcaaatattttctcccattctgttggttatctgtttattcttgtcaagagtttcttctgttgtgcagaagctctctttggtttaattgtgccatttctctatttttggttttgttgcatttgtttttagggtttcatcataaatgtttgcctagaccaatgtctaaaagagtatttcctagcttttctcccagagtttttatagtttgaggtcttacttttaagtttttaatgcatcttgagttaatttttatgtgtggtaagaggtagtggtccggtttcattcttctgcatatggttagccagttttcacaacaccattgattgaacagggtgtcctttctccattgtttatttctgctaactttgtcaaagatgagttggttgtaggtatgcaactttatttcaaggatctctgttctgatccattgatctgtatgtctatttttgtaccatgctgttttggtaactgtagccttgaagtatagttagaagcccagtaatatgatgcctctggctttgttctttttacttaggattgccttggctattggggctcttttttgtttcatttgaattttagaatagtttttcctaattctgtgaaaaatgatgtttgtaatttgataggaatagcattgaatcagtagattgcttcaggcagtatggatattttaatgatattcttccaacccatgagcatggaatgcttttccatttgtttgtgtcgtctatgatttctttcagcagtgttttgtagttctccttatagagatcattcaccttcttggtattcctaggtatttaattaattaattaattattgtggctattaggtacattatagtttttaaaatattctgtgttaaagagaaaaaaagtcaatgtgagggaaaggatgttgcccaggatggtgggtacaattttaaatatggttgttatttgaaagatgacatttgaactaggaattgcgggagatgaggaagagaagccatgtgtaaatctaagagaccatatcatgcctgaagtgtgagcaagtctgatatattcagggaacagctggaagcccacacagctgaaatggcacaagggaggggaacattgtagaagttacttagagataaattggtggggactagcccctctagggacttgtagaactttgtaagacttgaactttttctctgagtaaaatgggaagttaacacacagttttggctagaggattcatgtttcaaagcttgtccaactcgctttattttgttgttgtcattctgttttgttttgtttcaggcttttagcagcctgaagccatggtgtttagtttcgtgtctagtgataagcagaaaagagggacgaggacggggctttactggcccaaccagaaacagaaactaagaacccacgactgtattctgtcccttggacacccctgtaagaagttctgacaactaggaatagactgtgagaagcaaggtggagtgtcagagacctttcagagttaagagatgatagtggcttggacctcagttaagagatgatagtggcttggacctcagtgtacacagtggagctgctgagaagtggtcagattctggaactattttgaagaatatgccagtagaatttgccagcgggctgggtatggactgtgagagaaaacaagaaattgagagtgatcccacaatttttggcctgggcaataggaagggattgccattagctgataagtggaagcagcttggtagaaaatggggcaatgagaattctgtggttatgttaggtttgagtggtctgttccttcataattgatatgcagacacaggggtctagtagtctcaaggcagaaggtggagagtgagggtatgagtgttagaaagtctaacagtatgggttcaattgggacataaaccacagactaatataagcagaagagtttattataatgaatgattaacctatgatggaagagtacaagaatatagtgataactttaacagcaccctagggatgagtaagcatacccaagttcggataagcttggaagggggtcccctctctaagactggggtgcagatttcattggagaaggtgtgtttgcagcccactggtttgcctgggccatagctggtcacgtctctgggcaagcaagaaaacacacttctgggggcaggtgaactctagctagtgggcaggcatgcaggagttaggatgctacagtgaacgtgaagcccagagtgtacagtatctatgtagggagggcccaggaaacaaacctcagggcacaggcaagccttggctggtgcaggtgcacagtgcgtggtgtctgcattggaggcaaactggtcactgagtctaggtcaggactgcaaggttgccaaagggctctgcactccgggtatgctgctggggtgtggcagagcacccccagatgtcattatacacccacaccgctgaccaattgtgctgcagaaaaggcaaactgcataccagagtcaggaagaggacccccttcctctagcagtgcccctccatcacctcctactggcaaagcataacctcatattcactgtaaagggggaccgggagctgctgagtccagtccgttatctcggattcagttctagaaggcaaactgagggatgagaggcagtaactggcacagatggtagggagggttgaggttttaggaggtatggtctcatctggcatgacagtcacgtgtgtttgtgacttaatatggtaggtgtcatgctcatatgaaagtgtctctagaaacaaaaagtgacatgcacgggcttagacttggcttgagtcctctttggaaatctttccaactttatcatgttggtgtaatggtaattattaacttcaggtctgacacagtgtttgaaagatagctgaatagtcttaattttgccttaatagtttaataataacatttgagggtacatgtgaattttatctagaaaaaataaacatatttaaactcaatttttaaattaaatatatgggtaataatcttatttggcattccacttcttatccttgaagaaaaaaatatcgctaacctaaatcctttcccataaatacaacacactttctttttgccagatgcttaaatgtcattggtctgttttaaagtaattctatttgatctctgtgaaacagatggaagtatttgttatacaaaccttatttagaatgtaatctttttttctctcctgattgcatatgtttggcagtgagctttctcttctagatgtgaatgaatcttggttagcctccaaatctaaacacaccctaatttcaaaaaccacaatcctgaggactcaattcctgtttactgaggaattaaaacctagagaaaccacatagttactaaatgcagtacaacctagtgagtttttaaaaacaaaaatcattacagtttatttagggttattgactgtcattaagttcagagagtaagatcttttcctaagcagtatataatatttacagttggttaactatatctattgcttctgaatcttgaaatatactccttatatggcaaagtgagcttgtgaggtggataggaagcagtagactgtggtgtggggaatgagggagcagatgaggaaaattactcatttttttaagtgtgttgaatgactaacttcaattcaaaaatgtgtctgttaaaatattcatgtataactatcagttgcattgtgtttttctgaaaatcatttttttctttctttcatatttaagaaacaaataaacaaaaaatcttaagtattcaaccagaccaaaacctggacatgaatactattagcagttcaactgaagaaaaatacatgaaaaaagataggaagggaaaaaattcaacaccccctttgtcattaaacagttctaatccaattagaaggaagaaaaaaaagcaggtaaagtagaaagaattagagatctaaatttacacttctcaggattggatttcacaggcatactttatagttttagcaatctttgcttaaagattactagggtagtagttgacataccataaacttgaatctggaagaagggtatcatgcatgccacatgatacagcatcctcaaaagtgtataccatattacattagtgaaaatgaattggattaactgttctgtgttcccataacttcctagaggaatttaattgattcatgttttaagcaacatttaatcatcagtttcttcaaacaaaaatgagaggagtattgactttccccacatagctgttttaaaaccatactctcaaatttcattgttttattgagttggttcatggaatccctgcaagtatgctcattttcaaccataaacgtgcttaaggtgaatttcagaattaaaaaaaaagaaaagctttggatcttgaatcacttacagattgactctataaacttaataaaaaatcagaaattatatttctttcttgttaatctaaggtgtgacactgcctgtcacatcataaaattattgactgattttttgatagttatgcttcttttggataaaccaactatattgcataaattcctggaaaatgaaaattaaaagattaacacagctgcattggaaatatgtggaaataaatgatccgggattgttcttatatgtcgttcctgttattttactttattttattaagagacaaggtctcgctctcttggccaggctggagtgcagtggtgtgatcatagctcactacagccttgaactgctgaactcaagtgatcctcttgcctcaccctctcaaatagctggaactacaggcatgcatcaccatgctggctttctcttattttaatatgatatttttcttttattagttgacatccaaaaggctgacattgtagagcagagagcagtttcatgttcacattgtggaatttatggccatttactttttgtaggcgggtaggttctctgagcacttctccttcacatttgtttttagttttgcatggtccgtccactttaccatcttgtagccctctgctctccagccacccacccccttttagtttctcaaaaccatgcagatcctaccactagaacagcactgacaaaaggtgttccttcaggcaggagatttccacttaccatctccttctagtaaaagtctcctgaatcttcagttgtcattcttttcttccttaggaattctttgtatcaaatccttccatttcaggctcatacagcaacatgcaccttgtctttagaatgcttgtaaacctagacattgtacgcatattcacttttctttactcccattctctctgatctgatgaaagttctgttgtttttccttagtattgtatctccttggcacatagtaagcactacaaaaaacatttaccagatgaatgcaaataattgtttatggcagttagaacgctacccttgacaagttctcttaaatagaatttcttttaaaataccagggctttgatcatgattttaatgatggcattgtttcttggaagaaagagtaattctgtgatcagatgttccacaaagtacatttgattatcagtgtttacttttacatttgaaataaagactattgctttcttggtcattgtaacagaaagcagagtaacaatgtattatagaatctgttagcccaaggaaaatgcacttctcgaactgatcagatcgctgccctacacactttacctccacacttatcaatttgcacatcaagattagtgttttccttatatgtcaatgcaaaagacttaagagattatttttagaactccccagcacttcttcctgttcctgaccttttccttctccttacccacccatgcatcttgttctgaagtacaaggctcaatacagaaattaatcccttggaatttgctatgtcacttcctattgcaacatttgctttttagatgaccagttaccacttaccctttcttttgggaggtctttactaagtgagctgtctacaaaacgatgagtcgtcctggatgggtgttgttagagcaggccattagttctccattctacccatccgatgcttcctttttctcccatccaagtgggaaccactgatgcttcctttttctaacaaatatgcataacgcccttttcactattctgaaaagaaatgtatggataataaatctatatacataacttaagtcacctaatgtctgacacttaatataaagtagtgcagtaatgtataatattatatgatgtatttaagtatgtgaatgcttatgtgtgattgaaccagaagatataaggaagtacatatttgttaaggtatttataatcaccttgaatacaatatctaacaatggttttatcaccattaatgagattttccaaaatagtcaacagtaaatttgaagtagagtttttcttagatactgcagcatggttttattcctggacagctctgtgtaccttaaaatatgatataagatatttaattaatattaaaataatgtatataaaatagtgtatactgcccgggcacggtggctcatacctgtaatcccagcactttgggaggctgaggcaggtggatcacttgaggtcaggagttcgaaaccagcctggccaacctggtgaaaccccgtctctactagaaatacaaatacaaaaattagctgggcgtggcgatgtgtgcctgtagtcccagctactcaggagactgaggcaggagaattgcttgaacccaagaggtggaggttgcagtgagccaagattgagccactgcacacttcagcctgggcaacagagcaagactctgtctcagaaaaaaaatagtgtatgttaacatcctgaaaaatatttaacgtgtacattttttttcaaattatgcttttgtacataaaaagctactaaggaagatgctggtatctattactgtcctctgcaaggaaaaagtaattttgttggggagctacaatatgcatacaattttaattatcatataagaattccactgctagcattctatgaatagtagtttaacagaaaacacatcataaggcactttaagtaccaaccttaaaaaagggggagtagatcataaagactgtggtgttttgggaggggaaatatggcatccatctgtagcaaggagtgcaaatattgcttgaattgaaaggagagaaagggagaaagggagggttgctgtattacgtctatgccagattcacatttccctcagaaatgctaggttcaactactgacctattttaaatcacaggcctgtcttcaatatgtactgacctgaaatgaaaaaatagtccaaatttctactttttaaaaagagagaggaaagaggagaagcaaaaggatcactgttattgttgtcctcctcaagttctttataaaaatagctggagaataaatccttaataaatgtaaaaattttggaatactttcatgttcgtttcatcctagctttgatccttgccgctatttttcctcatgttttcagttctaaatgtaaacctgtttgataatggaaacccttgtttgcttctccttttattatgactttttttggtttctcaggaggtctttgctcaggagaacatgaattgcacatccttgtgtgtggtgttgaattgtttgtaagttccctgtctgcctctaccagccattgtttttacataaattctgttcttctgtgatctgcctcgtttgtctctttgagaacattaacaagccttttagcttagtggaatacaaaagtgtttcctgcgcattcactctttaataactattcagctcttctgggaggacagtttcttctgacacacatagagtaaacattttccagtaattttccttgatggcaggcaagcattagggaaatggtgcagttggctagcaaccccagtaaattttgccaacctgatgccataaatgttcactaggctgtcttcaaattcctttattctgctgatgttacaggaatggacttaagactaagcatattgtagtttatatataagactttcaggtttggcctgtgtggtcatataaggtagaggtttttgaatggtagcaaacataattgttctcatgcctgctaaaaaccttggttatgactaaagctggatcctaacttaaaattatgcatgaacagtaaaaacatttgatggttttgatgtattatgtttgatagggtcatcaaccttcccttcttacttcccatgattgcaacaactgaaatttaactgggcaataaatttattaaaggaataaatagtcaactctcttaataaggatgtagaactcctatcatgtttttcttcactgaacttatttaggaacttgagtgattccagatggtattacatgagtatttggctctgaatttcttgttttctcacatttgccaacatacaagtgttcaagactttcaggtccctgaggagctgttcagccattggatatacaactttaggttgctatggtatatttgatcattcttttgaaagttctcctcagtccttggcattttaaaatatgaaaattatttaatgtaacccggagaagaaagatctgtggagctgtagtgtgtgagtcagtggaccataaaatgtagatctcttgaaaagctagttttcaagatgagacgagatcaacaagtagtatatagaccacccataaactcttgaatgtggaatgtgtaaaaatgtatttaagtggccctttaataatgcaaaagtattttcccttaaatgtgctgggaagtccccagtccaacacacaaaaggccatttcatgcataacatatatatagggtttttacatactcaaataaaatgagagaaccaaaccacgagatcttttttcccctccaataaatatttagagtgaacctactgtgtgccaggcactgttctaggtgttggtattacaaaaatgaatcttatattcacctctttgaagagctttggatgtaatgtggatgacaaacatgaaaccaaataattaaaacctattgttcttaagtgctagatagagttctttggaaagagtggggcagttgctgaaaaggcaacaaggacttgatcttcggggaggtagaaggatgttcatagagaggcagtatctgggattgttcttaaatgttggtcaataatatgctgcagagaagagataaagacccagcagatggagcagtatgatcaaaggcatggatgtaaaaatctataatgtgttttaggtgaggaattttgtgttgctgacaagtagtgcctagggaaatgggagtcagaggaggggcagggattgagactggcagggatggatgtggacaggttgctgtggggtagcaatgagagtgagagggagaagtctgtttctaagatgtttttcaggggaagactcaacaggaaatgttggtaacaggatgtgggagacaggagaccatacacaggcttctttcttgggtatttggatcaccatagctgggattggatgttcaaaatgatgaacagatttggggacaaaatagaacggatgatcaatggctcattttgttttttttctttcaagtttttattttagactcattatagattcagaggactttgtaaaaatagtacactgtgtcccatatacccagttttccccaatgatagcatcttataaaactatagtataacatcaaaacctggaaaattacattggtatgatccgtggaccttttttagatttcaccaattttgcatgcactcctactgggtgtgggcatcatgtacacacatatgcatgtacagttctatgcactcgtgtcacatgttgattcctataattatcagcacaatcaagatgtaaaacaggacgagtgggtggctcatgcctgtaatcccagtactttgggaggctgaggcgggctgatcacgaggtctatcacaaggtcaagagattgagaccatcctggccaacatggtgaaaccctgtctctactaaaagtaaaaaattagcttggtgtggtggcacgcacctgtagtcctagctgctcaggaggctaaggcaggagaattgcttgaacccaggaggcagaggttgcagtgagccgatatcatgccactgcactccagcctggggagactccatctaaaaagaaaaagaaaagaaagatgtaaaatgattccatcacccaaaaccatgacccaaaagatcccttgtgctacccccttgtaattacaccatctctttctccatccctaacccctggtagttaataatctgtttccatcgctataattttgtcattttgagaatgtgacataaatggaatcatacggtatataaccttttaagattagcttttttccactcagtataatttccatgagatccactcaagtgttgagtgcctcagtagttcatttcattttattgttgagtagtatttcatggtatgaacatactaacatttgtttaatctttcacctactgaaaggcatttggggtgttttgagtttttgggtattacacacaaaactgttatgaacatgtatgtacataattttttgcatgtcgacttaagttttctttttttgtgtgataaatgcccaggactgcaattgttgtgttacaagttgtgtatatttacgttttaagaaactgacaaactgttttccagaatggtagtaccattttccattctcagcagcaatatatgagaggtccaattttgctgcatccctggtatggttactaatttttattctagctgttacaatagatttgtagtgatagtccatcatgattttaatttgcatttccttaatggtcaatgaggctgaacatcatttcatgtgctaacttgtcatccatgtattctctctggcgatatgtctgtttatgtctttttcccgctttctagttagattgagttgctcatttgcgccacctcagatcacctctttcttccttgttgctgctgggtggaagtttggctgcccactgggcccccagataccaggttgatgggaagttggagtaggccttgtattaagtagcactgcctcatacccacttgctccacttcatagcgctggagtgacagttcagctcttcacttaacacctcaatgggacagtttttcatttggtgtttggcctagggcaggtattaagagaaaggttttctgctctggcagaccacttttttcctagtcctttgtctggaggaaggaaactggcttttctttttctttttcttttttttttccatgtatctgctggtggttccaggttctaagcttctttagcacccactctgggataaatgggaagaaaatagaaaactcaggaagttcatcaccatgctgttaatgatactgtgaggtcgttggccagtctgccttctttccacccttcattgcttccctatgtttgtttgtaccattatgtccaggtattattctaaaaataattgttaatcagtaaaaagttttgaataggatatacatgctctgatttgcaccttttaaaaacaatcacattaagtacttcatagaacatgtgttagagagagtcagggatgatttaggggagaccaatcaggatattagaatagttgagttgagagatggcggtttggacaaggatggtggcagtggaggtggatctgagactcagtgattcactggatgtggaagtgaaatatgagtagatgtttaggataacccccagctttctgggtgggtgacgagttttccagtttactggaatgaggatcactgaagatttagaggaagaaaacctgacttgattttgaaatatgtttcatctaagatgcttctgaagtatgcaggtgaaaaagttgagaaagtaatggtctgtctggacgtggaatgaaaatacaggcttagaagggaaaccagagctaaatgtatttattatatagtgtggtgaggtatagtggatgaagacctggcagtggggatggagtgggttcagcagagggagggaagagattcacaagaagaagatgtaatgtaatcaaagggagcaatattaggatgtaaggttgcctagtcaacataaaagtatcaggagtgatggcgtttgtggagagaggcaaagggcttagcatttagctacattatgaaattggagagaaaatgaataaaggaactcgtagaagtttggccagcccaatatttctacattatatcccttagaacactggttccttgggggatatctttctgtctgtctgtcttagacacacacaaatgcacacgttttgtgagaaattaagtataaggaatgctcttaaacaaaactagtatttccaacagcataatttcaaagagtgtttagcatcgtgagtcttcacaacagatgtggtatacaacaattcctaagacatctcagggatttaagttagtgtcctctgggagttagttcttgtagactgaaacgatgtcgtcttggaagggactttcccttatggaagtgaaaaagactgggcgagggaaggtttgttagttgaatgttcagaacctggaaattctttgatgtgattaactaatgtataagtgtggagccactttgttcgtgtatttggccataaggaagaatgagcctatttcagcattcgagaaatagttgcttagcaccattcataaactcagcagaaatgggtatcaattcaatatcatagccgcctgtttcccctcccccgcaaatgaaacatcttcctgcctatagcgttaatgatttttttccccaggagttgaaatagtacaattcggttgcagaaggtatatgagtctagggtggtggaggttgaagtatttggtgaaatctgcgatgacatctaggaatctgaatctgcgctggctggtggtgactggtgaaagcatccaggttagcagcaactggggtgtgtttcatttataggcaaacacagtaaatcttgagaaaggaatattctgctacagatctgcaaatgatcagggtgagattgggaaggggtgaaaggaaggagcaaaaagacagtacttgtagactgaaacgatgtcatcttggaagggactttccctaatggaagtgaaaaagactgggggagagggaaggtttgttagttgaaagtttggaacctggaaattcttttatgtgattaattaatgtgtaagtgtgtagccactttgctcatgtatttggccataaggaagaatgagcctgtttcaacaatggctcgtgtttgttccatgtaaatggcaaagaaccaggtacttagcacagaagacaaatgaggaaaattgtagcttcctcacatatctgaaagagattttgaaatgaccctagagagtggacctgggaccgatagctaaaagtagaggaaatgttttgtttagtataaagaagcccatagttttggtgtttctgaacactgttctttaaagatgtgatgaccaatttaggacgacagtgaattttgtcactcaaagtgcttaagtatgggggtgggtggttgagaatttaatgatcagctagataggaaggttttaccgaacattagttctcagtgtctgctccgtggatgcccagggattcctgccattctttttgaggggatctgcaaggtcaaaactattttcctgataccgctaagatggtatttgcctccttgtgtaaacagctgtgctgattaagcaaaagcagcggtaggtaaaaacgctggtgcctcagcaagaaccaaggcagtgacaccaaactaagttgttgctgtaattcttcaccactatgctctcacagggggaaaaagtcatttcctttgatagagcaataaaaatgatctattctattaaaactcagctatttaatatgtgtctgaatcttctgtgtgatgaggtgggaagtaaacataaagtctactgcatggcaaagtatgtcgttattttgatgaaaaatacttgtgtgattatttaaattgtgaattgaacttgttttttttttttcattgaacaccatttctacctgaaaaccagactgcaaaccgtggttattcataccttgatatttgctagacattttcttgaacaaagtaagccagttacgtcaaggaaaaccactcagagtatttgttaccaaggataaagtctaagctctaaagcaaaaattagaatgttggaagtcttttatccaccagcataagcttgaaagtttcacctatacttaaatacttttttctgataggattacagatggtatttttaaagaattgactttatttttagtaatccaaaatgacatatcccagaatctgggagctctgtgtaaatcagtgaatcaataatttttaaatgaccattctcattgcaagatagaaaataaatttttatgtaacatagtacaaaaagtaaattgatatggttttcactaacttggtgtagtactaaagattatctacacttatctgaaaaagctattaaaatattcctcactttcccaactacctatctgtatgaagctagattcttttcctatacttcatccaaagcagcaaatcacattagattgaatgcaaaagcagatacagattccagctataagccagacaataaacagaacttcaaaaatgttaaacattgcgactcctctaatttaaagaaaaaaatcaaattatttttacattaatggacttttatgataattttgattgaatgaatacatatttgaaacacttcttggtttaatacctaatatggtaaatatcagtagctatacagatactcctcaacttatgatggggttatgtcccagtaaacccattataagttgaaaatatctttaataaacagtgcatttaatacacctagcttatctatcaaatatcacagctttccctagccacccttagcctacagttggacaaaatcatgtcacaaaaagccgattttatataaagctaatataaaaattttgagtcaaaattcaaaatatgatttttactgaaagtctattgcttttcccaccccaacttactatggtttaaaaaaaaatcataaatcaaaccatagtaagttgaggaccctctgtaatcctcaaaaactaaagctccttggcatcttctataatttttaggagagtaaagaatcttcggtctaaaatgcttgagaattgctatagttgatggcctgtgcttctttccatccctgagatttttatgattctatgatattatactaattcagtgcttgctgaaagtgtccacgcaaaggaatttctctcttccttgccaggcgtgccaacactcaggctttgctacgacagagagaggatttagagacgagaaacagacaggtgttgtccctgtcctcacagaacttccagtctctgtgtggaagatataaacccaaaattcacaaaaataaataaaattacagtggcggtatgctagagaggaaaagtagttggaagagggtctttcctcaagaaacagttcccccatgaagtgactgagcatgtatacgtaatgagcctttcagaccgaggaatccacacgtggaagggcactgtgggggatggaaagcactgttgttccgtgtcaccatgagagagggcttgtggctggcacacacgttcctggaaaagagtgaagctgaactgtggtccccttggtgttccatggcaagcatgttgccatttatcctttgcaagatatttaggaggttaatttttttgtctatgtcataacttctctaaacctgttctttatcttcattgttcctcaagttcatttcataataacttgatttcccttcctgatcttccgccatccccaagaacccccctcctctttattttccgtggctggttcatcattgttgaattttagttccttttcttctctccccttgtttgcattcctcacacattgactcttcagacctttttcttttcttttttctttttctttccttccttccttttcctttcctttctctttctctttctctctttctctctcttttcttttctttctttctctctctctctcacactctcactctctctcactctctcacccaggctggagtgcagtggcccaatctcggctcactgcaacctgcacctcccaggtccaagcatttcttgtgcctcagactcccgagtagctgggaatacaggcatctgccaccacgcccggctaattttttgtatttttagtagagacagggtttcgccatgttggccaggctgatatcgaactccagaactcaggcaatctgctcacctcgggctcccaaagtgctgagattacaggcgtgagccatgcccctggcccagacctttgacctttttcactctgtgtcatcctcttcaacctgaccttccttatttatgggcagtaacctcacttccaaatttagtaacaaagttgagatcatccacgtgaaagatctttctaatattcttttctgtatcaaaatcctctgtgtccttgttcttcccttccgttgttgttcccatttgtgaggataaaaatgtctactttcctacattttctgtctctgacctcttctctcacatctctgctggcttctcctcatcctccttcctgttcttcctcctcttgcctgtttcttgataggtgagcctcccccaggatctgtccttggctgacttctgtctttcctctgaagcttcctcctcagggttctcttcatgtctgacttaaggacagctgattcccaatggtatcttttgccctcgcagctctccgaatgttccaagttctctcaagcctcactgtcatgctaccattacttagtaccacaaaaggaacacctgtcacactgtttcatggcagtttattcttttgtctgcctcctgtttgggctgcctgaaggcaagagttgggatttgctagcccttgttttcccccttaccataatagtgagttgtggtccgcgagtgatacttatttgatgaattgaaagcaccaatttcaagcctgctttacattcctaacactttagagatctccccatctggacattccaactgggtaatttttcatttgctattgatttatacactattctggtgaagttaccttttccagagcactgtcggattgaataggagagggcattatttgaaaattggcacttgatgaaaacgatttttaaaaaatacaaactgtgctacaagaaatggtttaaggccaggcgcagaggctcatgcctgtaatcccagcacttcgggagctccaggaaggcggatcacttgaggctatcgagaccagcctggctaacatggcgaagccctgtctctactaaaactacaaaaattacctgggcatgcatggtggctggcacacacctgtaatcccagctacctaagtggctgaggcatgagaattgcttaaacctgggaggcagaggttgtagtgagccgagatcatatcactgcactacagcccgggcaacagagtgacagagtgagaccctgtcgaaagaaggaaagagagagagagagagagggagggagggagggagggaagaaagaaagagaaaaagaaaacaaaaacaggtttagctcttggactagtccacaaatgactattttaaaccttgcatcaaaaaaaaaaattgaaaacaaaactgtagctgtactacgttatagttgtgggggtatttacttaaataatgaatattcactgcatgtctgtaatttgttggggtgtttacaaactatgaggggaattctaagatgcgtcaaaagctttagggattggcttatgtgtttctttaagatgattaatgtttcaaaatgcatggattcaggtgtaccactaccatctttgtgcatgtcaatcatcgctgtggttgtagaatgaaaagggatatgtttttgaagtaatcggttgaagggggaaaatgaaggggattcatactgtatatctaggctgaggcaggcaaacagcttgagcccaggagtttgagaccagcctgggcaacatggcaaaaccccgtctctacaaaaaaaacaaaacttagctggagggtagtcccaacttcttgagaggctgaggtgggaggacctattgagcccaagaggtcaaggctgcagtaagctgagatcgcgccactgcacttcagcctgggtgacacggtgagaccctgtctccaaaaaaaaaaaaaaaaagagaaggataaggaaggcttcatttggccatattcctccaaaagtaacataggttaaaaaaagagtgtatacttattagagtgtatactttctcatataaatgcacatgtgtatatatgcatacaaacacacacatacagatttgatcttcattatttgcagattctatatttgctaacttgcctagtgtcagttaactccaaaactgacacacatggggcttttatagttatttgcagacatgtactgagtggtgaaaaatttgagtctcccaacacacatacatgttcttactgaaatcgaacaaggcaatgttctgcctttttgtttcagctctcgtgcagtaaggcatcccttttgcagtccatttagtaccatgttttttgcactgttgtgcttttgttagtgattttggagtctaagagggccccaagcacagtgttaaagtgctggctagtgtttctgagcacaagacggctgtgatgtacctgatggggaaaaatctgtgtgctggacaagctttgttgaggcgtgagctatggtgctgctggccttgagtattaatgaatcaacagaatatattaaatgtctttaaacatcaaacaatgttacatattggtgagtcaatgaaaatgttgtgaccccagaggctcacaggagccctatattttttctagaagtaatagttcagtatatgctgattcagtgcccagtccataaatagcaagaattgaccgtgtgtgtgtacacatgtatgtatatatttgtgcacatgtgtatatgagagtgagagggccagagattacctgaggtggagttaactaagccccagagagaaaaagagaaactatgtacccatagttgtggataacaagaaaggagtttatggggcatagataaagtgacagttcccttgacttgccaaaaagtttactgtcagcccagggcagctttatttctttctgaagtgagcagaaatggtctaatagagtacaaggtataaaggactgtgcaattagtaattcatatgtgctgaatagtttggggagtgcctctagagtactagtagaaagtcactttgttctgaagacattgatgaatttcatccttctcttgtatctttaattattactctgatttactttagccatctttttgcgcttacagctgccttttgatttgtttttgtgttgtttaagacccagggaaatttactgtgtccatggagtaggattctggtcattcaaccccacgttgagtctattcaacagctagattgagtgtatattaaggtgtctaaacaaaatcaaactaagaaacctaattatgtcaccaaactgtagcaagctggattttttttttttatatgaggttttgggtatagaaaggggttaggctcggagatagttgactaaccaactgctctggtagaaactctttcctttaagacaataaagaggttatagggattggagacctttatgtgttatactttggtggggacttgtgtgtcttaaaacaacccttgccttgtctgtattcttagctttaatgttcttttagaatattacctgagtctctcatttgccagaaagatgggtattgtcatttttaaaagtctgtcttgtaatatggctttacatggtcttatgatattatttatgaggctgactctcataggtaactgacgaatgaagtagtatttgctcaagtagtaaaattcttgagcaaagccacaattaactggagataaaagtaagattactgtgcaattgaaattctagaagaagagttttaattttttgagtagcttgggatatttgcagtgaaatgtacctccgttacttctttgtattcttttgacgcatcacattccaaatgcaaaatttatgaaactgtcagaggatcagcttctctggcagatctctcatcaattcttctctcgttaaaagaaacttcttttgagacacgtctttgttagttaatcctatcaactgaaaacctgcatctcaaaacaatcagtaaatacaaagcagaacctagctttgtttaggtagtatctatcaattctcttgaaatttatcaggctgtagcttctatagcagttctcggctgagctgctcgtctatttaaacaaaaataatattgaaagaatattaacttctgaagacgactcagaaatcataatatagtggtctattcttaatgcatgaagaaaatgtgatattttggctcttttaatacacctttgtgagttgtaaaataataaagacaggactacaaataaaaataatccaaatactctataaaataaagacagatttgtgcttcttgaagtctataaaatctcctaccctatattaatattaaaatgtacaggatcttctctcataaggaaacacatttagaatgacaaatttttagtttgcgattataaagggtaacagaagacacttaagaagaaaataagcatggagtcatttttgtatcaaaaagaaaatccaggccaggcgcagtggctcatgcctgtaatcccagcagtttgggaggccgagatgggtggatcacctgaggtcaggagttcaagattagcctggccaacatggtgaaaccctgtctctactaaaaatacaaaaaatgagccaggcgtggtggcaggtgcctgtaatcccagctacttaggaggctgaggcaggagaatggcttgaacccgggaggcgcaggttgtagtgagcagatgtggcgccattgtactcccacctgggtgacggagcaagaccccatctcaaaaaaaaaaaaaaaaaaaaaaaaagaaaaagaaaatccagcaaaaggatcaaaaccttttatttttgttccatgacttaaatcatttaattatattttcccccaagtacaaaaatcaataaacaatgatttccatagttaaataaatactttttttctttaaaaatgttatgaaacctttagtatcaaattacttccaaattcaacttgacttctgaataagaaatactactttataaaatgaaatgcctgtgttctagaaagtattatagacaggcaaaataacaaaggaaaactattgttttaaagcatgcttgaatgaataaacatttctcagatcactaatggtcaataacattatttggaagatttggggataatctggtttgcattaaacatatttacactttattttatttatttatttatttatttatttatttatttatttatttatttgagacaagagtcttgctctgtcacccaggctggagttcagtggtgcaatctaggctcactgcaacctcctcctcccaggttcaggtgattctcctgcctcagcctctcaagtagctgggattacaggcacctgccaccatgccccgctaatttttgtatttttagtagagatggggtttcaccatgttggccaagccagtcctcaaactcctgacctcaggtgatccgcccgccttggcctcccaaagtgctgggattacaggcatgagccaccacacccggccatatttacactttaaaatgcctcatgaattaagtcaagctttactatatacagatgctaagaaacatgaaaatatatagcgtttcgctgtattcagatcagcaaatttatcaagataattagattattatctaagggattcagttggccagactttgaaaaactatttggtttttgtttttctagagagcacagtcagacgaactcgaaaaaatagaaaagcatggccgatcttccaaagacaaggaaaatgccaagtctctggacaaacctgaacagtaagcatgtcttataaccacgtagagggcgtccaggctatgggtgggcccgttttgtttggaaaatgcaaatgcggtgtcttcagtgcatacttgttgtgaatgagatgaggataaacatctgtttatgtgaattatatttttcttcttaacttggctttatttccttaggttcctttatgaactgtcactaatccccaacttttcagagcgagtcttttgcatcctgttccagtccacattttcagaaagcatttgctcaattcgtcgcaaactggaattactacagaaattgtgtgaggtgagttctggtccaaagagagctgaacttgagtctcatttaattgtgctcagccatgttcttatttcagaaaagcattcttttatttactctaagtactcaccaaatttgaaggatcgcagtcccacagaagggaacattttatgattgaccttcaagatcaaagtaaatgttccggcgggcgcccagggctacaggaccacattgctagaatgtggccaatacatgttggcctccagagatttctctgccctctccttttgccaaaacaaaatcttcagttttcacggtcctctcagacatcagacttccaaaggaatgtaatttgaaggcttttttttttactttctttcgttatctggaaggacctctccacaaactgttaataattattccagccaaataatttaggaacagccatatgactcaacagaagacaaatattcttccgaaaacaaaaaataaatgcttggcagaaacgaccaatgttaacatttaaaacaatttgtcaaatatcagtaataccatttgttctagttgcggtaaatcattttgaaaagtgaaaagatgtttttaaaggctcacattttcagaagaagtgacatgcaaagtcaagttaaacacagtgttttgaaagaaatgagtgtgagctctttgggggtaaacctaaatttagaaattaatctctgaatctgctttttggtttcctctgctgatgccaaacattggtattgttccagacgtaggcaccattaagacaatggcagtgatattagtgatgttattttgtaatagttctcatttggccttatctaatagttatcatatagcctttgttcccatatagccttaatagttctcacacaggcttgttttccttgcagttacatcacagaaatggcctaacatagcatcccccagcttacaaaggcatacctgaatgtttgtgggtggtgcaacttttactaactttcaggatactgctcttaaaatatacctaataattaggaatgataaagttcggttgtgacccaaaactcctaatataatataaatagctggcatcaactcgatgattcaaacaaaacctggtataagataaaagttgttttttgttgttattctgttttacagacattaaaaaatggcccaggggttatgcaggttctaggtttggttcttgcctttggcaactacatgaatggaggaaataagactcgaggacaggcagatggctttggattagacattcttccaaaactgaaagatgtcaagagcagtgtaagtattttgcatgagtggacgtaagcacattgaggagtcaaggttttgtttagtaatgggtttgaatgtaaagcagttgtaaaaaatatttatgttcctaggtcaaatgcttctttatgttctgagctagaaaaaagtaatgtccatcagatatttgtgattttgtgattaatgtttcctaaagtgaataattttcattcttatgtctaatgtataattacaactttttaatataaaaacaatacaaaataactttttatattgttttaatataaaacaataatttcttttaccatatctttcccatgtctgctaatatttatccttttggaatctgaaggctaattattttctatgaattagacagtatatctttttttctttgtcatgttaagcaatgaaggccaataggtccatattttgaaaataacacaatgatgagtaaaatggcttgtaaacaaaatataaaaggtgattctactctgctgcatatgattttctccttgatactggtgtgtagggggatgtctaagctctcttgcagacctaatcattttttggtactacttctgcagttgtgtttgtttgaaattaatgtctaagcaattgtgagagtgccagtagaaatatgaggttaggaatgatggttagagtcacagactcaagtctgagacggtaaacttaaaaaataaaagagttacatttctctgataaaaaaatcatcacacaaaaaagtaggataaaggaaattctggacatgtttttgaaatattaagtttaataattggcttgtagaaataaaaatatgtaggactgtccttcctagataatgaaataatttccttcatgggggagagagagacttttaaaaatcttttctgccagccaacaatttgtttattgttttatatacagatgcttctcaacataaaatggagttatggcctgataaacccatcctaagttgaaaataccataagtgaaaagtcattcaatacatctaacctagtaaacatcaaagcttagcctagcctgcctcaaacatgctcagaacacttacctcagcctacagttgggcaaatcatctaacacaaagcctattttataataaagtgctgaatatctcatgtaatttattgaatactgtgctgcaagtgaaaaacagaatggttgtatgggtactcgcagtacagtttctactgaatgcgtatcacttttgtaccattgtaaagtcaaaaaattgtaagatgaagcatcgggagtcggagactgtgtctctgtgtacgtgtgtgtgtgttgtcaaattaatacagatattcatgcaatattctttcattgagcatctatggaatgtggacactgctcttccaaaatcgaataattcatagtccttccttggtacaccagcagcatatgatttttttatttttataattgttcaaatgctcatgtgtatgatacacattttcatagaagtatctactatagagagctgataaattacatttgttaaaaaaaaaatgctgaagccgagtgcaatagcatgagcccgtaatcccagctacttgggaggacttttcaaggccaacctgggcaatacagtgagagcccttctcaaaaaaaaaaagaaagaaaagcccttttcttaacctatggtaattcttcaatactcagcaactgcttgttggagtgaaacaacttttgcaaataacattgaaatctatagcatcaatatcatatttaaattatagaaatgaactggaaatagattctagtgatcatatataaataagagattatttgtgggacttttttggtatcagtttatatatcttattcaatcctctgttaggttaaatttcattaatttaaataatcaagaggtaatctaaaataaaaatttaaatatgtaatcaagaaatacgtttttaaaatagtttcacttgtactcagaagagctatacaaagtcttcctgaattggttctttctctgtaaaacaaatgtaactatatttattccttagtactatttatagacctccatggacagagctgttactttgatcacttagaattttctctcagcatgcctagttttgttaattgattcaggtgctgccaaccgtttcattgaattacaagttgggagagagaaaggaagtcaagttgcttaaatcattttacaagcaaatcctgtctaatgagggatatctctaatagctacattactgactcatgtcaaacttgattataaagaggttttgctctttttacaaatatagaaaaaatcgtggttatattaaacattccagagaatgtagtttgtatcatagggtttgtttttaaagtaaaatatatacttgagctctcaaattcagattatctactactactttggaacaatacaaaaaaagagtaaaataaaaattaatgcgcctaaataaaccagaaaggaggtgaaaaggtatttttgaagtgtgttagatatgaaacaattttacctttttttaaatagaaatatccacattgtcttatttataaccacatgagtgttaactcctcaaatctcaattgctgatataacaaattataatattggaattgttaaaagctcccctttacttagtattggaatggttaaaagctccgctttacttaaaatgatacttagcttttttatttccctaatctatatgctaatgagcctcaatcaaacttactgttggagtggtatctgttagtccagctatatatcaatgctaaattatttcttttaatatagtagttttaaaacataaaaaattatcaaacaaaaacaataaaaacacaaaataataaaatatacaagacatgagctaaatttctaattgaggggggtaacagttggaaagtatttacagttcagactttgcccctaaatagctgtgctaagattggaacactggggagaaaaatcttttaagccaccaaactccttagacacaatggccaagacaatccaaaatgtaaaatttcacatttcattccaaatgttctcatgtatatacatgaattcactagaatcttttttggtaacactttatatttaattagttaaaaaatatattgtcactgactttggtctttctgcctaggacaatagcagaagccttttgtcatatattgtttcgtattatctccgaaattttgatgaggtaagacaatttttacatatagtcatattccattattctttattcgttggatgatttggcagtactttttgttgttgtttttgttttggacatacctgctattattcttttttatattgataaccaatttctttaaatatgatggggttttttgttcattaggatgctggaaaagaacagtgcctctttccactgccagaaccccaggacctttttcaggcctcacagatgaagtttgaagattttcaaaaagatctcagaaaactgaagaaagacttgaaaggtaacttaaaatcctgaactcatgttttctgtttatgcttttttaatgagagaaggcagacttttcaatgtttttagagaaaagtaatcttttttatctttatagaactaaatttgtgtgtgtgtggcgaaagaacaattttgcctatattcttattctttggttgtttaaaaagttatgtgtatcaaaaatttggttattaagtaatatcttggttatttcaattaacaatctgtcttgtcaggaataagtttacattttgttttcattttataaccaagaacattttggtattggtcatgtcatggttggatacaaattatgtcattgttgtaatagaagataaatagtccttccccattttcccttggtgtacttgcccaggattttctggcttatgaactttcctgggaacaaaatatcttctacttaaaaaccacatacatgtatattgttttattaccagtcaagctttacataaaattattttgaagaataataggccgaaatttttcaaatttctaaattaaaagtagcatttacaaaaaagcaaatagtttgcagatttttttattttgtaagtaaaattcctgctatccccttttcttgatattcttattgagttgcgaacacctcagctgtctatttcagcttctttcttgctgtattacatacagatgagaagtaaatacatttacccgagcttttgatttgatattgtgttactatatgagaagaaaaggcctggttacccctgtccagaaaccaaaaagatagaactttttaagagactcccaattttgagatgtgtttatccaaagatactgatctgtaatcaaattcatagagttgttatattctagttacaggtgttttaaaatggatttcagtgagcatagggacattatgtagtgtggttatagttcttatgtattcaacaacatttattacggacctggttcatggcagacagttgctaggtgctgtggatccacaaaggttacagtaaccgctgttgaagagggctgaaattctgtcattacatgtaccctgttggagccttacaagttggtgctcattgactgaggccaagaaagactgccttgacttgctctgtttttcatacaataataataaataaaactatgttacatttgtataatattgtggtactgtgtattttaagctaagaatgaattcttaaagcaacaaaaaaacccactcatgctatagtattatacttcaacctgatgacaggcatcttggtttgcttatgaaatttacacacactatgatgtgtaaatgctagaggcatttctaggggatctggaaaatacttcccacttcaatcaatagttcagtcttgtaaagtaggatttcatagtttacaggtgatttgataaaggagcggaatgggtgaccctattatcaggatatcaggatttatgtttgctttctggagttgcatcacttcggaatgtgatcccattttcttatgataaatacacaacttcttactataggcattaaacatacatgtaattatgaaaatggcaagttcttgcaagacttggagctaaaaagaaagacctagctaacaccagatagtgggtttgaaaaggacaagcagccggccaggcatggtggctcacacctgtaatcccagcactttgggaggccgagacaggcagatcacctgaggtcaggagttcgagaccagcctgaccaatatgaagaaaccccatctctactaaaaatacaaaattagccaggcatggtggcacatatctgtaatcccagctacttgggagcctgaggcaggagaatcacttgaacctgggaggcagaggttgcagtgagccaagattgtgctattgcactccagcctgagcaacaagagcgaaactccatctcaaaaataaataaataaataagtaaaaataaagaaagaaaaagacaagcagccagcgcctctgaatactatttccgcatctgcatttgccacctacaagtgctaggtgcctacatttggtagcacagaagattagatattgaaggagcatcttagcaatttttgagtacctcagagtttaaagagaggattttaaccctgaaggtttacactttatgtcagggaaagatgaacttatttttcagatatcatcagacctgtgcccttggccaacaatgatcacatttgtctggcacagtattttccccaatctgaacacagcctgttacaatttgatagaattgttgaaatggggagtttcatgaccaaatgaatgttaagttaaagttaaaaggacttcatggtattctccaaaaaaaaaaaaaaaaaaaaaaaaaaaaaggtggttgcaattgttttcccatttattacagagaacttttttcacagaatctctggtgtgttctgtagtcactgaaacatattttgagaaatgcaaggctggtgtactgtgttagtaacagaagaatggcatttacctttgaggaacttacagggaaggttggagaaatgatgctatagttgatgaaataatgtaattatatattactcttcttaaaaaatggaatcagcttgaagagctatttacaaagctgtcaaactctgaggattaaaaactgacaaatcataatttacctcattttttttttgcttttctcaatttggggttttccatgaaaaacaagatgttttatgacttgaggaaggaaatcttatggactgaaatataaattcagttactgggaaaaaaagatatacccaaatgtagaatttcgtatcaacaacgcatgaaatctgcctcatgtcctttttaggaacgagagggatataaatagatatgtacgtctatctgactaaatgggagtcaaacggaaaattattggattatgttattttaggaacaattactttgaaataatgtctactttgatcaaagtagcctattaaaaattattccttttctttttttttttttttttttttttttaagacagtcttgctctgtcacccaggctggagtgcagtggcacaatctcggctcactgcagcctctgcctccccatctcctgggttcaagcaattctcttgcctcagcctcctgagtagctgggattacaggcacatgccaccacttccagctaattttttgtatttctagtagagacagggttttgccatgttggccaggctggtctcgaactcctgacaaaaatgattccttctaagtgatcaagtgagggaattcatttaagaagattcatatggccacattttgtttcccagaggcaagttgttataacaaggtttagaaaataggataacgtatagaaagcatttatctcaatacctttcatacaataaatatccaataaatcttggccattcataataaggtaaacatagaataagcagtgggattagtttgataaagacagttaagcaataatcatagtagctcatctgctggctctagcacttctgtttctgcttagagacttgatttttatttctaaggaaaggctgaaaaataatgtgttatggctcagacattttaatgagacgactgaatctcattttagcattttataataacatccactgtgtttagtttctctgctcactcccaagatttccatatttcctcagggtgcttccctggctttctgagctcagcgacttgtagttcgttaagcaacctgatctgcttttgatctcttctggctgtcagcagcttttcttgatgtagtcatgccaaatgatgactctgttccagtgcctttcttgaataggaattgtagcatttgccacatgacttaaatcaactcaacatgcacggagcattgagtaattaagttaccggaactggatgagaatgttctcatgcaaattcttctctgtatcctctttctttctgttcttcctccctgtactcacacactctctctcttttcaatatctgagttgaaaacaagtttaaaattcatcaactataccttcaagttgaagcaatgtccattttccagagatttataggaaaaaccagccctcaaactagtttagggtttattttggcttacaactactagtttgtaactattacatttaaattgttcatttctgatatttccttttttccccttatgtttgaggacaggaaacaaataagcttttttaaaaataacattttacagtggtccttcccacctatccaaggttttactttccttggtttcagttacccacagtcaaccttgatccaaaaatattaagtggaaaatttcaaaaataaacaattcatatgttttatgctgggcactgttctgagtggtatgatgaaacctcctgccgtctaccttcatcccttccggcacgtggatcctcacttagttcagcgtattcatgctgtatatactgcccacctgttcatcacttaggacagtggtccccagctttttggcaatagggaccagtttcatggaagacagtttttccgtggacaagccagtgggggatggtttcaggatgattcgagggcattacatttattgtgcgctttacttctattataattacattgtaatatataatgaagtaattaaacaactcatcataatgaagaatcagtggaagccctaaacttgtttttctgcaactagagagtcccatctgggggtgatgggagacagtgacagatcatcagacattagattctcctaaggagcattcaaccgagatcctgcacatgcgcagttcacggtagggtcctggctcctatgagagtctaatgctgcagctgatctgacaggaggcggagctcaggcggtaatgcttgcgatgaggagcggctataaatacagatgaagctttgcttgcttgctggccactcacctcctgctgggtgtcccggctcctaacaggccgcagaccagcacccatctgtggcccaggggttgaggacccctgacttaggagccatcttggttatcagatcaacagatcacaaaaagggtgagtatagtatgataagatgttttgagacagagagaccatattcacagaacttttacagtatattgttataattgttctattttattatttttttttaatctcttactgtgcctagtttataaattaagctatagcataggtatgtgtatataggaaaaagcatagtatatataggtttcagtaccatctgctgctccaagcatccactggggatctaggaaggtattctccatggataagggaacactactgttttatgatttttaaaaaaaatttaaaaaaaatttattgaggtaaaatatacatacaaaatttaccatctttaccatttttaagttatattttaaaattaatatctgtttagcataggaactttagacaaccttgaaaaatgtagagaagaaaacatttgtatttccacagttccatgataaataatgtttatcttttgttctatctggtaggtaggtgtttattgcatgtgcatacatacatgaattatgcaactgggattatgatgcacataatttttgcaatttttgtccactcagtttctggtctatactaggataatttaattttatttatttacatatatattctattaatattttctttctggttgtctatttgataaatttttaaatatctcttcctaacacctccaataacatttaagaagatgtacatagtattcctgttaatttactgggtaatcctaaatgctaacatattttgtatactatacaattttataacatgctataaatttatgtagtatatttattcttctaaataagatgaatgttttagaacattctaactaacaattgaactccttctactttcttttcagtttttttccagactttgggtactgtcatttttcttaaaaacattactgctgtttaataattattaggtaataacatttatgaatatatttaaataattactgtgctatcattgttgcatcttatattcctcccccctccacatttgatgttctttcagtgtgagtgaatgggtgttaaactcttagtccgggccgggtgcagtggctcacacctgtaatcccagcactttgggaggccgaggcaggtggattgcttgaggtcaggagttcaagaccagcctgaccaacatggtgaaaccccatctctactaaaaatataaaaatgaaccgggcatggtggtgggcgcctgtaatcccagctactcgggaggctgaggcaggagaattgcttgaacctggaaggcagagtttgcagtgagtgaagattgtaccactgcactccagcctggatgacagagcgagactccatctcaaactgaaaaaaattgttcccccttgttttggaatgatagtttcaccagaaatagagttctagactgactgacttttcatcagtattttgaagatatttttgttttcttctggtacctcttattttcaataattttcattcttttgtagataagctgtcttatctctgatgacttgtataattttctcattgtccttattcatttttggctttccttggataagtatggtatgaatatattcttttaaaattttttgtattgctctgtacttagaacttcctattaaaatactgatggcttccttaatgtgtagaaaaatttctcagccactgtctgcccaagtattacttcacttttctcttttttcctgaaactccttttagatgtacattggtctaatccctgttagccccttaatctaatccccatgtctctaacatctctttcatgtgtttaaaatcaccttccaccttttgctattatcttcatgcattcctcaacattatcttctaattcattcattctctcttgactctgttaattctaatgtttatgttatcaatgcagtaaatcataataattcttgtttccaagatatctaatgtttttatcatattcattttccctctaatttcttattcttgttttggatatttatcttccttttatgtcattgatatttgtaaaaatatattaaagtccttttcagctgttgtttcatctgaaatgaattcatcttccactcagtgattttataagttgtccttcagagtcactagtttcctatgtggtgttagaatgatgatttttataaaggtgtcaagttcacagttacagattgaactgctcgttctattctttacccccttctcactactgcacttgactagtctttaaaaaaaaaaaagtcaggaaattatggcctatgggctaaacctgtcctcttttgtaaataaaattcagttggaacacagccacgcccaatcatatacacattagctatgactgtgtttgtgttacaactgcagagttgaagaattgtgatagagaccttctatcagtgaatgtgtccctccctgactcccttcttctgacccccaaaatcattcactgtcttttgattttttttcaattgctttaacttggcctgcctttggtacccaagtcacaatcaaagcttctagcagcagcatagagctcctgccctgtgggcatattaggtttattgtagatccagtctccacactagtgaatgacttggctggggtctgggctgggaagctgtggctacttactcttgctgccccaggcatagagttgcatgtgggctacagccctaggaagcagtgaattgtaggtgttttcatcctctttgcatgagtttgggagaccagttaccactctgggtttccagtagagagactggttcctttccctcctgtctgttctctcccatccccagtcctcacataagccaagatctttatctattcctccacgatcatagttcgatgacttctacttccgccctgtttattaactttggcttctctactatttctggtccaaggagatatttacattttttaaaagcatactatgtctgcttagtttcctctttatatgttaccgttcactgctctgtgttttcaacagagggaaagctcaggctataaattgattataagttctgtttgactggaattctgtattcacttttatatcttacgtttttcctcactgaaaattatagcagaaacatttttccatactatttcatatacttcaaaaactgcttaggatggtttcataattcgtctcatgaatgtgctgtagtttagtgagtaatttgattcttgtaggaaattagactcctcccagttttcactgctcttaagtatatcatgttgagcattcttatttatagcccttttaaaagttgtatctctggttgtttccataatatagattcagatttataattactggatcaaaggtaatgaacattttttcaagttctcgatattaccaaatgttataaaaatactttctagaggaaaactgatgaattttatgggtgagttgtttcttaaagtaaaacagaataataaaatttatgaaatttagattagtaaagaatcttagagacattgtggtctcataccttaatcatttaacaaatgtttattaaattaacagaaaataaaaagtagattctttcctcatagctcatagactaaaaagaggactgttgatgatatgaataaccactatacagtatacaattttttttcattatatggaaacacagaagtagtagttattaggtatacttggaaaattatatttaaattggacttcgaaagatctgtaaaattctcccaagaggaaaaaaaaaatagtatttcaagcatgggaaagagcatgagcaaagttacctatcctgtgaccatttggactttgattatttactggttcctgatcccagaagtctctcaattcatatcaggtatatatctaacagatataaaatattcaaacctgagacggggctcattgcagtggaattcacaaccagggtgaagactgtgcgcatatgtggtttgaaaaagcctcccagccagtaattctgatatgtctttcaaagtagcttgctatgactactctgtgtcactgttttacatgcattagctcatttaatccctatgccatagataggatcattaatcctctctttagtgattgcataactgcaagttagagatagtaaatgctctacaaaaagtcacatagtgcaagctgaggctggatctgggcctgaggaagctgatccagagctcacccttttaaccccaacacaaacaccgcctccttttggggttcactgcgcagaacccttcagggaaggttgataagccgaacatacagatataattgcactgaagtatagtaacaaccgtgataaaataggagcagggagcagagtggaaagtgagcctgattctatctaattggttagaacaggcttgagttaggtagtaccatgagaactgagccatgaatataaatactttaccaggtgaacaaatttatgcaagaaaatttgaatagatgagccaccaagttcaatgagatgaaattaatgcatcttggaatttgcagcaatctgacatgattcaaatactggctgagtacagagaagtagaaagcaataaagacatagacgtacgtagtgagcagatcaatctcacatagacaggcaggaagattctgagtggacaaggggtgtgtgtttgattgggtcggcggggagtatttggaaggaaatggaggaggagagagagaggcatttcaggtagaggaaatgtcccaatgccccagcattcttagaacacagtgaccatgagatgatagaaaatgttttctgattatagaaactcaacaaacttctatactttataaggaattttcattttactctaaatgcaatatccagccattgaaatagtctattcagggaaatggagtgacatgatttatgtcttgaaagtactgctctggcaagaggagaatttgtgagaccagtttggaaacaattgtgattttgacaaaggagggagacagaggagctgggaagagctaaacaaatctttctatttttagggacagtcagtgttctagatagtaactgtttagaattttctgtaatctatgtataaatgcttcttaataaaattgtgtcattccatgatttccttcaagtcaatagtatgtaggttactgtgatgttttgctgtttgagatgtctgcatttctttccagaagctttgaaagaaacattttcatttgtgatttttttcccaaagttgataagcctcaagtatttctctttctcctcactccttcctccacactaacatgtatgtgtactctatttaaatcaacatttttcagtattctttgacttttttaaactattagtctcaaaatatacattactttcagtggtgattttgccattggacaggagaattaatgagaagaaaatttttcaaatcattcaagtcattagtcgttgaattctaagatttgatgccatttatatatattagaaaaaataacaaaattgtattttctcctttttactgattgcctgctgttctgacccagctgtctggtgaaaactgcagctaattaaaggtgattacttccctgtcattttgagttaaagtacattttattttataaattatctgtgattgtgttacagtgtgtactttgcatactttgcacaaatgtttgcttttaaagcaatagtcaacttagtttaatgcaaagccatgagattctgtttctttcagggacctggtataaacaaattatcacataaaaacatggtctacacatatgtgatacaagtttaccatgagattatagtcatttacaatagttttcatgagaatgtttcattctcataactgagtcatttctttttccatttttaattggcaaactgctcattcttctagatgattcagctaaaatgaatatacttagctaaaataattcttcttcagcaaggctgtctgatgaacttgccctacaggagaaccttgacaaagattcactgatagccacataaacagtgatttgcagcagtgcctgacaacatgttaaatatgagagtgtaaatgtcaataacttttcaaatcatgctgagaatttcatcttggtcagtatgtctggtgattggtattctttttaaaactgttaaaagtcagagaatgtgaaatattggcaaagatgtagattggtgagaacgcttttacactgatgatagaaatgaaaattgattcgatcccatgagaaaccatctggcaatatctttttttgttgtttttgtttttgagacagagtcttgctctgtcgcccaggctggagtgcagtggcctgatctcgactcactgcaacctctgcctcctgggttgaagcaattctcttgtcttatcctcccaagtagctgggattacaggtgctgattacagcatgcaccaccatgaccggctaatttttgtatttttagtagagacagggtttcgctgtgttggccaggctggactcgaactcctggcctcaagtgatccacctgcctcggcctcccaaagtgctgggattacaggcgtgagccaccacacctggctatggcactgtcttattaagtcaaaaatgtctatactctgacccagcacttggcccctagatatatactccagtgcacaggtgaccaggtgaaataaaaatggcattcatattgatagcaacagcaccaaaaccctcagatatttttcaacaaaataatagctgagtgaattatggtatcttctttcaaaggacatcggttgaactgtcaaactgattgaactgtatttacctgcattaaaaatgggtaaatcttattaacacaagcttgaggaaaagcaagttgtaggaaaaatatgaacagtatgatttcagtttttaaagttcaaatatatagacaagtacagtagtctccccttatctgtggggagtaagacccccaatgaatgcctcaagccacggatagtaccaaactctatatgtactatgtttttcttatgcatacatacctatgataaaacttaatttataaattaggttcagtaagaaattaataataataataaaaataattataacaatatactgtaataacagttatacaaatgttgtatacaaatattatttgtatacaaaagttatacaaatgtggtatctctctctctctccctcttaaaatgcggtaatattttccgactgtgcttaaccattggtaactgaaaccacaggaagcgaacccatggataagggagggcaacttcacttgtttagggatagccgggggatgagaaacacaaagttaaaggttgtagttacctctgggcctgagagagggacagagagaaacacactgaatttttccaaagcattggctatgttctgcttcttaaactggaaatgtagtaggtgaatattcatttagtctttacatgtaacgtacatgttatgtatgctccgtagtacttctttaataatcgtatacaagaggaaagaaaaataggcaaccagtcaggaatatgtttgaatttgagttgatatttagtcccacaaatttaaaatatgtgactgctcagcctttcctatactttatgaagaaattatataacagcatattcaaaaataagcatcattaaagaacataagaaatttaaagaacaaactatgtttaagactttatatatttgcgcatgatggtgctaataatataaaacttatttgggaaaaacaatctgagaaactggcatattttatggtcaacaattcaaacagatattatgtataagcaattaataaattagaaataatttccagtgtcagaaagctgttgagtacttagagaaacataacccattaattttggttactgcttctactatttctgtgtgaagttggggaaacaaaaaccacatttactattttaatagcagtaatttaacatagagaatgaagttaaacacacgttgaaggatgttaaatgcagaaagaggatgctgaggaaaatgtggaaagcgtataccatccgtacggccaggggaataaagtgaaaatgttggggttagcaaagaatcatgtaactacctgaaaactacagctggacgttccactgacatctgaaacctagtgagttcaaaaccaaatgcattttcattcctctgaaacctactcttcttcctccatctccatctcaaagccacccagactctatatccattcggaatcctctgttctcctcccgacagcactcatcaacgcacattagaatctccatgtgagctttctatgagccttgtcgtggagattacttttcttttttactttatatcttggggttttcttcaacttttattttagaatcgggggtacatgtgcctttttgttacaaagatgctaaggtttggggtaggaatgatcccctcactcaggtagtaagcatagtacccaacaggtagtttttcagctctttccccctctgtctctccccactctaatagaccccagcgttgatcgcgctcatctttatgtctgtgtatacccaatgtttagctcccacttgtaagtgagaacatgtggtatttggttttctgtttctgcattagttcatttaggataatggcctctagctgcatccatgttgttgcaaaggacatgattttgttctgtttcatggctgcatagtattccatggtgtatatgtaccatattttctttattcattccactgttgatgggcaggcaccctggttgcttccatgtttttgctattctgactagcacaacaatgaacatacaaatgcatgtgttcttttggtagaacaatttattttcctttgggcatatatacgcagtaattggattgctggatcgaatgctagttcaactcttagttgtttaagaagtcttcaagctactctccacagtggctggactaatttacatcctcatcaacaatgtataagcatttcatttcctctacagccttgccagtatatgttgttttttttactttttttttttttttggagatagagtctcactctgtcacccaggctagagtgcaatggcatggtctcggctcactgcaacctctgcctcccgggttcaagtgattctcgtgactcagcctctcaaatagctgggattacaggcacccgccaccatgcccagctaatattttgtatttttagtagatacagggtttcgccatgttgaccaggttggtctcgaactcctgacctcaggttatccgcccaccttggcctcccaaagttctgggattacaggcatgagccaccgcgcccagcctattttttttttttttttgactttttaagaaaagccattctgactggcgtgagatggaaagagatcacttttcaaaatgacttaggttggagccctgtcaggtacattctgaaaagagtccccagttgattctgaagtttacatcttcatgaaggagcactgaccttccgttcaattaccaagctctgcaaattttaccccctaaatatttcttgtgtctgtatcttcccttgtctgaatttaactctcgcttttgtcagtacatatacagtacttgtgaaaggtagtgaggccagacatcaatgtttttactgtttctatgttttttgtttgttttgttttgcttgtttgtttgcctcactacatggagtgactgggttttctcaaattattttcccagtgtccggtcactagctctgtggatattgagaggcagagttggtgcacagggcaatgactgatttgatggtgcagacttaacaagtaaggtttgagtctaaaaccaaaagtcgagcctgtggtacctaccacacagcataggtcctgactgtgccatatatagcatgcccctggtgggctgattttatagtttttgttctgggagtcatttttggagaccaagtgtagagcccaatgtctgtgcacttacacctactttgcaagcatcttgctgcctacattgatctgctttaagtggctacaatggtgtctgtttcctaaaactgaacccagaataatgtacaaaccaggcttacgtgggaaacagttggattttagaagaaagctttctgatctgattacagttatttcttttcctttgtatctgttatgtgacttccttcctacttgctgaggctggtttgtagatgccaatgaaactttctggaagctcacagaaaagcagcaactctaagctgtgattaacattgattgaacttgtagacttgtataaattattccaattccctactcaaaaaaaaaatagccagactcttcatgatcatggttcattccagggagtggcatgtcatgtccttgctttaatctgacagtgataaactggtgtttgccccacaacgtgccactctgtggatggcatggatgtattggaacccattgtctggtgggaatgtctgacatttttctttctttcctctggctgggttattctttgtatttggaaacctaatgcatgctttctgatactagcccttcaacatgatataaaatctttttgactcagagaagtctttaaattaaacaaaagttgagatgattggaattactcggttatgccaacagtctcctaacaaatgttttttaatatttggatttgactgcaatgcaagttttccaggaactctatctttgttctgtttttaataatgtttctaaatgacccttcaagtttgtgagattgtagtgttcggtattttttttttttatttacatagtcacataccaattttgaggatgataagtaatagccaagatgatatgttgtgcaacttgatgtgctacagttaagagaagaatggtgtccagtcttctaaatatattccttatatgtaagcacattgagcatatttatatgtggcattgtgtatgtacaaaatatatgagagttatgaatgtagaaactctagaacgtgacattctatttttacatttatccaacaggctcttccttcttaatatagtgaataagtaaagcaacaattaccaagaaataactgtacaggttttatatcacactgagctttggaaatttggatgtgagttttggtggtttacctcagtgaccactggagacttaatatccctattaaggaaagccttggccttgattatgggcatcattgaaagcactttctttcatacagggtcttagtacttcctctgcatttcagacacttgacacacagaggtgaataggatagcccttggcttcaaggaatgcaaattataatcagaaacaaagatacacaaacaaatacattcaatgaaataatataattaacagcttttttatttttaaaagagttttctaacagccagcttagcactttaagttcaacttccagttgaggctgagataatttaagtagctagcccaagattacagagctaatagaagaactggacttgcatccagatccgtttaaccagtgctttgattctatcctatatcatttgtacgtgttctgtagaaaagggagatgcaaagttgaggggagattgaccctcttgtcttgaggtaacagttgaaccagactctgggaatggataagtagaagttcaaaactggtcattaagtggtgagagtatgtctggtgggtgaatagcatggggaagggttggagaaatgtgcataagcaagacattttgcagataaacaagaagctcactatgacaggaagatacaatgaaattatttattcattccacaaagaactgttgagtgcatattgcctgtgggagattattctaagtactggtaatacagcaaagtgagtaaatggagactgtctcataggagatgagagtagagaagaaatctatcctcaaaacaagcagacttgttctgtgactcattaaatacctgaactatcagtggtggacttttaaaaacatctttttactttgtaatggcacaagtatttgtgtgactatatccagcatattttaaagcaacctccagacatgtcattccgcagggggtgcactgtagagagatatttactcagtatacagttgggaattctaatattttgagctgcttagtaaggaaaaagctgcccagaagcaataagaatgcacatgacttgaaacacccagacactggacaggtgcgtttcatgaccttctagaaggaggactgtagatgaggtgaggctgccagtaaatgactttacagtttttctagagctgaaattctacatgtttcccagtgtgcacaggaaattctataaattagggggaaaaggtagaagaaatagaaaaaatagtttttgcatgcattgatgttacaaatacagttcatatgaatggcccaaggacatcgataaaattaagtgaaaattaatttaaaataaggaaaattattatagcatgcattttcttatctgttgaatgttctattgtttcaacattagagtaaaaatgaagacccagaggatggttgtcaccatgtagaagactttgtcacagccagtctgtgatctttctctacttccccagctaatgaagtcctcctttaagtcaccagacccagtagatgattctggaagtttctagtgttagcgtgttcatacaggatcctagaccccaagacactgtatgatgtcatgggtgtgtatgatgtcatggatgtgtatgatatcatggatgtgtatgatatcatggatgtgtatgatgtcatgaataaaaggacagttattacttctactttttaacttaaaaatggaaaatgaaataattgtgaccagtaatgaaaatattagccttccttgcctctggcttttaggttttgcaaatcagtcaaggtgagagattagatttttttttccctgctagcctacgttattaaacatgaggctaataggattttactttcctcattgggattgaaaagtcactacttgaagactgtaatgtagtagaagacaagctcgctgaggacaggggttttgtcagttctgttcgtggcagtcttcagcacctagagcagtcccttgaatcagtagatagttgatcgatatctgtgtcatgtgtacgttagaaactgctcagaggccggtagtaatctcagcactttgggaggccaaagcaggtggatcacctgaggtcaggagttcaagaacaccctggccaatgtgatgaaaccctctctctactaaaaatacaaaaattaacagggcgtggtggcaggcgcctgtaatcccagctactcgggaggccaaggcacaagaatcgcttgaaccgggagatggaggttgcagtgagtcaagatcgtgccactgcactccaggctgggcaacagagcaagactttgtctcaaaaaaaatttaaaaaaaacaaactgctcagagacttttgggaacactgtgtcacctgacgttgctagaaataacccactgaaatgataagggctgttaaatctcggcctcatttcttttaagtgatgtaacttgtcttccatatattcagtatccttacacagttttaggaaactctcaaatttatgacatgatttaagtatatccttaatatgcatctggaaacattgttaaagagcagaatttccagccacgtgaggctgtcgtaaatgatacagcccacaggaagttgactacggatgtcttgtcatctgacccatccctttctacatttctgacaagcagtcagctactttctgaataatcccagtgacaaagggctcaccccctcagaaggcaggttacgtcactgtaggagttctgtaaacactagccatccctgttaggtagaactaacatctctctctaacttctactcatgcaacttcctccttccttgagatcaacacagagaatgtcaacacccggtcattcatgagaccacacttcagctctttgaaaacagctactgtattttatcttacacttccttaggctgaactccacttggtcttataaaaacaatagcagcaatagctactgttttttgtgcatgtacttagccagcacaaagtcagtttcaggcattttacactcatagtggctgatcatcacactaacgttagagaattcattaaactcactaccatataatgcaactaagatccaaaaatgttaggtaattagccccaaatcgtaaggcacattcagtggatgggtgacctggaatttaaaccctgtctgctagattccaacatctagaatgttatttccacttaagtaactatttatacagcaactaacccatccaacagcaatttattgcctaagtcaggcacaaatggaaataagatggatttcctttcaagtagctcagtctagtggggcagaagacacatagttacaaataactttaatatagtgtggtagttgatattgaatcccacctcctcaacttgtgaactatagaaatgtgggcaatctctttgtagttcatttttcgctgatgtaaagtaagcatattaatcatctacttcaaagggttttatgaggattgaatgggacagtacaggtaacatgcttaatgtgctccctggcacataaaaagtactcagtacatgacagccttaactctgtatgcacaagatgccctggaatcaccaaagaaggacgcctcatcctgcttggagacaagtggcagggaatggagaaaagcaggccctgtggggaggtcagggaatgctgttcaggggcagttacatctggagattaacatttgcattgagtctgcagaagatatcaggactagagggagatggatggtttaaaagttggcaaggtctacattgtagcgagtgctacaaatcatggtgtaggctttgcaattcttcctgtattcagggtgtagctgagagggcagaggtcactgaacagtttcaggttaagcggttgggtctcttctggatggctttttaaggctgtgaggaggagcatggatctgtggaagactggagatgagaagccaagggtaagaggttttcacagtagcctcagtaggaaaaatgaaggcatttgtaccagcatagaacaggaatggagaggatagggccaactgaagaatggaggcaaaaacaacaggatgttggaataaagagagggggttgagaataagtctcctgttttggctcaagttatgtaggtcaggtggtggcaccaccaatgaagggagaataagggaggtggcaggtttagagaagtctgtgaggaattctgtactggtggaagtttcatatgttgagtctggagctatgaaatacatgggctatagatacaggttagaaattctccagcatccagcctgcaagaggctacctgggcacaggtgagggatgagaagcagacgggcagagagaaccctggatctgcctacgctgatcttagattttactaagcccaaagtcatccacatttgctgggaaggatgtgcactaataatacagccttcctagattcccatgcttagataaactaatgacctggaagggaaaaaagaggacactgtagctttataaaagaaagaaaatatattagaaatgcaatgacaaagtctcctgggagaaatggcaaccttaccttaagaactgtagtgagaggttttggggatttttttgttgttgtcgttgttgtttttttttgcatcagatgtgttctatccaaagttttgtgtttaaatatgtacttttcattgttgaattacttccttactggctccggtttcttgctattaccaaaatggcagacatttcttcagaatcttcttagaggtacttctcaatattaacccaaatggaatctgtagactacctaagacatttatgatgccacaggcatgaaaagaggataaactttggtgttagatcaggatttcagttatgaatttgctgcatattatctgtggactcttgggcaaattagtgccttatttgagccttaacttcctcagctataaaaggaggtaataagtctactttatgggcttcattctaaggattatgttaaataatggataaaatgcatctgacatgtaatagatgctctacaattattggatgctatactaacattaccacccatgttattatttattatttttcagaaatctggtctttaggaataaacttttattataagtcagttgatactgatgatgatggtgatgatgatagaaaatagttacatattgctttactctgtgccgggcattattctaacacttcacgtctcttcacagatctgatccttataactgcacagtgaggcaggctctgctatcatgcccattttacagatgaagagactgagatttagaggttatataacatgcccaactgattggtttgggaataatcaaactgagattataaattctgcataatttctttttacagccctctaaaaggaagccttgatcatcggcttctcatgtccgtatttggatgtttccaaaatgtgtgcagaacatatgctgattaggggagttaacagaattttctaacattagctaagatgttttcaaaattgccttaatgctccactaacagtgtgacactctaaataatgttctgtctaatttcagcctgtgaagttgaagcagggaaagtataccaggtctcctcaaaagagcatatgcagcctttcaaggaaaacatggaacaatttattattcaaggtaaattccaaagagatgtgttatgtttttctcccctttcagcaaaaaaaaaaaaaaaaaaaaaaaaaaaaaaaaaaagctacaaggcattgtttaaaaaatacatattgctttaaaagggcttattttgacattacagaaaaacagattaagttgaattatgagtcacagggttgtaagaggctagcaatttgataaacatgctatttgtggataatgctcattattaatgtttgtttgcttgcatgacagtatatacactagatattagttaaaatagctcatcttttaaaagacattaacaattctgtgctttttgtgatagaaaattagatagtattattttacattttaattgtactgatgagctcatttcaacctggtatttatttggcttgtcaaaacattgtacccagggaacaaactatattgatgttgttcggatcttcagagcattatttgcagtttttttaatgggatacgccaatacctctggatattcaacacctgtcttccagggagcttaaaaacattataaatattatctcatggactcttcctgcatttctaggagataggcagggatggaaaattttagaagataataaagaaaaaaatttaacaggaaaagaaagcatctattaagtcttgatgtttgaaatcactgaaacttataattatatcaaagcatttactactcaaaatatttcaactttggaatgttccatctcttctaaagatcagatttatatcatgccatgctctgggaaagttcttgctgtttcaggaattctcctagaggctgacatggcttgagactgaggccaagaacactctgaagattggctccatactttattttgttataggttgttcaagtgtcattaatgatgatttaacaatgaattagtcatactacaatttgattaaatgttaggcacagcttttttaagatgggaaaatactatttaatcatttaagataattgtgaagattgaaacagaactctggtgaaattcataaatcacgttgaatgtcattttcaaattctgaggtcttcataacttagagtggaaaatctactcattgattcttaaccgaaatcattagtcctgtagtaaatattagggaacattgtaaactcatcccactcttagtagtgaataaaagtgaatcatgctttttccatctagtggggttgtggaatcaagaatatgtagcacattttttaaaaatgtaacaggaaataatataggtaaaagcatagaatattcatttttgtcttataagaagaaaggaatccttaatcctaggaggatttattcaaaaaagcaatcaagcaatttgctggatttcacatccaaaatataaacaaatgtcactcttattcttggtcacattatatgtgatttattatataatattttgaatctgcaatttatagaccaggcattgagactagtgttttccatactgaatagtgaaattatgttttgcaacacatttggaatttaggaattgtgctttcaaaacacagatgatcagccgaatatgatatctctggtagtcatttataatgatttgaaaggcagttagaggtgtttaggatttgtctagtagttccctggtaggaaagacgggattgcccagtcatactaactgtgtaagtaagtatctcttcagattttaacaaccttacgggttttttttttttttttgagacggagtctcgcactgttaccgggctgatgtccagtggtgtgatctcagctggctgcaacctccacctcccaggttcaagtgattctcctgcctcagcctcccgagtagctgcaattacaggcacccgccaccacgcccggctaattttttgtatttttagtagagacgggttttcactctgttggccaggctggtcttgaactcctgagcttgtgatccagcctcttcggcctcccaaagtgctgggattacaggcgtgggccaccgagcccagccaggaagatcttttaacctccttgttatgaaactcagatattaactttttttttaatacttctccatgttaaatgaaaacaatgttgtaaggatactaacctatatactgtattcttagaagtaggaaatgcttcacctttttgccattaagttaaacatgatgagtcttcatggcacctcttccactactttcagttgcctttttatttcttctttgcatctgttcgagttttctgtttctttgttcatttaaaaattcttttaatgctttcagtatgcccagctattctgttgggtatgacttacagcagtgaataagaaaatgtatgcgtcttaatggaccttacattctgcattacctggaagacaggtgataaaaacaacataaacaacagaaaattttttggaaaaaaacctatgtacatcaaatgtatgtagatcaagtgtgtcaacaatatgaaagaatagaagtctcactttaaacatagtcactctcaaagctgttttcaagaacatgtagggaaacagtggagttccgaatatgtttcctgttctagtccattttcacactgctataaagaattgcctgagactgggtaatttataaagaaaagatctttaattgactcacacttcagcacgtctggggaggcctcaggaaacttacaatcatggcagaaggcgaaggggaagcaaggcatcttctttacaaggtggcaggcaggagaagtgctgagggaagggggaagagccccttatgaaaccattagatctcgtgagaactcactccctatcataagaacggcatggagaaatggcccccatgattcaattacctccacctcgtctctcccatgacacatggattatggggattacagttcaagatgagatttgggtggggacacaaagcctagccatattatttcccttaaaatacatttttaaggccaggcccagtggctcactcccataatcccggcactttgggaggctgaggtgcgcaggtcacatgaggccaggagttcgagaccagcctgaaaccccatctctactaaaaatacaaaagttagccgggtgtggtggtgcacacctgtaatcccagctactcaggagactgaggcatgagaatcacttgcacccgggaggcagaggttgcagtgagccgagattgtgccactgcactccagcctgggcaacagagcaagactctgtctcaaaaatttaaaataaaggtaaatttttaagaagatagccaattcctttgcccccatgtttcttctagtttatcaggacatgattctaaaattaaaattataaactaaagaaaatgccatcttagcacaaataaatgccaaatctttgcttataattaggctttcatcaataatagtattcttacatcagcctctgtgcttagattcatttatatgggtatgattatatttttgtatatacaagcaaggtcttttttaatgtgcctcatcctcaaaatataaaatctcttgaacaattcaagaagctatgcccaacactgcccaaatgtctttattgcattagctccctctgtataatagaaacatctcttatccctgtaattcagctattgtgtggtctgtggtccacactctaagagtcttacggaattcatctagccctgcaacccattcaattttccctccctatcttcctagttctactgaagccaagatttcatggtctatgtttaaacacctcctcactgggaacatctctcacctctgccctaaaataggcagatttagagaatttagccctactgtcataaggcattcattgtttgtaaaggtgctagatatgtaccctccttgagagaattgagaatatactcactcaaaaattgttctgacggccacctggctttatattcttcataacacttatcactgtctgcaactgcatcatttatttgtccatcaatagtataagcttcattaagaaggcagttttgctttgcttcttgccgtacccctgtacctagaacaatgcacagtatagcatacactgtcttgctcaccaggcataggtctagcaacccttgttaagctcatctctttgctttctccatatttgcaccacaatattgagcagctgatcatttttgtatgcaggaaggtccttaaaaggacaccgactagtatcacgttaaattcataaacccactgacaactcagtttttttcctcaacaatgttactagatttcccttgcaaatttagctttctctatttctgagatttgtttatatcatcccttctcaaacctttgcaatcttcctgttccatttaccgatgactctaatgataacctcaccttatacctcgatgagaaacagttacatgattatacagaagctcccacacttacccaccatcacatctgcaaaccaacagcatctgaatctgtattttctgtgcatctttcactgcaagagaaggaaaaccctgctctcattaaaggcagatctttacccacatgctctggacctgatacttctatttttatccaggaatccactcctagagttacctccccttctctctcaacttcagttgtacgttttccttctgggcttgattccttcaacagcactcagatgtactctatcttacagagtgtgaaaccataagaagggtgctaaatatacacctatggcgaggacaagtctttttagtgactgttaatacttgattattagaggaatgattggggggtgagagagtttacgtatgtttattgcggcactattcacaatagtaaagacttggaaccaacccaaatgtccaacaatgatagactggattaagaaaatgtggcacatatacaccatggaatactatgcagccataaaaaaggatgagttcatgttcttcgtagggacgtggatgaagctggaaaccatcattctcagcaaactatcgcaaggacaaaaaaccaaacactgcatgttctcactcataggtggaaattgaacaatgagaactcttggacacaggaaggggaacatcacacaccagggcctgttgtggggtcgggagaggggggagggatagcattaggagatataccttatgtaaatgacaagttaatgggtgcagcacaccaacatggcacatgtatacatatgtaacaaacctgcacattgtgcacatgtaccctagaacttaaagtataataataataaataaatatatgtgtatatatatatatatatatatatatatatatatatatatatataaaagagtttaaagaaggaaaaaaacacgacacgaagaaatggacacaagcaaattggtagttgcgtcgtgggagggagtagcatgtgatgaggccgaacgtgtattcctggctgagggacttaggcttcatccagaagtcttggggagcagaagttgctcttggggagcaacagtttcccagtgatcaagggatcggtggaggcagattggacttggaagcaggagaccacttataagatcgttatggtacgctggtaaagaaatgagaaagccttggactaaggaagtggggatggtgctgaagagagaatagcagtgatggtactgaagacagaatagctgtgagggataataataagacagaaccaaatggacgaggagatgatggataggtgtctagattttaggtttgagtatctgggtgagtgggggtactaatcactgagatagagaatatgcatagacggaaagatttgaatggttggcatggttacccatatgtaaacacgcaagtgggcatgcccagtggacatgtgggtatatgagctgaacttggcatagagatctgagattgaggattggacatcataagcaaggtgattcttgcatggatgtggtcacctaggaggttaagaaaaattagatccagggatagtattctggaggagaatagcatttttaggatggacagaggaaaaccaggtgttagtagtcaggtagataggaagaaaattggcagatgaatttgttacggaagccagaattgggaagagtttcagaaaagggcaaatgcgaatactcatagcagcacatgttcaaatggactgggtaaatgaggactgaacaacagctaggcttgtggatatgaaggtgggggtcagtggacggaacatgtttctgggattggcataagcagacgctgattttctgagcttttaacatagaagtgaagaactagtgtgcacagctcttattgcgggacaactgtaactgatgcatacgtgttggactgaactcttgaatcagagttactataacttagcttatctctattttctgtcacatatgtgacaagaaaccatatgtgacataggatttttctgtcgcaaaaccaacatatgtgatggttttgtttttgtgcatgtgagatgaagacaactaattcttaatctccagatggtcattcagcatttatttacaatttggtgttaaattttctatttttttaatagcagaaaatgtgggatatagaaagatgagataaatgtgatcactggggactcatgttttcctaatatatctctcagaactcagtacactccttccttttttctctctctttatttttgaatctaatttgtagtttggacaaagtatacacacaaaaaacatattatcgctgaactataaagaaccttaggtggaatggatgacctttatatatggatctgctcatgttgaagtcactgggagagaaatacaagcctggttctcctttgttggccttcagtgctcccttagtcatatggtacattttgataagtgtgtattttaaaacttaagctcaactgtttttttggatgaatggcaatttctttaaaaaaaggagtgggggctctctccatgcttttacataaagtccctaccatgattttataaatcaaaaatagctaatgggatttttcactgaccttgctcttcatacttctacccgcctccccgcttttcccaaacatttcttctttaagcatagtaaattgtggctgaactaggggaatagaaccaaaatgaaaatgcataaatctgtaatcacatgcttataattaaaagaatgatgaaacctcagctcttaaatatacagtctgtagtattggtaatgctatacttgagaacaaagagatgctgaaagcagtggctgttgactgtgccaaagactgaagagcctagtagaagagaatatctttctcagaaaggaatattctttatgcagggtgagcatgtttcatgttgtacttctgtgtttttctgaaaatatgataaagacactttttccagtaatgaaaacaggtatgtttgattttttggtgtaatctcccttcattgaccatttaatgttgaaaaagaagcaaattgtcttttaagcaaaccgctttttaccattgtgaatttggtgtgatttgttgtagatttttaaattttaatgaatttggtgtgattttctgtagatttttaaatttcccttttggagagaaaaaccaaaacacttgccctgctggtaaatcatgggacttcgtccaagcccttgcttggcccctcccagttttaagcttgaatgagggcaggtctctgggaccctgccccttgcagcaggagcatcttgtctcgtgtgcgtgcgtgtgcatgcatgtgcaaatgttccctgagacccaggacagaggctgcatcctaagggctggttttaccctcttttcattctgtatgtcctcccccacctgcctgtgaagctctcaaggtcctgccagctctacacgtccccaactctgtttctcccctccctttatactaggggttcagaacttccagccagaagccactgcccttgtactaccttgtccccaacccctttgtcccctctgccccccagcctgcttcctgcctgatggctcaggtgtccccatgctggtcatgctggctcaggctgcaggagcaagcctgggagacttccctgcctctgccactttgtgtgggtaattgtgctttaggggaaagtggggggttcagtaaatttctggtgcactagtgggaaaaaaaaggtcataggataacaattattaaaccttaatgctatttctgctgtgctgaagaatgaagcaaagccatttatactccaggcaattttactttcgtgactctttaggtcagtctgagcagccattattatcctcattttacgatgaggaaacaaattctcagagggctcattgcttgactgaaatacaatagatggcaaagtcaggctggaaccaagatcttttaaaggaggctggagcagtattttaatttaaaaatcattgtaatatagtaagagacccagatagggccgttttgtggtgtcaggtggtagaaaccataaatacagatgaaatcccatgtaagataatcaattaaactcaaaagtcaccaataactggactgcaaaatgaatacgcttttgtattagtgcaacattcatgcggacaccgtgaaccagacggacaaaactctttcctctcttgtagtgacaaatgatgattccattttaaaggtacctttcttgccactcttaacatttgagaagcatgaatttgaagtgattcttctggaaacaaaaatagtttatatcaccacttctctctgagggttagatttccagcagccacaatcattcattccacaaccgtagatgagacttgatcaaagagcctctgaggagtgacagggaatcgattccatatgggagtccctaaccaccgcctcctgcatatttccagtcggatgctcccactggcacctcacactaaatatctccataatgtgttccatgctgtgtcttcagcacctagtacgtcgcagactcccaataaacatttacttcacagatgaatgaatgaaggaatgactgtcaattcaacacaagcatctcagttcttctgctccgcttgtgttctctaacactgtaagtagtgctaccacccatgtgattgtctaagacagaaagcttggcctcattcttcatttctctatgaatgagtgctgggaatgtttaaataatgcatgtatctattataaaatacaggaccataatggaatgtaagtcttctcactattactgttctctactttaaccaatgttgtatttcatttctagccttccagagataatttgcatggataagcatgtatgtgcatatatagatatagatatatacacatatacatacatacatacgtgtgcatatatatacatacatatgtgtgtgtatatatatacacacagacacacatatatatacacatatacatacatacatacgtgtgcatatatatacatacatatgtgtgtgtatatatatacacacagacacacatatatatacacacacacacatttgtatttatatagtttttactagtggttacatgctctatatgtctttctgccttttgccttttcatttccattatgaaatattttatatttctttgttttatattttctatatagagataactatatgcaagtgtatatgttttagatacacacatacatacaacataaaattttgtactatattcattttatgttgaacacaaaaataaaacattttattattcatacactatttatgtgagacagccaattctcctcattttctatagttaggttttatagagtcactgcgaacactgaattagtgaatatggaactattcttctatggggaaatacaagtttaggtgcctgcaagcctgtggtcatattcttgtcaactaattcactcataactttgtcttatgtgtgtttatgtttaatgacaccttagctaataatatacattgttcattcattaatgttgaactcatggctggcaacactgttactcatgccttaatgaactttacttaacacatgtattttctccataaggtatatcacagccatcttgcacataggaacactagctaacaactgagcactctgcttgggggccatttaaaacagtgaaattaccaaaaatcccataaagatgtggaaaatgtggcacaaaatagatggtgacaagggcacttttcacagtgtaagagctgaaacaagaaggcagagtgttaccttgcaaaacctcagctggaaacatgctagtttatataacaaaaataaggttatattatagatctatatgcatatcttataacctaaatgaggtataaagatgtatcccaatagccatatacacccagctcacagaatagaacatgatcaataccggtcagtcagctcttccatttatctttctccaatcttatacctgtgtccccttcagaaacaaccactatcctgaattttctatttatcattccgatgtttattctttatagttttgccaaaaatgtaaatcataaccaacgtattgtttacaattttaggaactttgtgtgactggaaatataagcataccctgctgcaacttagttttttctccactgaacgtggtttttgaaattctttcatgtttttgcatgtggttctatttcattaatttttattctattgtaggactataatagcacagattgtctatcctattctatccttttttttttttttaaatttgagatggagtttcgctcttgttgcccaggttggagtacaatggcacgatctcggctcaccgcaacctccgcctctgtttaaagcgattcctctgcctcagccttccaagttcagccttccaagtagctgggattacaggcatgagtcaccacacctggctaattttgcatttttagtagagggggggtttctccacgttggtcaggctggtctcaaactccccacctcaggtgatctgcccgcctcgacctcccaaagagctgggattacaggcgtgagccaccgcgcccggccctctatccctgttttattgattatggacaatacttatatgaacatttgtgttcacaattcctgatccacatccatactccctttttgtgttgcaaacctaggaggtttgctgaggtgtgggacaagtgaatcttctgcctcggaggtaaagtcaaagtgtttttaaaaatgattagttctcatctgcacttctatcggcagagttccaattgtgttaaatccttaccagcaccgagttctttgattttattttttttagttgtttttgacccaattgactctttaaagtggtatttcgttgaggttttcacttgcattttcctgattatttttgagaaatcatgtgttttcacacatttatagttgtttccttttctctgtaatgccattgtgagtcttttggctgttttttaatgacttgtcttttacttattgagttattaggacatctttatatattgaggacattaaaatgtggtcagataaattttcccaagccctgctcccactttggagcttgtcttttcatttttcttttgctgactattgattttaaaagttctttatttctatgtagtgatatctatcaacctttttcttgatggtgcataatttttttgccttatttaagaaatccggcggggggcagtggctcacgcctgtaatcccagcactttggaggccaaggtgggtggatcacgaggtcaggagatcgagaccatcctggctaacacggtgaaaccccatctctactaaaaatataaaaaataagccgggagtggtggtgggctcctgtagtcccagctactcgggaggctgaggcaaaagaatggcgtgaacctgggaggcagaggttgcagtgagccgagatcacgccactgcactctagcctgggtgacagagcgagactcagtctcaaaaaaaaaaaaaaaaaaaaaaaagaaatccttcccttctctaagttggtaaagataatgtcctttattttcccaagaaaattttatagttttgctttcacatttaatccttcagtctatttgaaattcatttttatctatgatctgcaataggaatcacatttaattttacgtcatatggataatgctgttttagttgtttagtgccatgtaaggaataagccgttttctctctaatatgctgtaccatttctatcatgtaggaactttccatatatgtatgaggctttcttgggttttctctatactattccattagcctatttccattatttatccttataacaaaacctgttactattctatttactgtagacttctaataagtcttgaaatgtgaaaaggctagattcctaccttctttagatttatgcctcctcttggtagtttattctgctatataatttaagaattaagttgttaagttccaccaaaacaaaactattaggattctgacacaattacacaggctatagatcagactgggtagaactgacatctttatgatatcaaggctttctatctatgaacatggtacagactagtgtttatttatgtttcctttaatatctgcccaaaaagtttaaaatttcattaagatttccatatgtttttgtacaaatatttctaaagacctcatttttgtttgtattttgtaaactgcatttactctattttgaagatatgtaaaattcaaatagcttacatcttacaaacttgttaagccctcttattaatttaacaatttgagatattaaaaaatttctctggcgatatcactgcgaataatgacagttttatgtatgtatgtatttatttgctatgtagtttcttttttcttccttttttctggtcattttgcactgtgttgtacctttagtataatatggacagaaagagtagaaatgtcatttcacaaaggggcataattagaggaatacaaataaatattttggccatctttgtaaacaaattaacacaaattgattggaggttttcatatcatttaattttcccctctactacttttcaagtgatattctgtatctttattcttttagtgcctatcttggatatattgacacagttctttttattgtgtatatttaaagtgtacaacacaatgtttatatatatatatatataaacacagagtaaaattattcgtcaagcaaattaacatattttatcatttcacataggtaccgtgtgtgcacgcgcacgcaccctgtgtactgctgaatagacagatctctggacatatttatgctacatagctgcgattttgtacactttcacctccatctccccacttccctccacctcctgccttttctactctttgtttctaggcatgcaagttttttggttttgtttttagttgagatttcacatataagtgagatcaagcaatatttttctgttaacacaattatttagcaaagtctaaagttgctgtttttacttccctctaaacaaattcttagcatgttttaatgctaatcttaccatttgaatgccattcctttccagtgttttagtttcattttatattgtctgttacccctaaaatatagaattattattttatgtattcatttttggtttacatttaaccaataccattgtcttggctcactattccttcatattatgccgccttctaagattatttttcttctttctcaagtacacccttgaaaagttgctttggtgtgaactccggattgtaaattctgtttttgtctgtgtgaacatatctttatatcaagcctgttttttagcaatagatttgctaattataaaattctaggttcaaagtaaattcctttcagccgcctggaggcctctgctttctctattcccttgttgcattgacaactctactcgggtccaatttttgcttctttgtttctaatctaaattttccctcaggatcttttatgtttttctgtttctccatatgtttgttttggctaatcatcaggaggcactaccaacccaaactattttaaaataaatccttgccttgcatgttaggatcacacattgggcgtttggggcctaatgcagtgtggttgcccatgatgggtaagggattcctatgtgagagagtttccccttcccccaaagctactggtgaggtggatgcatttccttaatgcctgatttagtggggtgattcttttcaatttcttcttttaagatgtctctgtggttatgtcggacgatttgaggcctgttcaaaaatttcccatatggccttaaaaactaaagttctaggttgctaggtttagcgatgtcctgaggaagttctggcttgcacctctttggaatcctgctcctgtttgtttttatggcctcagagaattttccttattttctatccaactcagccatgcattcaatattactttaccccagcttttttgtgttctttgttctgaaactttttgatatctatagtcttgttgaaattagaagtctatcttgtttttttcaatgaaaatatatttaaataattttacattagtacgttcttcttaatgacttcatagtatttcactataaaaatgcacccaaacttacttgctcatttctctacttacccaccttttttctaaaacattgttttcaaaagcaaaagattatggtaaaaacatgtgtgtatgtctcacaattcacatttggtactgtacagcccgaaatgttgagctgctgggtcaaaagcagtattagccttattcttgatgcctccttttctcccatacccttgccatccttgctttccttacctcatcgttgttaagtcctgtggctttgctcacatgtgtccactccactctaatcccattgcatcaacctatctcagacccaaattatcactttttttccttaggctgaccgtttcctaacaggtctcacttttcctcatcaccgccattctgttaccgtataatcaccaataacctgatagtaaccttcagtcttctggaaaagattgaataatgttagtataataaattattaaagtgtgcgactactcattaaaatttatgtttaaaatatagagctaatatattttaaactatgtaaaatatcaaaaatgtgtgtttatttatttttgggagaaggagtccttgctctattgcccaggctggaatacagtggcgggatctcaactcactgcaacctccgcctcctgggttcaggcaattctcctgcctcagcctcctgagtagctgggattacaggcacatgccaccatgcccagctgatttttttttattttttgttttttggtttttttttggtagagacgaggtttcaccatattggccaagctggtcttgaactcctggcctcaagtgatacccccaccttggcctcccaaagtgttgagattacagtcatgagccactgcgcctgacctgaaatgtatttttaaaatataccttatttgcccttcatgttagataatacaaaattaattgcatattttttcatggttaagtctaagctttccttccttaggttctgggtacttggatatgctctgccatgaagaagaatcctgaccaaataaatggttgtgttcttgtagctgaacctcaattacattctttagtgactgacgtgaatcttccagttttttttgaagaaaagtcagccagaaactgagttcaagactagcacttttaaaattttaaaccttttttgttaaagcaattctggtataataaaacccaagggtccatttgtatagttacctaagaaataccaacgtgttgattcagaagtaaatcgtcataacatattaaattgcaccatttaaaattatgatattttctggttaatgtctaaaatctgccagtttattaattttctgcttgacacatgttctaactacatgttacttgggcatttggatcattagggaaataagagttgagtgtgtttgttgtacgttgtctatggtttcctaagtctcctctgaagataagcaacacttgtgagacagatgtgtcacacagtggagggctttggtgtaattaccgctctctgttgtgcatgaataaaatctaagtgaaacactgctaaaccatgttaacttatgagaagggtcagctgggcatggtggctcatgcctgtaatcccagcattttgggaggccgaggcgggtggatcacctgaggtcaggagtttgagaccagccaggtcaacgtggtgaaaccccgtctgtattaaaaatacaaaaattagctgggcatggtggtaggcacctgtaatcacagctacttgggaggctgaggtagaagaattgcttgaacctgggaggcagaggtttcagtaagccgagatcacgtcattgcactctagcctgggcaacagagagagactccatctcaaaaaacaaaaacttatgagaaaagtcatctaactcatatggcaaatggtctcatatcatgtgccaaatctgacagattgatactggcttaatggaagtgtgttttgaggataaatcttaggtcttacctgaattcttgggtttgaaagagtagcatgagtaattagtgatttctgaaatatgatagggaagaattgagtagtagcaagtatttttcctccaatgatttcttatttttttcttcataaagtttatgcttatatttttatagatggaatatattatatattttgtatatattatatatgctatgtttatatgtaagaaataggtataaaatctatagagatttattgtatgttaaaggaaaaccaaacctaaatcacttttggaggaagaatttctttttttttttttttttaaggctgttttgaaagcttgtatacaggcatccctgggagatattacagaccaccacagtaaagcaatattggttccagaccaccacagtaaagcaataaagcaagtcacatgcattttgggggttcccagtgcatataacagttacatttatgctatactgtactctattaagtgtgcagtagcattatacatttaaaaactacgtacataccttaatttaaaatatatttaaaaatgctaacaatcggctgggcgccgtggctcatgcctgtaatcccagcactctgggaggctgaggcggacaaatcatgaggtcaggtatacgagaccagcctgaccaacacggtgaaacctcacctctactaaaaacacaaaaagtagcgcgcgtggtggtgcacacctgtaatcccagctactcaggaggctgaggcaggagaatcgcttgaacccaggaggtggagtttgcagtgagccgagatctcaccactgcactccagcctgggcgacagagcaagagtccatctcaaataaataaataattgctaacaatcatcttagccttcagcaagttgtgatcttttttctggtggagggtcttgcttccatgttgacagctgctcgctgacaggtcagggtggtggttgctgaatattggggtagctgtggcagtttctgaaaataagtcaaaaatgaagtgtgctgaatcaattgattcttctttcactaaatatttctatatagcatgagatgctatttggtagtattttacccacagtagaacttctttcaaaatttgaatcagtcctctcaaaccctgctgctgctttatcaactaaatttgactttctaaatcttttcttgtcatttcaacaatgttcacagcatctttaacaggaatagactccatctcaagaaatgacttcctttggtcattcataagaagcaactcctcatccgttcaaatttcatcatgagcgatttgctgcgatttggtcacatcctcaggctccacttctcattctagttttcttgctgtttccaccatttcttcagttctttcctctgcggaagacttgagcccctgcaagtcatctgtgaggtttggaactcacttcttccaaacttctgttaatgttgatattttgaacccttctcatgagtcaagaatgttcttaatggcatctagaatgatgaatccttttagatagttttcaattgattttgcttggatccaccagaggaatcaatcactacctacagcagctatagccttaccaaatatatttcttaaatagtaagacttcaaagttaaaatgaccccttgatctaaatagatgttgtattagcaggcatgaaagcaaaatgaatctccttgtattaaaaacatctccatcagagcttttgggtgaccaggttcatggtcaatgtgctgtaatattttgaaaagaatctttttttctgagtagtaggtctcagcagtgggcctaaaacactcaataaaccatgctgtaagcagatgtgctgtcatccaggctttgttcttccatttatagatcacaggcatagtagatttagcataattcttataggctgcaggatttttgaaatgatcaatcagcactcacttcaactgaaagtcaccagctgcattagcccctacaaagaaattcagcctgtcctttgaagttttgaagcaggcattgacttctctctagctatgaaactcctagatggcatctgcttcttgttttatctacactgaaaatctgttgtagtgtagccaccttcgtcgattatcttatctagatcttctggataacttgccgcagcttctccatcagcacttggtacttcaccttgcacttttatgctatggagacagattctttctttaaatttcatgaactgacctctattggcttcaaacttttcttctatagcttcctcgcctctcttagtcttcatacaattgaagagaactagggccttgctctggatgaggcattggcttaagagaatgttgtggctagtatgatctaatcggaccactaaaaatttttccatcagcaataatgttgtttttgctttcttgtccttcatttcttcactgaagtagcactttaaatttcccttaataacttttcctttgcattaacaacttgtctgtctcacgcaagagaactagctttcattctctctccactttggacatgcctaagtcactaagcttaattatttctgacttttgatttgtaactcttttttcacctgagcacttagaggcctgtacagtttttaattgtagggttattaactgtatggttattaattggcctaatttcaacattgtagggttattaattggcctaatttcgacactgttgtgtctcagggaatatggaggctgagaagaggaaaagagatgataaacagccttttggtggagaagtgagaacacgaacagtatttattgattgtttgccatcttatgtgggcatagtttgtggtgccccagaacaattttaataaatacatcaaagatcactgatcacagatcaccataacagacaagataataatgggaaagtttgaaatacggcgagaattaccaaagtgatatgacacaaagtgagcacatgatgttgtaaaaatggtgccaatagtcattcgactacagttgctgccgatcttcaatatgtaaaaaataaaaaataaaaataaaacaaaaattaatacctacaaagcacagtaaagcaaagcacaataaaagcaggtatacctgcaatgagatgttatagctgcaacacagaagatggttagaaggcatacctaatggatctcatacaattcatggaagtgtttttattaataaagcaatgcatttaggaatatttgttgctctaaccatcaaatgaaatatttacccttttgaactttcctattcccatccatttcccggcatgaaacttcagaggcattcttaactctagattgtctctcacatggctttctactttctatccacattatcataatagtttctcaattgatatgtctgtctccagcctccattccctgcagttcattccccagctgcaagggtgacctgtcaggttttcagggtattgtataaatgtctccattgctttgacagtgttgtttaatatgtctttactgattttctttctaatttatttatcagttagtaagaaggctgtaatctctagttacaacttttgattgtctattttttctttctgttttgtcagttggggaattttgtctttctttcattttatttttcttagtttttgcattatgtattttgaagttcataatacttttttggaggcaaacataggtagaattgttatatcttctttttgaattgatccctttatcattatgtattgattctccttttttcctggtactatatcttgttctgaggtctgatttgcctatttttaatacagctacttcagctttattatggctagtgtttacataatatacccttttatcttttactttaaacctaattgtgtatttatattttaagtgaatttcttttcctagagagcataaagttgagtcttatttttcttatcctgccaaacaatctctggcttttaattggggacatttagaacatttacatttaatgtagtaatgatagagttgagtttaatttatgatctttatatttgtctactatttgtttcatctattgttttccttctttttttctttcccttttttcttattaattagtattttttaatataatcggcccttcatatctgtgggttctgcatgtgtggattcagtcaactgcagatcaaaaaacttcaacaaaaaagggatgttcgtacctatagaatgtgtatagacttattttcttgtcattcttctccaaacaatacagcataacaactgtttacatagtatttatattatattacatgatatttacattattacagagataatttaaagtatatatgaggatgtgtgtaggttatatgcaaatactgcatcattttatataagggactttagcatccatggattttggtatctgtgggataccatagatgaactagtctcccatggatattgagggacaactatatttcatcttatttccaccattggcttatatgttatacatctttgtttaatattttcagtggtcactctagtggtgtgcccctttaatttatcacagtctatcttcaaatagtattacacaacttcacaggtgatgtcagaactctacaacagtatactgtcattctcccttctgttgtttgtgctattgttgtcatatattttacatctacatatgttataaccaaaacaatatattgctcctacttgcatttaagtcattatcttaaaaaaattttaaatgacaaaattgtattttatattcatcctcataattagcatttccagtttatttcactcatttgcatagatccagcttttcattaggtatcatttttattctacctgaataacttccttaacatttctcattatgtagatttacaggtggaaaatttatttagccattgctttcttgaaattatttatttcccatttttgagagatattcttacagaatgtagaattctcagttaacaggttttttttttttctttctgcagttaagatattgttcttttgtcttgtgtttgcatagtttctgacaaggaatctatattagttttccgttagtgctgtaacaaattaccacaaacttcatagcttaaaacaatacaaataataaatttgtaatttcttcaggtcagaaactcaaaatggacaaaaattatattagcagtgctgtgttccttctggagtatctaggggatacatttctttgcctttttttagactctagaagctgcccacattccttggtttatggcttctagctatcttccaagctagccatggctggttgaggttttcttgtgatgtatcactctgtcgctaactctcctacctttctctttcacttacaaggacccagtgattgcactgggacaacgaggtataatacaagatgagcttctcatcttaaggtcagctgattagcaaccttaattccatatgcaatttaattcccccttaatttattatattatattcccatgtaatatatttacagctggggattaataaattaattcccccataatttattatattatattcccatgtaatataacatattcatagctggggattgggacatggacatttttagagggccattattctgcctaccacaaagtcttgggaatttatatttttgttacttgttataaaatgtgtttccccactccttccccatctaaactctggttgtttttaaattttacctctattgctagtttataggatttttattatgatgtgcattggtatatgtgtatatgtgtttttctctttcttttttgtttcttttttttattttttattattattatttttttagacagggtttcactcttgttgcccaggctagagtacaatggcatgatcttggctcactgcaacctccgcctcccaagaacaaacgattctcctgcctcagcctcccaagtagctgggattacaggtgcccaccaccacacccagctaatttttgtatttttagtagagatggggtttcaccatgttggccaggctggtcttgaactcctgacctcaggtgatccacccacctcggcctcccaaagtactgggattacaggtgggagccaccatgtctggctgtgtttttctctttcttgaggttaattgggcttttggatttaggtgtttattgtgtgtatcaaattgggaaaacttttgaaccttatcccctcagtgatttttctgtctccatctctcggtttgttctgggactaaaatgatacattatgctagaatgtttactaatgtcacagttcatcaatattctgctctcctttcaatcttttcctttatgtgcttcagttggaatagatccaaattttacatcttaaagtttattgttattttcctctgcagtgtctaatcttacgtgatttccattcagtggactttttatttcggatactgtatttttaactttacaagttccactgagttcttttgtttatatcatccattttcttctcattatgttcatgtttttctttaatatttgagggtggttactaaaaaactacattcgtattaatatccttatttgctggttcatctcctgtcattcctgggtctgtgtctattgacttaaagaatgtgattgcgctttcctgatacttggttggtctagtaattttcttattaagtgctagacactatgcacattatgttgttgggtgtgtaggttttgtgcatttctttagaatatttggctttctttaggcagataatttaaacaacatgtgactcagttgatccctttaaggcttgtttttaagctttgcttaggctagtctggggcatccttcatgccagtgataatttggttttactaataatttacctaccccactgaggtctccaagaccatcctgtctcttgtgatcagtgacagctctccactctggctctttagacatcgaacatcttttggccctgtaaaagctttgggaattgttaagcttatattttcttggtggttctttgcttgtacttgtataattttactgtatacaggtgccacttaatacccagctaaaagtcagaaagcttaatgcagatttttgatccttcttttctgcaaagtatttcctctctggaactctgttcctcatcttttagtcatgtcagcctacctagacttctatctgtatttcctcaactcagcaaaactggttggcttatttggggtctcctttctagcatctatgattttaaaattgcttttagacagaaatctaggaagattgaagggcactacacagatcagactcctatactgcttatttttcagtatatgaaaacagtttcatatattaaatacatttttctagttaattacagcaggagggtaagtttggttcttttcaattaagtccggaattaagttcaattaagtggaagttccacttcaattaagttgataaaggatcaacaaaacaaaacgttggtttcttgaaatgataaacaaaatagatagaccactagctagattaaccaaggaaaaaaagtggaaatatttttccactggtttaaatttaacacaattcatcaggtcaacaggatttcactatccaaaatatatatgcacccaatagcagagcacccagattcatttaaaaaaacatattggtggacctaagacaagagatagacagcaatagagtaatttggggacacttcaatacaccattggcaacattagtcagattataaaggcagaaaatcaacaaaggaactctgggcttaaactggactctagaccaaatggaaaaacatttatagaatattctacttcacatcaacagaacatatattttttctcatctgtccatgaaacattttccaaaattgaccatgtgcttagccaaaaagcaagtttcaatgaattttttaaatgaaaataatattaagtgtcttctcagaccacagtaaaataaaattgaaaatcaataccaagaggaactctcaaaaaactacacaagcatgtggaaattcaacaacttgctcctacaaaacctttgggtaaacaacaaaattaaggtagaaatcaaaaggttttttgaaatgaatgaaactagatacaactgctactgggtacatatatattttggataattaaatcctgttgaactgataaattgtgttaaatttaaactagtgggaaaatatttccacttttttcccttggtcaataccaaaacctctgggatgcagcaaaacagtgctaagaggaacgtttatagcattaaatgcctacataaaaaacacagaatgatctcaaattaacaatgtaacattgcatctcaaggagctagaaaagcatgaacaaaccaaactcaaaactagttaaaaaaaaaaaaaagaaatggcaaagatcagagcagaactaaatgagattgagaccaaaaaaaatgataaaggatcaacaaaacaaaaagttacctctttgaaacgataaacaaaatagaccactagctagattaaccaaggaaaaaaagattaaaataagcacaatcagaaatgataaaggtaacaatacaaactgataccaaagaaatacaaaaatcatcagagactattatgagcatctctatgcccacaaactagaaaacttagtaacaagtaatgaaattgagtcagtaatttttttaaaaaaatctctaaacaaaaataagcccagaaccagacagatgaacagccaaattttaccagatatacaaagagttggaaccaagcatattaaaactattcaaaaaaatcaaggaggaggtgttcctttgtaactcattcatgaaaacagtatgaccctggtaccaaaatcaggctagaacacaacaacagaaacaacagaaaacaaaacacacaggggtatatctctgatgagcatagatgcagaaattctcaagaaaatactagcaaaccaaatccaacagcacatcaaaaagataatattatacatcaccatcaagtgggttctattttaggaatgcaaggatggtttaacatacacatgtcaataaataataatttaccacacaaagagatttaaaaaaccatatgatcatcctttttcttttttttagacagattctcgctctgtcacccaggctggagtgcagtggcgaggtcttggctcactgcagcccctgcctcacaggttcaagcggttctcctgcctcagccttctgagtagctgggattacagaaacacgccaccatgcccaactaatttttgtatttttagtagatacgggacttctccatgttttccaggctggtcttgaactcctgacctcaggtgatctgcctgcctgggtctcccaaagtgttgggattactggcatgagccaccctgcctggccaatcatcttaacagctgcagaaaaggcattcagtaaaatccaacattgcttcatgataaaaaccctcaacaaagtagacattgaaggaacatatctcaaaataggaaccatttacaacagactcccaggcaacattatatggaatggggaaaagattaaagcattttccctgagaactggaacaagacaaggatgtctactctcaccactcctaatcaacatagtgctggaagttgtagccaaagcaatcaagcaagaaaaagaaattaaagacattcaaattggaaaagaagaagtcagattatctctcctcactgatgacatgatcttttaaacctagaaaaccctaaagatccctccaaaagataactagacctaataaatgacttcagcaaagtttcaggttacaaaataaatgtataaaaataaatatcatttctgtacacgattaacattcaaactgagaccaaatcaagaacttagtcccatttacaatggccatatacacagaagtaaaacacctaggaatatttaactaaggaagtaaaagatctctgcaaggagaactacaaaacactgatgaaagaaattgtgtagatggcacaaataaatgaaaaaacattctgactcatggatcagaagaatcaacatcattaaaataccggctgggcctgtaatcccagcactttgggaggtcaaggagggcggatcacctgaggtcaggagttcgagaccagcctggccaacatggtgaaaccccacctctactaaaaatacaaaaattagccaggtgtggtggtggctgcctgtaatctaagctactcaggaggccgaggcaggagaattccttgaacccaggaggcgggggttgcagtgaaccgagatcgtgccactgcactccagcctgggtgacagagtgagactccctctcaaaaagaaaaaaaaaatgaccatactgttcaaagcaatctacaaaattgcagaagtgcaattcctatcaaattaccgacatcatttttcacagaaaaaacaatcctaaaattcatatggagccaaaactgagcctgaataaccaagtaatcttaaataaaaagaaaaaaaaacaggcatcacgttttgtagcttcaaattgtaccacaagactatagtaacccaaactgcatggtactggtacaaaattaggcacaatagatcagtagaacagaatagagcaccaagaaacaaagccacatatgtacaaccaaccaatcttaaacaaagctgacagaaataaacaatgagtaaaggacactgtattcaataaatggtgctaggacaattggatagccatatgtaaaacaatggaactggaccccagtctctcaccatatacaaaattttactcaaaatgggctaaagacttaaatgtaatacctgaaactgtaaaaatgctagaagaaaacctaggaaaaattcttctggacattggcctaggcaaagaatttatgacaaagacctcaaaagcaaatgcaacagaataaaaaatagataaatgggacttagttaaatgaaaacgcttctgcacagcagaagagataattgacagagtaaacagacaacctatagaatgggataaaatacttgcaaattatgctcctgaaaaagaattagtatcaagaatccacaaggaactcaaacaactcaacaagaagaagacaatcccattaaaaagttgacatttcttaaagaagacatataagtagtcaacaaatttatgagaaactgctgaacattattagtcatcagtgaaatgcaaattaaaatcacaatgggataccatctttcaacagttagaatggctattattagcaagccaaaaacagcagaggtagacatggatgtgcagaaaagggaatagttatatactgttggtaggtatattagtacaacctctacaaaaaacagtttggggattcctcaaagaactaaaaggagaactaccattcgacccagcaatcaaccccattgcttggtatctacccaaaagagaagaaatcattgtgtaggaaagacacctgcattcatatgtttattacagcactattctcagtggcaaagtcatggaatcaacctgtatccatcaacagcatcacaacagatgactggagaaagaaaaaaaatatatatatatatattctttatatatggaatactactatactatgtgtactaccatatatatatggaataccactcagtcataaaaagaataaaattgtgtcctttacagcaacatggatgcagctgaaggctattatcctaagcgtattaacacagaaagtgaaaattaaatgctacatgttctcactttcaagtgggagctaaataatggctacacatggacataaagatggaaacaatagacctggagtctccaaaggtgggaagaggaagaggagggaagggtcaaaaaactacctattgagtaccatgtttattatttgggtgatggattcaatagaagcccaaacctcagcattatgtaatatatctatgtaacaaacctgcatatgtaccccagaatctaaaataataatatttaaaagaaagaaatatattctaggcaaaaataaataaaatgaacacagttcagcctcttttgctttgcctgttgtatgatcacaccatgagaggctggtgctgcctctgcacagcatttttgccagctcttttccattgtatttccagttttgtctcctttatctttcttcttgacatctcgaactatggtgcacctttgcttctgtgtcttttttcccactgttcattgtttaccctctccggtctctgctcctttttctacttgactaagacttgttcatcattttagtcccaactcaccctgcattgcctttgtcttttccttattgacttctctctcgataggcaaatggatgtttcacttaactgtactcataactaatttgccagtgttaaggctttggagtcagactccatgagttggaatcctgtctcatttatttagtgtttctggaatctaaatcaagttttttaattgctaatttcctgattttaagtgggaataattataaaccctttcttacagggttttattatcttgggttattatatgtaaagaattagaatagtaatatcaacatcattccatattaacattcccatttaaacatctctaaaacatctacatgtatgattatttgtctctctctccatctaccattttcttaaaggaaaaaactatgtaatatttacctgcatatgagtccccaacaaagctagacattcaaatgttgactgaaatattgtaatgttaaattatgtggcttttgtctgtaggattggaatgacctaggctttaagcattgttttggcaagtaagattaggaagaaaagaaacacatcagaagtttttttggctttcttatttttgtttccagcagttttgtgttttgatagtttgaatccctaaattgaaattaattggtattgctttcaatatggaaagctcagccctaatgcgtgtatttacttatttttagttaaaggctcaacgaggttttcgttttatccgaaggatttttatttaagttcagcctggtattagtaagtatgtatgcttcatttatattcttcaatagggtagttgtctcttagcaaagaaaaaggaaaggaattggcccaaggcatgtctttatttctatgctacattagtgaaagtccaggagagatttgcttagcctgtaggtagagtaatatatagatttgggtatgatttgatataaaaatttagtttgagttagcaattttctagttggaaaattgttccagctcctttagactgtactgtctactgtactgtctagctcgtggatgcgtattatgttttcccatgtcttctctactttgggtttaaaacgaagatttggagaggaatttcactgaggaccacttcaatacgtacatcaggctgggtgataatagcacacggctttcctgtattttatgtttggctggaagccacatatagaatttttaaagtatgtgtcattttctattatgtatatgtttcttgagtttttaataactagcccccatatgtttatatacacctatatttctagaggcacaatgatatatatatatatttatgtacaaagttgaaataaccctcagtattaaataaaaggtagctgtaaattattgcaaaagtcaggttgacattttatgcctcaaatgctctctttcttcctcctaggagtattccacaacattgttttattgtcctaagaacatgcacagcatagagaaggaagatgcattgggacttagttatttctcttgcagtctaaggaaagatattctgaaagtcatgcactgtgacatgtatgaactacttaaatttacctgacttttagttcattgtcaaaaggaagagtgtgtcaaaaatctcaaaactaaggcaatatatcttcagttaaatgacaactttaaatgagtcagaagaaaggcactgcatctgtctaaaaaatatcccatactggctgcacttaaaagcaactggaatgcacattcatagctaattataaacaaaaactagttaacactttaaataaaaaggaaaaatagcaaaaagatttagagcctagacaaacagatgaaagggttctgagttgccttccatctgatattactcaaatgcaactctgtctccaattacctgggaatatgtggtattccctcatgaaagctcaagatcagaaagggcgtccatttcgtgtctttgcttactcatagccatttggaacaagttcagcagaagtatttcacattgcgaaagagtctggagccagacagcgactacagacactaatcactgggtcaaaatagtaacttagtaggacagcaaccaccagaaagtatttgtggaggtagaaatgtggagtcggatatattagtgccgttggagaagatatcaccaaatgcaaaaatgctgtaacagaaccattaaatcactatttgtaatcagtttcatgttcagtggcacaggactgtctgagccgatggtctctttggtaggatcagacctaaaaggtaatcttatgcccttaactctagaataaatagatggaaagagaattaaccaaataaataaaggctgcctcctaaaacatttggtgtttcttttattgtatggttccaagtacaggctttctttgcctcaaactgcagatctctagcatttgagatttgcggggtgggcaaaaggggaaacatcattgctaaaataataggtgcagcaattgatcaacttccctaaggagctgcaattttaggtctattcaaataagagttactggtattctctgaatattgtcattataaaccacttttcattgttgccttttttcttaaactacatcatcctgttcctttcctccagtgtcagtagagaattgattgctttattttactatcactctactccgctactacttctattttcagtagactctatctcggaacattttccttggcagtggatctcaaactccaagctatgaataattacccacagtatgtttggaataaaaaggtgagctttagaagaggattaagcattttttaaaaatcattcttttagatttcatcaggttctcactaaattcacatgaagtattatcttatcccttgtagcaattttatttactgctatgtctttaaaaagtggggaggggactaaggagctattagcctctgtgtttatcctgtaggcattggacttctccattctatgccaattaaaacaacttcacacacaaattaagtagaaataaaatctattaaatatattttaaagcaatcccgtggttttataaaggtcttgggccataatttctctgttgctgtaaagaggcaaccttattttagcaaagtatatttttaattcaacatctggattctgtatagaaaaattaacaaggaaatatgtgagattcctacaatggaagacttttcacatattgcaagcaatgcatctccatcctactttgtagtaatactgatgtgggcataaaggaaagacaggaagaggatgactagacaccaggtgatttatacattatcttattaaatcatgaaacagctcggccaggcacggtggctcatgcctgtaatcccagcactttgggaggccgaggcgggtggatcacgaggtcaggagatcgagaccatcctggctaacacggtgaaaccccgtttctactaaaaatacaaaaaattaagccaggcgtggtggcgggtgcctgtagtcccagctactcaggaggctgaggcaggagaatggcgtgaacccaggaggtggagcttgcagtgagctgagagcgggtcactgcactccagcctgggcgacagagcaagactcccatctcaaaaaaaaaaaaaaaaaaaagactaggaaaaaaacgtggtgctcaaagcaaaaaaaaaaaaaaaaaaaaaaaaaaatcatgaaacaactcaatgaaaaagaaattattaccctgctttaatgatgaataaaagttattacatcaaagaagcgattattcaaagttattaaaatctactgcaattcagtggctgcattacaattcaaacccaggtttgcctgactaaagctcatgttctagctcccaacactggaccttgtgggatctgaagatgagaggcagagtgtgagaaagaccttgcaaagtataagcatttacaaaaaagtgtagcttttatggtccgaggtggaggagaggtgattgctctcagagatctgggatgcccttggccagtgatgtccattaggcgtcataaaaatgtttctgtcaaaagtggtctttgggaggctgaggcaggtggatcacctcaggtcaggagttcgagaccagcctgaccaatatgatgaaaccccatctctactaaaactacaaaaattagctgggtgttgtggcatgcgcctgtaatcccaactactcgggaggctgagacaggagaatcacttgaacctgggaggcggaggttgcagtgagccgagatctcgccattggactctatcctgggcaacaagagcaaaactccatctcaaaaaaaaaaaaaaagggggggggtcaagcattgctgggcgacagtagcacagaaagcccggtgatttgatgacaatgtgaagatcaccagccaagccttgtgcctatttgtctattttgaatgctgcttttgctaccctataattatcttgattatgaatgactggaaatctgccatcctgatcatttgaatcatgtcaaaaagaaatgaggtgtctactctaaagagttgggaagttaatcttgtagtagaaaattgaaatcttttttatctcttgtatgcaattcactcggcatactttatttaaatgaagtttattaatagttgattatctgtacataagaaactgctactaaaagttacactggctttcaaaactctgcaaaaccatttatgccattagagattatctgaaaatattttttgtacttctagaaaacaatacatgtataaatatatataaataacaataagttgttgcaaatagaaaatcaccttattttctgtgttaccttcagcaaagtcatgtttgaaagtctgtgcttataacagtggtggtacacagcctataaaagttgtttctcaaactgaaaagcatagctggtctgattggggtcactgcatgtaattagcttgcttgctccataaatgaatggcagatttgttttattccaaatgatatcttaattttcaccgattaaattacattttattttggtttggaaggttcaccctcactatgtaaagcaaccacatcctgcagttgtcactaagttaacaccataagtatgtttaaaagaattgttggccaagcatggtggcttatgcctgtaatctcaacactttgagagaccgagacggaaggattgcttgagcctcggagtctgagaccaccctgggcaacatagcgagacctccatctctacaaaaaatagattgaaaaatttagccaggtgtgttggcataccctgtaatcccagctacttggaaggctgaagcaggaggatgacaggaggaattgcagcttgcagtgagccatcgttgtaccactgcactgcagcctgggtgacaaagtgagaccctgtctcaaaaaaataaaattgtgacaataaaatagtgatgatgcatttatgcaaacaccatcttggaaaaagggtatctctgtttttccataaaatggaattgcaccccaatttttcagaaagtttttcctgagattggtatacaaaggaaatctgttcagttctttgaattgttgactctacatcaggaattgaaatgtgtactctaatgttcttgctttgatctctcatttgactgtttatcaaagctgattacagtttgaatacccaaatcccgttagcttcaaaactatgtaaaataatgtataatagagcattttaagagatttttttcttattccagtttgtctttatgattgtgatatggctattaggtttggtaagaagctttggttttatattttgttccctcgataagaatcagtcttctgccaaattggattaaagtttttgtttcggccaaacttgctcacgcaactaagcaacagctgtttcggtgaacatcaaaagaagtcattatgaacaaatgaaacttactttattccactaaacacaatttaggagcttatgctttttgaaaagctgtatgtgttttctttattgaatataacattggaatataattattagttgacttactcagttaaacattatgtatgatatcactttaagaattttgagatcttcaggtccagaattttccaaggatatttatctattaagtttctactgattattggaggcaccgtgctaagtattttgtacatgttaacagatgaatctgcctaaagtcacagagctaatttaagtggcaaaatcaggaatcgaatacagatctctggcatcttgttctactgtggtgtgtttttaagtttcataaatcatttactttaatcttctaaaatagtctagaaattccttcttctaatctgcctgaatctctgtactttgcaaagaaaaagcaaagatatgtgagggcaactgaaaaaataaccttcctgaaaatagtatgcattgtagtgcttttgttattttgcctaaacaaactttatgtgttcctagaattgtttctggaagcaaatcatcttttatgctaggcaactcagagcagattttgtataaaacaatatgttcgtgctggagccttttcaaagtaaaatcataggatattcattctttttttaatatagttaacaattgacctgtaagtttatacaaacaatctgacatacaaaaagggaaagaaaagaaagaaaaaagtatctgctgccacctgaaatgatccctgtgaaatcctgaaaatcctggcaaagagtggcaacgtgacactgggttatgactttgcagataccatgcaaacctttgaaagaacactgtcttgaggctgtaaaacatgaactagcctaagccgtactattgtgttgtaagtagtgataaagacactgacagttctcgagtgaccatgggttttatttcatgcacagttcccattttttttataatcaatttgccctgctccactgtgtctcctaagttctccaaatggccccacatgtgacccaaagaggaatgataataaaaagacaacttcttctttaactagtcccaggatttattttttacattttactttttttttgtcctgttactcagtgattttcaaactgtgggtcacaaaccattagtgagtcatgaaatcagtttagcaggtcccaactaatgttttaaaatctgatagataggctaaaaatatcagagagcattgcatgaaataagagtatcttcaaaactttcaggtcaaacatatattaatatgtatggaggtatggggaaatgggtgaaggtgaagtagtacataattcctagaatgcttacttgtcaaaaaaaaaaaatgaagtcacagccatactttaagtgatggagttcttatgttattttaagcagttcgaaatactgatttaatctccttaaatttgacctttgggtttgtagcagatcacaattctttatttttaaataaaaatgatagcaagtaaatgggtatattatcacattcccccttttcagaacagaccatgatctgttcacctgtggtctgatatgaactattgaaatgagttcaaaattcttaacataactgagaaatgtcacataccatttctgtttagggtttttttttttgacgtgtttacacctttgcttgagggaattatttccactaattgttggcatttaaacactgacacatctgatgtaaatatgaaactagtgttttcttttctcaggttaatgtgactgagttaaagaaattttttcagaatctgaaatttttgattagataatatatcttgtctgtgtcaatataataagatcaacttaattaaaattaagtagaatcatttaaatcatgtatctatgacatccatagatttgaaataagcttctggttgtagtacaatagaattaataattaaaataagttacgttatgtagggcagatgttgcttgaaatagtgtaacaacttatcatttatctcatgtacttttattttcttgcactttcagccaaaattgaccaagaggcagaggaaaattcactgacagagactcataaatggtgagaaattactttatttcctcccagaatagcgttataacatgctaagtgtatttcatcttaaggaaccaatttttagttcaattttaattttcaagcataaaacaaaaataaatctaataaaatggtgtgctctaaatctacaatgaatttctgaattttatttttgttattctgggtaacatataattctgttaaataccaaattattgtgaatagcttagcatcttctcttttacctgggatttagaactatggaaatacacaaaagaaggaagatagcaagaacctgtttcagagtttgggttatcaaaaaaaaactatgtgatttccatattcaaaagtgaagtctaggtaggaagcgatgagcttcccttggatgcaccttcatttccagaatggagacttgcaattatgggtaaacatagaaaatatctcagaaatctccctgcttttctgcctccattttctcttcttctcgcatctctctatatacgtcagggttctgtagaaaaaaagaacaaactggcgatacagatataaacacacacacacaggcatacctcattttattgcacttctctttgctgtgctttgcagataagtgtattttttttttttcacaaattgaaggtttgtggcaactctgcttctagcaagtctatcggtgccatgtttccaacagcatgtgcacacctcatgtctctgtgttacattttggtaattcctgtaatatttcaaacattttatttttattatctatcaccacaggtgatctgtgatcagtgatcttttatgttactattgtaattgttctgggacaccatgacctgacccatataagatggcaaacgtaatagaaaaatattgtatgttctaactgttccaccaaccatctgttcccttgcgtctcccctctcctcaggcctccccgtattccctgagacacaacaatattgaaattaggccaattaattacccaacagtggcctctaagtattcaagtgaaagaaagagtcacacatctctcactttaaaacaaaagctagaaatggttaaccttaatgaggaaggtatatccaaagccaagatatgcccaaagctagacgtctagtgccaaacagttagccaagttatgaatgcaaagaaaaagttcttgaaggaaattaaaagtctatttcaatgaacacatgaatgataagaaagcaaaacagcattcttgctgctatggggaaagtttaagtggtcttaatagaagatcaaaccagccacaatagtctgttacacaatagtctgttgccaggggtttggtttagcacagctacttgccacacagaaagccaatcactgagatgagtattgccagggaagaaggctttaattgggtgctgcagccgaggcgatgggagctcagtctcaaatccatctccctgactaactaaaattagggatttatatagcagggaagaaatgtaaccatgtgtgggagaacaggaattagggaggggtaaggaagaggaggtactcagcagcaagcagctggtgggttaggcagtcacaatgggtgaagggtctggcctctcattgtccagatgcaatgatctggtgagtttcagttccttgatactgtcttggaagcctgatggttggtttctggagaaaggaactcaaaaaagacaaatgtaactttctcaagtttcaagaccagaagggtcagtttctatgtttattcaaattaaatcataaacatcagttctatgggaccattgagcctgtttcaattcccttaaaccaaagcctaatccagagcagggccctaactctattcaattctgtgaaggctgaaataggtgaggaaactggagaggaaaagtttgaggccagtagaagtggggtcatgaagtttaaggtaagaaacctctgtaacaaaagagtgcaaggtgaagcaacaagtgctgatggacaagctacaagctatccagaagatctaagataattcatggaagtagctaaacaacatatttccaatgtagatgaaacatcttctgttggaagaagatgccatctaggattttcatagctagagagaagtcaatgcctgactttaaagcttcagagaacagggtcgggcgtggtggctcaagcctgtaatcctagcactttcggagcccaagacgggtgaatcacctgaggtcaggaccttgagcccagcctggccaacacggtgaaaccccgtctctactaaaaatacaaaaattagccaggcatggtggtgcatgcctgtaatgccagctactcagaaggctgaggcaggagaatcgcttgaacccaggaggcagaggttgcagcgagctgagatcgcgccactgcactccagcctgggtgacagagtgagactcattctcaaaaataagtaaataaataaattttttaaaaagtgaagcttcagaaaacaggatgactgtcttgttaggggataatgcagctggtaactttcagttgaagccagtgcacattcaccattctgaaaatgctagggcccataggaattatgccaaatctcctctgcctgtgctgtataaatggaacaacaaagcctgcacatctgtttacagcatagcttactgaatattttaaacccattgctgagacccattgctcaggaaaaaaagaaaagattgccttcaaaatatcacatctcatggaccatgcacttggtcacccaggagctctgctggagatgtacaaagagaatcacgtttcgatgcctgctaacacagcattcattttgtagctcatggatcaaggagtaattttgactttcaagtcttattagttaagaaatacatttggtaaggctatagctgccataggtagtgattcctttaagagatctgggtgaagtaaattgaaaccttctggaaaggattcaccattctagatgccatcaataacattcataattcctggaagcaggtcaaaatatcagcgttaacaggagtttggaagaagttaattgtaaccctcacagatggttttgaggattccaagacatcagtggagaaagtaactgcaaatgtggtagaaatagaaagagaattagaggtagagtctgaagatgtgactgagttgctccaatctcataataaaatttgaacagatgaggagttgcttcttatgaatgagcaaagaaagtagtttcttgaggtggaatctactcgtggttaagatgctatgaacgttgttgaaatcacaacaaagaatttagaatactacatcaacttagttgacaaagcagcagcagggtttgagaggatttactccaattttgaaagaagctctactgtgagtaaagtgctaccaaatggcatcatatactacagagaaatcttttgtgaaagactgaattgatgtggcagatttcattgttgtcttattagccaccccagccttcagcaaccaccattccaatcaatcagtagtcatcaacatcaaaaagatattaagtcactgaagactcagataattgttaacactttttagtaataaagtatttgctaataaagtatgcattttgtttttcagatgtaattctgttgcatacttaatagactatagtataatgtaaacataacttttatatgcactaggaaaccagaaaattcgtgtaactctattacaatattcattcactttattgcagtggtctggaaccaaacccacaatatctccgaggttttcgtgtgtgtgtgtgtgtgtgtgtgtgtgtgtgtgtgtgtgtgtaaagaaagatagagaattgactcatgcgattgtaaaattggcaagtctaaaattagcagggcaagctgacaattctggtaggagttgatgttgcaatcttttttttttttctctttataaattttaacttttagattaaggggtacacgtgcaggtttgttacatgggtacattgcacgacactgaggcttagaatctaaatggttctgtcatccaggtattgagcgtagtactcagtgggtggtttttgagcccgtgatccccctgcattgttgagtagccccagtgtctgctgttcccatgcttatgtctatgtgtggtcagtgtttagctcccacttataagtgagaataggcagtatttggttttccgttcttgcgttaattctcttaggataatggtctccagctccatctgcgttcctgcaaaggacatgatttcattcattttatagttgcatagtattccatgatgtatgtgtaccacattttctttatgcagtccactgctgatgggcacctgggttgattccatgtctttgctattgtgaatagtgctgtgatgaacatacgagtgtgtgtgtttttgatagaacgcattattttcctttgggtgtatatccagtagtgggattgctgagtcaaatggtattatagttctgttttcagttctttgagaaatctccaaactgctttccacagtggctgaacaactttgcattcccaccaacagtgtacaaacattccctttcctgcacagcctcgccaacatctgttacgttttgactttaataattgccattctgactggtgtgagatagtatcccatggtgattttgatttgtatttctctgatgattagcgatgttgagcatttttccatgtttgttggccacttacatgtcttcttttgagaagtgtctatttatgtcctctgcctattttttaattggattgtttttgcttgttgatttgtttaagttccttgtagtattgcaatcttgagtctgaagcagtctagagacagaattctttcatattcaggaagctgagtcttaaggtcttcaactgattggaggaaacccagcatgttttaaagggaaatctacttttttcaatgcctagtaatttaagtgttaaccacacctaggccaggcacggtggctcatgcctgtaatcccagcactttgggaggccgagacaggcagattacttgaggtcaggagtttgagaccagcctggtcaaccagcctggccaacatggcaaaaccctgtctctactaaaaatacaaaaaattagccaggcgtggtggtaggggcctgtaatcccagctattcagaaggctgaggcatgagaatcgcttgaacctgggaggcggaggttgcagtgagccaagatcgcactgctgcactccagcccaggcaacatagactccttctcaaaaaaaaaaaaaaaaaaaaaaaaagttaaccacacctaaaaactgctttcacaataccatctagactggtgtttgaccccaaaatgggcactatgacctggccaagttgacacataaaattaactatcacaatttctaaagagaaaccttattagccttgaggaaaaaatgtattaaagaagttctctgccattaattcagtaggcaagatctttttttttttttttgagacataatcttgctctgtcacccagactggaggacagtggcaccatctcagctcactgcaacctccatctgccagattcagacaattctcattcctcagcctccccagtagctagaattacaagcgtgcactgccatacccagctaactttttttttcttgtatttttagtatagatggggttttgccatgttggccaggctggtctcaaactcttggcctcaagtggtctgcccgccttggcctcccaaagagctgggattacagggatgagccaccgtgcctggccggcgacatcttttatattcactgaacagatatcacatatttagtagttcttggcttgatataaaatattgtcttagcaaactagtaaacagaattctccagtttctgtgaaaagcaaaagctgaggtcaaaggcctgaaattataaaatcagaaatttcagtgagttgcatgaaaaaattactagcaaatgacaaaatcgttagtaaaagagccatcttttataattaaacaatgaaccccaaaattcaaaagtaaaaataagaataatgaatcatatgaaacatttgacgtttctccgaagaaataagtctgtgtgccattttctcagcagtcctatgtaaccggggcaacaatcagtagtaattctgtgcaggaaagcagtgtaactctgatcctctggccttttgagtctgaatcttatcttgcctcttacacatgatagctctatgaccttagaccaatcccttcaccccaggaaaatagtatctactttgtaggtgagaattaaatgatctctggcagatgcttagtcccaagtgatcaatagatgttaattgctatgttattttcacattatttttataatcagaaattataaaaagtttagtggtagaattagaaaccagagtcagatttcagactcgggcaatgtatttgtttgttgtcatgtttctcgctgtctccatggattgcagccctgggcagtctcggatggttatggagcatagattttggaatcagctctgtattttggtacctgcaccaaactgctggcaccatggctccgaggatttatctcaggttttgaatccatgtccttatctgtgagaaaaagaaaaacaatgtccacattataaatgtggtgatcagttcattacttaactgattaagtaggttaaatgagtaaaatatgtatgtcgagtatcaacttcataagagctcttcacaatttccttttcttccatttaccataatacctgagcttgggagactgacttttagcatgaactatcttcatagcaaccattaaactggaaaaaacaatataaaacagttatttaacatgtctagaaattgttctatggacttgcagcaaatgaggaatcatttgtccaagaaaatctaaatcatggtaagaacagtgagagtctaaggcattcgaatcactccctgttgtgtcctattacgtcttatgggagccgctgcaggagctctaatccagacacttatggtaatgaagataggagcttccactctcccaagctcctacgctgaggttatggcttctcactgagtcagcaggctgccagaattactcattccaccacctccagcttattgcagacgttctgttccagactaacaatgcagataagagggggctccctttctcaacacttccttacttaaagggcagatgctccagctcaggtgtagccaaccgagaatgctgggccccagtgcttccactctagctgattttagggcagagattctacaccaggagggagaatacatgaagactaggggccccccacctcagctccttcttacacagcaggagtgttgctttggaagaagtggaccactgtcctaatcctagctttaaccattgtgcaggtgcacagaagtcctgcccagagctctacagatctgcttgagaaggcagattttgtttggaacagaacatgaagaatttcatacctaagagcttcgtctgaaagaatagaggtctagatggagagcagttgagagggcgttcgcagctccatgatacagcagcaacaagcaaaatggctaagcaatcagaagtttaacagagagatcaagggaagaagatagccaagaaggatccttttgggatcataatcaatcccagaggttggaaggctgtgcataagcttactaggctgcacccactaatgagcatcagatcaggaggtcaggctgacgtggaaacaatccccaagctgtgtagggatccatgaatatatgctgtaagcctcactggcagcagggaactcagcgcaaccgctggccaccactggcagaacaataagatatgtaacccaggggcaactcatgggaagccaggctaaaaaataaaatcacctatattccttcatatagtctgtctaatagccacaaaataagcacaccagcatcagccgagttaactgcttctaggaccttgtatgtaagcaggcagaaacatttctgcctggtgtactgtgggcttccacctgcccggctggctggtaggctgcctcctctcaggcctttgagggaatggtggactttgacccagattctagagtcccaggtctccttcccagctttgaggccttgaatattttatctgccaccccaatctcaacagtggctcaccatatgtactctctccccatgtaaatttctttagaacccaaagcctcagttttttatggagttcttcttttgcttgaattggccaagactttctttacttccccccgaccaccacacacacacacaattgaaacaaaatacatacacaggccgggggcggtggctcacacctttaatctcagcacttttggaggccgaggcaggcagatcacctgaggtcaggagttcaacaacagcctggccaacatggtgaaatcccatctctactaataatataaaaaaattagccaggtatggtggcatgcacctgtaatcccagctactccggaggctgaggcagaagaatcgcttgaacccgggggtcagaggtttcagtgagctgagatggagccactgcactccagcatggatgacagagtgacaccccatctaaaaaaaaaaaaaaaaacatagacatgcacatacacatatacagatcctcactgtattttatctctaaatatttcagttgtcttggcaaagcctagagggagaggagagctaggagtatgaatttaggcatacatttttcctgtcttccatttctccttttatttttattatagattattcttatcatgttccatgtatcatattatcacaaaccagatgaaattcactttggaggcaagatttggaggtactcaaaaagttgttcttcattttccagccttccatttagccctttgacgttgagacagaaaatacacggggaagtttcatttctatgaatatatcaaaaggttcctaatccatggaattggctggtgagattctgtttttatctcagtgatgctgtaacagccagacacaatttagttttactttacaccctgtggcaggagatccactgacaaattggtgacaaatttttgtgcttgatttttaaaaatggttgagagttatttacagataattgtgatagctgagttgggctatcagatgccttaaggatcaaagaaggatcatataataactgaacagccttttctgtaccaaaagagaagtttcccagagcttttgaggcaatttggcattccatatgctcaccaaggttatcatgaaagaaggcagggctgcgtggtggacaggacgctgacatttcctcttagcctagctctgccactccagaattacaagtgagtaaaccacagaaagttccccaagttcccgggcctccacttcgtcatatgtaaaaaggaatataacctcaccctttctttcatcctccagggctgtaggaatatggagtaccttgttctttgcaaagcttcttcaagtgtggctcctaagaggcctttcttgaaggcttattcatgtgaaaacattttgtaaacctcacacacacattatcagcttgctttgaaaggaattatactcatttgtctttacattctagtacattttttaaaacatcttgactcttagcccatttaaaatggataagctgaacttttatcaagaaaataattagaattgtcttctataaatagtattaaaaacaaacaatggtgagtatattttttaaatcaagccagatcatttttcatattccatttgttagcataatagttttaaatgtgctaattctgtttattcatgcatttttgctattaatctagaaagtggaactttgagctcctttttcacatgagcaaaactgtatagctttcgaataaatggtttaactgaactctgcagttctcctggaaagtaaggcggctgggcagatgagtcttgaaccatacccaaaatgcaaatgcaaagcagatgaatatattctcatcttcagatgatttcactgggcaagccaagccatcatattgtattacaagatggatttcggcagaatattgttaaggttggcttcatccccattgtgtgtgtttatgtcagcttctgcttctattttatttttaattagcatacacggctttcttcaattatggaaaagtatcaccagaccaaatatgattgtttttatttcctacagagtcacttaatgtctatgtcagctcataggcagagaatgtagaaattttgaatttgtctaataaatgtccattcctttatatttaaatttaaaaaataatgagactgggaatgataaaatctgctttattacttaatgaactaaggctaacttgaaatttttcttcagacttttttcttctatttctttaaattctacaggtaaaaactatattttcaggtgaaattgacttttgacgtagaaaaagaaaaggttttagaaacacagtttgttccagctatcagttgcattgatttcactaatttaattctggcatcaataaagctagtagaaatgactgaatgtaaagtttgaattctattgcaactattcagttagatagcttacccttgttagtcagttgaaggtgacattctggacaaaggaaatcagggtgagaaaggtgtacaccctctgtgagtaatgacaaacaaagtaatgtgtatgaactactcctatcattttaaagcaattgttttctaggaagtttgtgacttttcctacagattaaaacatttagtttaagatgtttatatttttctacaagacatacatgctattgaaatttttatataaaactttaaaaatgcctaggtgcagtggctcacacttgtgatcctagcactttgggaagctgaggcaggcaggtcacctgaggtcaggaattcaagaccagcctgaacaacatggcaaaacctcatctctactaaaaatacaaaaattagcctgatgtggtgacaggcgcctgtaatcccagctactcgagaggttgaggcaagagaattgcttgaacccagggagcagaggttgcagtaagccaagatcatgccacatgtttcaaaatagaagtctttttttttcctccaggagctaaagatatctagaaagattatatataactaatcttctgatgagaccgtaagatgatagtgaatttgtttaataaggaagcaaatagcacaattaaacttagagaattaataagtaatgtgctttatttggacattattatgtgataaagattggactgtatagtttaaaaatgtactcaatggatctcataggatcttttaaaaaatattcttaaagagaatacactacattccctctcctacttaaataatagcaaggcaattggaaacaaccagtaataaaaggcaagaaattgtaatggaagaacgcatatttgtagaagaactttaaatcacacattttaaaaaataaatactatttctgcatgtaatattgcttaagtggtattttagcaaagccaagattgtataacaaatgagttgaaatggaaaattaatctttcatgcaaaataaagacaaaaaaggggaaagaaagaaagcggaatgtgggttccactagtttcatacagtatgtaactattcatttgtcacaggagagaaaatatttaatcggttctgaactgatgcacacatactttatcatgtttagtgacttttagagtgtcagtttgtaaaatgtttatccaaggaatggacttctggcacatggataaaatgaaaagtgaaatgtttagttcataataggcatattttccagaatctttctgagtaactatccggagatgaatagaaagactacaggtctgtgtttatctggcttaggctggccgaccaggcaggctccagcctggtattaaaactgaagtgacatggaatgtctttgcaaaagccccaaacaatgacatcattcccttaataatattgataatgtagaacaaagttagagtttgttatttcccaatttggatttcttagttaactacttctaatcctggcagaagatttactgtctggaggcccagcagagcaaggcttcccaggtggaaagctgttgtttcatgccttttattttcgggccgtgtggtaagttttagatacagcaacttttctttgtacaaatggattttcttctgtggctacattatccaacttttataaaatccattgactttcaacagtaggggagcccatgacaccctttgcagattttctggccttggaaagttatacaaaatctgaggtggagatcgctcctgaagtttgtttgttagcgttagcgcttttcaagtagaaggatttcaggattttctgattatgagaattttaatgtttttttccagtcttggttgataattataagagaaacatcaaagaattcctgccctttggaaaagttatgttgtaaaaatggaagctttcctttgtataaacttgagatccttcccaccccaatatttaaaaatatttgttggcctagaacagactaaactgtctccagaagctatgttctccaagttaacagaggttagaactcttaaacttttgtgccctaaaacctaaaggaagagtaatgaaatcactgtgtgtttgccggggattctaatcaccgtgctcttgaaatgcaagtagggcaagggctggagagggcgaagataataccagaaaggaaggatatactattttgtctacagttttgttttttaaaaaaatagaaagtagaaaggataagggctagcaaatgaggttatgaagtgtctttaggccgggcgcggtgcctcacgcctgtaatcccagcactttgggaggccaaggaaggtggatcacctgagctcaggagttcgagaccagcctggccaacatggagaaaccctgtctctactaaaaatacaaaattagcagggcttggtggcacatgcctgtaatcccagctactcaggaggctgaggcaggagaagggcttgaacccgggaggcggatgttgcggtaagctgaggttgcgccactgcactccagcctgggcgacaagagcaaaactccgtctcaaaaaaaaaaaaaaagaatgtgtttaactgtagtatcatgttccagatccattaggattgtccatcttgagaaaatacgcttcaagcaccgcagagattccagaactcaatagttaaataaattgagtctacaatcattgttcagaggaagaaaaaaatttttttctaaggagaatgaaagcatgagttagtgatttatatctacgttttataaggcaaatcagaaatcagctttagaagattgtcattagaagggctcatttgcctacaagttacaaaggatcaattcaattacattacacgcccaaaggcatttctcagaggcctccagaatcccatgcaaagggaagcagcctcaggagtgggggaagcgaagggaagcagcctcaggagtgggggaagcgaagggaagcagcgtcaggagtcggggaagcgaagggaatcagcctcaggagtggggggagcgaagggaatcagcctcgggagtgggggaagcgaagggaatcagcctcgggagtggggggagcgaagggaatcagcctcgggagtggggggagcgaagggaagcagcctcgggagtcgggggagcgaagggaagcagcctcgggagtgggggaagcgaagggaagcagcctcgggagtcgggggagcgaagggaagcagcctcgggagtggggggagcgaagggaagcagcctcgggagtggggggagcgaagggaagcagcctcgggagtggggggagcgaagggaagcagcctcgggagtgggggaatgggtcagatgcaagcacagaatctcccccatggcggcgtctagtgcctctgttaagatcgcgctctgagaaacaacgctggcattcaaatccaggtatagccccttttattttctttttcagttttctgactttggggaagttattgaaacttctgtatctccattttcttgtttctaaaatgagggcaatggaacggtgcgtggctagagttagcatattataattacttgatatcattgttacctgatgtttattgtagtgacctgccactcatggctctagtttgaattttcttcatgggtgttaatgcaaattctcaaaagggtgaatgtggttggttcctagataggtaatataagctcatgaaggataccagctcccccagcccggtctatagttgagacaagttttctaaaatcaatgtaaggaaggaaaatggaacattaactttttggggagatgggaagggctagtgaaacaatcaagcttacagatataaccatcctgaaaagagaaaatttggagtatattgagtgaacttgtttaaattgaagttttttcattgtgagagcgttacctcgagaaacgttcgtcgtctcattttttgttgtctactccggcatgcatcacatgtgggtaaactttaaaagtagcatgaagaaatgttttggctgatttccctaccatttgtcttgaaagatgatgtaggtatgggtttggaattgtagaaattacagctacaatactttttttttttttttaagaccaagtctcgctctgtagcccaggctggagttcagtggtgcgatctcggcttaccgcaacctccgctgcccgggttcaagagattctcctgcctcagcctccagagtagctgcgattacaggcgcgcgccactgcaccaggctaattttttgtatttttagtagagacagggtttcaccatgttggccaggctgttctcgaactcccaacgtcaggtaatctgcccgcctcggccccccagagtgctaggattacaggcgtgagccaccgtgcccggccacagctacacttttcttgcaaagttgtaatcggggttggagaagggaaatgactgattccagcaccgttgaagtcctgcatctgcagagagtgtcaaggagggagatagcaagatctataggagattaattaattcttccttcatttgttgtgagaattcaatgtgatcacatgatattttacttaataccataactaaccatgcagtaagcatataataaatgcagatttgttcccctaaagagtgtgcattcttctacctttcaaacagcaatttatttcaaaggtccaaggttttccacagttcctctcctgcctgctcctcctccaaatgttagcccatttgggtgagaccaaggtcacactcccattcctggtcacaaagtctcttaaggagaaatgttagcatatttgcaatgaaaatatgttttaatccctctagtaatactgtggcatggaaagttgcatctatactgatttttgacagagaaagggtattactggcacatgaaaccctagatgagcatgaataaatgtagatttcgcatcctacttccagaaaattgccaaactctattgtatattatttaacccactaaaacagctcccaaagttgactaggggttatttttaaatggtatgaaaatatattcttacaaaataatttacaaaatcttttttgttgtttttgtttgtagtcttgacattgttagcaatgaatcatgagtttttcggggaaaaattgatgaattgatcaaaattatctgatttgaggatattgcacgtaagttaaagagaatagggatatttgacatagttttcaaaattggtctaagaaatatttgagcaactaggccaaacattcttgatttattctaagtcttaagtagattcttaagtctaagactctaccagaaagaaaaggtagaatgaaaaaggcaataagaacaacagagattagaaaataatttcaataaacgggaaaaaaagaggaaattagaaagaggacataataaagacattgtgatagctacttgttcaccttgttttattctaggtttttgcagctgaatatccaaagtatcatatcccatgttttttttctgaactgcaagttagactttaccattttaaagttgatttttatttcaagcattcaatgatggttgaaagtatagtttaatattggtaatataggtactttgtagtcatttatttagagaaattaaagtatggatgcattaaaataaccataaaattatttttttaatattcaatctatgaatcgaggtgctgattgattcatagtttatgaatcaataaactatgattagtttacacgaaaaaaacttagattcttgagtttctcctgaagcctctcagattctccagtggtgtcttaggcaaaacaaaacaaaacaaaacaccagtgccttataggttgacaagcgtattttcaaaatctatattcagggctttctaatttctgttgttgtgagtgttttcaaaactcgtgcagcttagccttccttttcccctttcacatcccatatgctcctggttagacatgcataaattaacataacatcccaaatctctcaactgtatttgaaatatttgttttgtccggtgccctatttaagtggctaagccgtggtctcagatatgagattgtagagtttcaacttccttttctcttatttttttactttttatttttttgagacatagtatcactttgctgcccaggctggagtgtggtggtgggatttcagctccctgcaaccctcgcctcttgggttcaagcgattctcctgcctcagccaccaagtagctgggaccgcaggcgtacaccaccacgcccagttaatttttttgtgtttttagtagagatggggtttcaccgtgttggccaagctggtctcaaactcctgacttcaaaggatcctcccacctcagcctcccaaagtgcagggattacaggtgtgagccactgtgcctggtatcaacttcattttaaaagctacctctatacttagggtgtacgtttgcataagacattttgcatttctgtattgttaaaagtgctatttgtaaataatactgtagaaaatgtgaaattattttttaatagattacaagatatgaattcccaatgtaagtaagtggggtcaaatgtcttttctgtcctttccagtaacatatacaggcacaattattcagcattgtaatatttgtgtagactccataaattatcctgtattgtagtattgtagtattttaatagactaaataatgcccaaacaataaggaaaatagcaagatgttaaatagtgataaatctttattgtctttattggtttactaaatctatagtcagcaaatattacatggaatcagacaatggcattttaaaaataacctattatgtatttcagggtcaaaatgtactagcagtgtgaggacatgtatatctaagtaatttttatattaaaatgttttaaaaatcagtagccataaataattacacactttagtactcttttgaccaaaaaagctagtttttaaagaaaatgtcaaaattcaacacttggtagcttacttaaggtataataagctgaacatttgatgcaaaataaatttagtgaagttaattaaaagatgtacagcaaagttagtaaaagatgaaatatactgtctcccagataacagtacataaatctgaaaaaaaaaaaatagaaggtttatagctagtggatatttaaaaaacatcttaaatgtagaaaaatacaagtgtttcttcttttgtaatttttaattccatccaaaaatatatattcaagtcccagatcagaagcaaacactattggtaagcttttctgtttgaaattcctctctgagtggatctaacgatctgaaaaattgaaaatcagtgacagctgcaaaattgagacaatttgcaataattgaagcaaacttttaaaatccataggggcaaactcagccttaggattataaggttctgctagaagtaagatctggatttctggatttccagaatctagacgaagatctagatttctagatttttttcctcagatcatcaaccaaataaattccaaaaggattaaggaagtaaatgttaaaatttcaactttaactagaagaaaatattgagaaattttttgggatttagaaattgggatttttgtcagcatcatagccacagaatattaacatttgtttctatttctgctacttatttctaagtgataaattgtctgcttttctgagcttattgttatcgtcgtgtttttacacatgtatattgcttcttcagttcatttccctttttattcatttttatttctctcaaagttgtaagtgtagacatagttgcaaaagtcaattagtaccacaaggctgataacaaaaagcagcagcctcctgccctagccaaccctaccctctcttatatttttctcagctgttttctctgatactttctaccatggttttcagtaacatacttgtgctgatgtatcattatttatcaattaaggcattttctgttaatttatgataatggttgatgtaatttttatcttactctttcttagtccccatcctacttcttcttgtattacaatttttagtcaggaaggttgtctagaagatatacaatataaattttcagacacgcaagttctcaaaacacttccctcacacttatttgatagtttgtctagacatagactcctacttgaaaattattttcctttaaataattgaaggaattacttcattgtcttttagtcttcagggttgcttttaagaagtctaactacattcggccgggcgcggtgtttcacgcccataatcccagcactttgggaggctgagacaggcggatcacgaggttaggagttcgagacctgcctgaccaacagggtgaaaccccatctctactaaaaatacagaaatgagccaggcatgctgtcacatgcctgtaatcccagctactcaggaggctgaggcaggagaatcgcttgaacctgggaggcggaggttgtagtgagcagagatggtgccattgtactccagcctgggtgacagagtgagactccatctcaaaaaaaaaaaaaaagtctaactacattcttattgacatttccttgtgtttgatctgttgttttttttttttctctgagaagcatttcatgttctctctgttggcgtgaaaacatagaacttagggattgcttggtgtgtgcctttttgtttactctgctggaaagttttttctggttggagttccatgtccttctgttttagggttggtcacaaatgatccttaggtttctgatgtggatgattaacatagcatttctaaaattgaaatgaggataaaatgagaagtttgagatgggtaataagccagccgtgtagaaatgctgagtatttggttcagtgttcaagtccgaagctcaggagtgatgtggcaggcggctgaactttgtacatcctcaatataaacagataggagcagaaagagagagtccacgtgatcaccttaggagatggtgtccacagatgatcagcggcctaagaccgaagccatgagaaataccatatttgagttgctgctagtggaaaaggatcacataattgaagagggatgccaattcaaagtgaaaaggggagaaataggagagtgttacattacagaggtctaggtaaacaagggtagcagaaaagctcaagaataattacaatgtatgcctaaagacaaaatattaatttgtgatattaatgggagatcatatgcacccttaacaaaaattgttttatttgaattttgacgcactttgagtaattgggtcaggagctgtattgcaacggactgaagaaaataaggaaatggaaactgaggataagctacttttattagatatttggagagggaaggaagaagagagattggatggaatgtagagggagacgggtggtccattttttaaaaccacttttggttgctacacatgaagatccagatatactgaaggccataactggagagaaaatctgccttgtagggtagacaattattgtagtcacaaaacacaagaaaatgatgatgtagctaactagcagcagtgaggcagtgaagcagttgagtaaagtgtaagtgatgccagaaactttaaaaaaaaaagtgtgacagaattataggaatacagtggttgggaacagcactggaagaccagacatagggaggctccctttcttgattcctgaatttgggagggtaggagatgggaaatgcaatgcttccggagaagatcattatggatgatatgagtgtgtctggtgaaagccatgctttgattaagaaacagtaggcctggtgcggtggctcatgcctgtaaatcccagcgctttgggaggccgaggcgggtggatcacgaggtcaggagatcgagaccatcctggctaacacggtgaaaccccgtctctactaaaaaatacaaaaaattagccgggtgtagtggtgggcgcctgtagtctcagctactcgggagaatgaggtaggagaatggtgtgaacctgggaggtagagcttgcagtgagccgagatggtgccactgcactccagcctgggcgacaaagcgagactctgtcaaaaaaaaaaaaaaaaaaaaaaaaaaaaagcagcaaataaacataatagagaaggaaagtaggggtataaatgtccttgaccccaaccaaataatcaggatccagagggcttcagaatgaagttggtagagctagtcagtgggtggtttttatggaacccgatccatgggggtgtcattgcaaggagaagaaggggagttgggcttgggaaggagttatatacttatcggtgaggaagggtgggttaaaggctcataggagtgacatgagaactgaagagcatcctgggcagaattattttagtggctagtgccagtaggtggaccaactcatcatgaaatgttgtagctcagcttctgcatcttgacctctgagatatgttggccttaattggcttaggaaaggctaatagagatcctgacttacatttacactgagagaagggcttgtttcctttgggtgagagagaatatgagtacacacagttaaagaaatagaggggcattgtcaggctggaccagagaacatagaaactcagtcaaagtgccccagtagcttacaatggtgtcttcttggtgacattgtcttttcatgtttggacatcataggagatgggccctgtagattcggactagaagccaaagaatttttctttatgttataaactgcattcgtgccttcaaaaatgttaggatgccaaagaatctaattagcttgcaaatacttctatggtagtgcttgttctctgccttaacaactgccgtgaggctccttgctcactcttataagaaagatattccactcagtgtggcaatgctatgcggttttcaacatgccaggaatatcttacaaatatcgttgggctagtgaaacagagatttatccaagcactgaaggaacatttttaaaatgccaaatagtatgtgatgattattattttctttttttagcttcacaatctctgaatttaccccagggtgaaatttaggtttgtgtggacttggttgtggtgagtgcctcctacgtgagaaagggagttctgtcatagttctgattgtcaatgtcaccgaagctaaggttggatcgtctgtgccttttgtatctatatctaagatgaggaggggctgcagggctttggaggccttagccagctggctctccccatgttctggtgatgaatgggtagggtcattcttagtacccattttgcaggtgaggaaatgaagagagagaacttcacgtctgttaaatgacttcaccagtattgtggagtgcggtagcacagagccgagaatggaattcaggccttcgtgaaagctgaatgctttgtgagtaatagtctgctctgcaatcctggaattcaattacgaaattttaaagccaaaataattaataaaatattggcatttgtagggatgttttgctgctattcagttctgccaaataataatttgtcccttttttcttatcgtgtttctgccctgcctaccatctaataaccttctaaggataaaactagcaacagatgttaaaatactttgtaaactgtatggcaacatgtaaataggagatattcacactggtattatttacaagtatatgtgttttgttgcctttaattatatcagtgaaaatgtaaacagatgaaaacaacacaaatggtacttgtaagcttataaaaatctactattttgaccctgtggtggcagagttttatatctagaagtggaacccaactgtaatagtaaagtttgttttttaagacaagtgggaaataggtcatatatcagaagaacttgcttgtctaggataactttatacatctttctgaaaattgcatttgagaataaatgtctgacattagaaatgccatcatctccccaagaaacacccttagcattgatgcagcttagcagaacttacatagcattgaccacaaagcatcctattctgaaaagaaatggctggaaaacttttttaaaaatatgttgaatagcaaagtcttggaaccaacccaaatgcccatcaatgatagactggataaagaaaatgtggcacatttacaccacggaatactatgcagccataaaaaggatgatttcatgtcctttgcagggacatggatgaagctggaaaccatcattctcagcaaaataacacaagaacagaaaaccaaacaccacatgtcctcactcataagtgggagttgaacagtgagaactcatggacacagggaggggaacatcacacaccaggacctgtcagagggtgggggcctgggggagggatagcattaggagaaatacctaatgtagatgaccggttgatgggtacagcaaaccaccatggcacatgtatacctatgtaacctgcatgttctgcacatgtaccccagaactttaagtataataaaaaaaaaaaaaattgaagtctccacctgatgttggtaatctatcacatgtgtataatgattcttgtaatatctagattatgcagcacctgcactcggtgtaaaaacaatactgttagcatcttagagactcagcttctgaggaaagcattagtcataatacacctagaaggtagtaatgataagcatttaattagaagtaggcctgaagtttgcagtgcaatgcagtaagtatttaccgagtgattcatatgagtaaggatgtgatagctgctataagagctgcaaagtttattaagatacatccctgtcctggaaacactgccagcttcgatgagaatacaacaatgttagatatattcgttttggaagatacctttcccccagttattttcatttcacagcttctccagcctccttcagcttctattctccctctttgcttttctgtctcaattttcctgcccagccctaaattcacagagtaaatccaccagaccagagccccttcctctttctgtatgtgaaactactcctgcacacatcagtctccttttctaccaccagcctgggggaagtaactcctcccatcagtatctcatctggatacttctctctcctgatttcaacttctcccttctagccattaatacatttactttattatcataaaataacgacttaagaaagaaacaaaaagcaattccttgcctgtacattccctttccactcttttttttttttttttgagacggagtcttgctctgtcacccagactgcagtgcagtggtgcaatcttagctcactgcaacctccacctcctgggttcaagcgattctcgtgcctcagcctcccaagtaactgggactacagacgtgccaccaccaaaaattagacactggctaatttttatatttttagtagagacggggtttcgccatgttggcccggctagtctcaaactcctggcttcaagtgatcctcccacctcagcctcccaaagtgctgggattacaggcgtgagccaccatgcgcccagcctccctttccattctttgtagccaatcttctcctcctcattccatctgtacttatgtcccttgttgatatttatgttatttaatcttgcctcattttctgattttgtagccagtcttttaggatgtttctctattttattggtctttgaaagaaccagaaattttgatttgttgattatctctctcttctttttttttttaagttgtttttttaattggctttctatttcacaaatttctgctctttaatattctcttatttctgcatcctgtctctcctggctttgtccgttgtatgaatagttcatttatttttaatttttctttttttaaaatcatatactcagagctctagctttgccattaagttcactttaacaatatcccactagtttttaaatgtagaatagattttattgttgttcagttataactttgttattttctctttagctgatgagttacttatgtgtatattcgttgtgtctgtttcaaatgcatgggttttgtgtgtttgctttgctggtaattattttcctattgatttacagtaaattgtattacacttagtttgggatctagtatggaacctgtcttagtaaatatttgtatgtccttgagaagaatcagtttgccctgtgtgtgattctatgatatatattctcatccgcatattttctcaccctttaacatctctgagactggggtacgtcttacagtggatggcatcttataatcgatgtgggctcgatttaaagtcagcttcttccagagaggatttggatttgtgtgtgccattcaactgaggacactatcaatgtgaagctactttaattaaattccctgctttagcttgagagggttttgttttgttttgtttttatagggcctggtactgtgaattcagatggaaaacctgcatgatttctgtctggcttatgagtcatatttgcaagggaactttttttggtgtcatctgtttgcccagtgccagagttgaaacaagtttccttactgtccctttcagcatgggaatttctttctcattttcttttacgtgagtcctttggtatctcagtttatggtttgcatatgggagcaactcctctattaagactcttcatattggactatttgtctttcttagtggtacataaaatattatttttaaaatccatgacctgctaaataagtgaaatacagcatattttaaaataaaatttatttatcgtaaatttcacatctacatcattactaatttgtagaatcttctgctataattgtgaatgtttgtttcatctttcaattccatgacgttttcagacaatatactctatatggttcttatcatcctgatggaatgttcttttttaatcattatacaatgtccttttttattgtcattaatacacttcaccttataatcctctattgattaatgcttcatcacgctttcttttcacattttcctggcatatattgtccatctatttatttttacttttctgggctatagtgattaagacatgtcatttgtaagcagtatttattttatctgaatttttattttgatattcaatctgatagactttgtttaatagttgttttaaattcttttatatttattatgattttttttttttttttgagatggagtctcactctgtcgcccaggctggaatgcagtggcacaatctcagctcactgcaacctccacctcccgggttcaagtgattctgcctcagcctcccaagtagctgggactacaggcgcccaccaccacgcccggctaatttttgtatttttagtagagacgggatttcaccatattggccaggctggtctcgaactcctgacctcgtgatcccctcacctcagcctcccaaagtgcagggattacaggcgtgagccaccacgcccagcctattgttgatgtatttttatttattgctattaacttagtagtgtgtttttaagtttccaaacttaagggattttcgaagttccatttctttcttaattacataaaggttacataaaagaagactgtctgcataagaataattctttgcattttttgagatttgctgtatggtccaaaagatggccaacgtgtataagtatacacagtgttccagtgttggatgtagtgttctattttattattttaaactgactcttaaatattcagtatctttcctgattttgtcagcttctctctgtcagttaccaagagtgtatagtaaagacttatagctgtgcatggtggctcacgcctgtaattccagcactttgggaggccgaggcaggtggatcacctgaggtcaggagttcgagaccagcctggccaacatcatgaaaccccgtctctactaaaaatacaaaaaattagctggacatggtggtgggcgcctgtaatcccagctacttgggaggctgaggcaggagaactgcttgatcccgcgaggcggaggttgcagtgagccgagatcgtgccactgcactccagcctgggcaacaagagcaaaactccatctcaaaaaataaaaaatataaatataaataaaaagacttacaggcagatatgtcagttactccttacacttctgacatttttaccctgtgtattttcaaatgctttcgttttatgcctacatatctagagtttttcatcttcctggttaacctaatcttgttttcagtgctatctcttttctggtaatgctttttgcctaaatttgtactttgccttatgttaatattggtacatatcagctctttttggttcgcatttgtcatagcacctccacaattttactttcaacctttctgtgtccttatgggcaaaaaaaaaagtgtgagggttattcctcaaacacctgagggcatcaatcccagttgtgtacccagagtgggtgattgaccactacaagctgtacttttgccaggattccattacttctgaccgtgtaagctcccgcagtaatggaagtggccatgtggaagctgtgggtctctggaaatcagtgtctcctcagaccctgtgtcctgtggccctcgagacatctgagtatttcccttttgcactatacagtctactgagtgatggctgcaggtttctttgtagaaggactaggggaaacattacagtgtatccttgctaccatgtttcagggtccttcctcacagggatgcaattcctttggtcagggggtcctggatctgaaattggctcagttctgggaactgatcaaggaatcatgattttctatagagcagccacctgtagcctcctgttttcccactcttgcccttttctgtggtcatagaggttgagcagcacacttgtcatttgcccctaaggatgctatgctccactaaccatctccacaatccgctgagagtcaggcctccttggctgccccttggctttttggttattatggtaattgtggtacccgggcttctggtcattgagctttaccacttggaccctattatttaggatcctatcatcccagtggattttaatgagcccagctctgcaacctcttcctacagagaagagctccaactgcactgttcagtgatgctgatacccctcttcctgatgcattctttatggcctctgggtggggcctctgggaacttccatggataatcctttgctcagtttttctggactcacacaatgcatgctggtgtgcctacttctctcagcttccacattccttcctcttccatctgccagggcaaccccagcacacctactcctctttaaattggctatcactcagaagagacctataagagaagagcctcttcctgaatcgctccactacatggtagctaattcttgcatcaccttccatatatgatctcttaccccttttcaggcctagcacttccctagctgggtcttccagggatgtctccttaattgttgtcctattgtcctgcagccaagagaagagctggtagcttctgagggggcgggccatttgttgcaaggtgtgatggtgttcacaccaggacatttttactaaagatatcacctgagctaacctgataaaatgtgctggtgtggatgccgtcacagctggtgtggacaccaggatattttatcagattagctctagtgatgtcttcagcaatcacatagccaccgtgtgccagagactgcccatgccccacattcccacacaggacagggggccggtaagagaacctgtcccagaactccatctcagtcccggttctcgcagactacttgtgctcctgctgttagttcaggttctacaaaaagcaagtgccaagattggatttatttggaaaaacaggaagggagccagaggaagctgggacagctgttagacctgatgcaggtccaacctccatggaggagagggaaggaaggaaggctgggtgagaaaagtcttggactgcagtgcaattataagaaagttttgtcgaagccaatggggagtccttgagccaaagtcccctttagaggagtcttgtgtctgtaggattgcacttgtatcagtattcttgcagctcactcactaccctgaaacaaacctagacctccgtgcaaatgaagtgattggtttcagagcatggcagccaaggcccttggccaacttttttttcctgcaattggaaatgtggaagatctgaaaggtgtgtacctttcagatggtacacatctgatgctatggaaatgatacatttcatttcgtttaattttaatgtctacctttaaattaacaatatttatttaacatctttgtcccttttccagataatataacacgttcaaattacctaatttttattgccaccattctacaaattgttgaccaataatttaggtctgtctgttttatttttgtgaaagatgggagatcggatgtctatgtttatgttcattttttcttagaatggacatcaaattttccaacaccgtttgttgaaaaaactattctttctccattgagttgcctttgttcctttgtcaaaaaatagttgactatatttgttttgtggggggtgtgggtttggcctggcaataaatattttaatttttcttgtttcattttttattatgaccaataattttcaagtttatttccttgtttgtttaaatacaaatctaaaccacaagcaggtacaaccaagacattttatctcatatttacactcctgtcagatcctcttccaatttgatgaccactgaccaggctagcaggggatgggagaacattttcttaggtagcagtgttgtgaggcctgtggtgggggtgggggaaatcaaggacaaggacaggctctcatacctgtttccacatttacctgggaccaggatgggcaggagacaccaggtcatggctcctgagcaccagcttcctggtttgaagaggcagagagtgagaactggacctgcatggggagagaggagagagccacctactcctcctgcagttggctatatttttatgagtctactgggcactctgttctacagtttcattgatctgtctgtctgttcttttgccagtaccatgctgtcttgattactatagctttatagtaactcttgaagtcagatagtatcagtcctccaacatcattttgcagtatggtgttggctattccagatcttttgcttttccatataaattttagaatcaattgttgatatctacaaaataactcattaggaaagtgattgggattgaaatgagtcaataaatcaagttgggaagaactgacgtcttgactactgagtctacctattcatgaacatggagtatctctttatttagttcttctttccaaaaattgatttctttcatctgagttttgtggttttcctcatatagatcttgtacacattttgttaggtttataccttagtattttattttttggtgatactgtaagttatataatttttatttcaagttttaattattcagtgctggtatatgggaaagcagttgagttttgtatattgacttgtgtcctgcaaccttgctatatttgtgtattagctccgggagttattttgtagattccttggcattttctacatagacgtattagtcttcaaatagggacagttgtatttctttctttccaatgtgtatatcttttatttccttttttgtcttattgcaataaatataagacaaatatacgctgactataatggtctgattcctaattttaggaacttttcttagttacttgatctttgggatcagcatgggtctcagcttacattgtccctcaaggccagtcagtacctgaaaatgtgtcacttagattttcaaacttctcttccaccttttgtatgaactaatacttgttcttgggttgaattacctttttttctaagagcagttggctgctctgaggtcacaattaccctgaaggtgtaagtaccacagttcttcatttcaagataaaagaaatgccagtttatcctcttaccattctgaattcctctgattttttcattgcctgcaacaaactgagtgttggcataaaaatatctttgtgctttttagaagacatggaggatccctcaaaggcttttttaataataagtgaaaggggatttattcttccttattggagtaataaaatttgttacactttatgtaagttcctatggagggtgggggaaggaggtggaaatgaagacgatgatttaggattccaaaaattaaagttacttgtggaaggctttaactgaaaatagatcttcctcttgagattttagtttgttctgaagaataatattacaaaatccaacactgcacaataaaaaacgcaaaagcaatggaagatttatgatgatgttcctttgcagttcgtttaaactggtatgctctcttggcctcgtctgtcatactgagaggctttatgatcttggttctgcctatatggattaaattaagttatacatgtgcaattctcattctgcctgtaaagtctcatttggtactcagccttttttgctgtactcccaaaggacaatgatattgggagaagaaagtagaggaaaacatcacagaagaaccagagagaaaggcagagacccccagggtgtatttagattgggccagaactgaattgctgactcgccaaaaggccagtccaatcatagatgtgtgcataagaaaagacctcacgagtcccttcatgtctacccttcaacataaacatcacagtgtctcaaaatagccagaactgctgcattgacagttgagatagggagggaggacattggtcccaaggctggttggcattcacaatagagggagaggaaattaataaatgatctgttcctgtctacacaaagcttggacaccccaacagaacataaaaacaactcagatctgaatcgtgatgttagttttactgataactacaggtatgtttgtggtgggaggaaagggaggttgaattaaacaaatttatttctttcagcatgtctctttgcttaactgttgattctgatacgtctgttaaacaggtggcaggaagctctgtgtctgtgtatacatacataggtgtacatgagcaacatgtcatgaaatatgaaatagagtcatatgaaagagtcaaaactaaaggatataatttctgattgtccatcttttatgtgattccagggaaaaagattatatttttatttccatataaataaaatgagaaattctcttggcagtagctactgcagactttcttctgagccaagtgagatagactctatagataagtaaggagaaatgggtaagggtgatcaagtcactgtggcactggcttgctgtactcttggaaaccagacatattgacatcagttttaatttatataaatgccatgagttatctcataattatgtggggatatgggaatgagggaaaggaattgctttccttaacttctctgtatgaagaatagattccttgtcttatcacactccaaatacaccaggatggctaaagaaggctcttttatttctggctgccacactgataacagaaccttcactcgtagaccttactgtggacctggcatccccataaggatgctcacaggtgtctgattgggtaggaagtactgtcattcttttataaatggggaacaaagctcaaaaaagttatgtcgacaaagctccaccactctgggttagagacagaactaaatcttagttatccatattcaaagtccacagaagacatggcttgaggttaatagactgcttctaatacgtagtcaaaaaatttgcctccagaaatgtctaggccccttgttcaggagacagtcattctttaagtaaacattcttcaaacaactcctgtgtgccaagcattgttcaggtgcctgagaataaagccatgaacataaatgctaaaaattccttaaagaggttaaatcctagtggagggagagccatagttatcacacatagaaaatatcttgtgtttctgatggcggtcagtgctgtagagaaaaggaaggaatattcaggggtggctgttgtggaaggttgggccaagtgttcagcttttactttggcttctcatgaggatctcactaagcaaggatttgaatgaggtgagagagagagagagagagagagagagagagccgtgagacacttgggtgaagagcattccaggcagatgaaaaacaagtatggcatcaaaacgtcatgctctgtgaggccagaatgacagaagcgaaaactcggtaggtaaagatgggatattactgctctagttggaatgggaagcctctctggcatcagctagccaaaagtaaagtaaaaacacttatgattctgaaagtcagctcatctttagcttactccccccaccccagttgcttttgtggatccattctttttttctatactcagaatcatttccggagctacctgccacacatcaaaaggtgctctcttaggttgtttagatatgcttctggttgtcgtagaataaacatgagacagtgcttatcattttctgaacaggatcatgaaagggtttaccctgatcaggaaagggtttctccttcttgaagcatatatttggtaagcagagaaactgttgagaaggagatccaagattgagagcatatggtaatgtctgccagcacgtgaacctgagggagaacgtggtgaatggctttgttctgtaccttgactctttgatttgttgacccattaggaatgtttttcaagaaagtcatcaaccagagcttacacttttctttgtcttcactctgccatgagtagtgcctggcatatagttactacctgctccctgatgaataagggcaaagctgtagtgccctcttctaagactacaacagagtaaacaccactaaaattactggactttaattcaagattttaaataatacttgaacgagagtaaatcctgctcatagatgggaaataactattggtaataccacagtatgctatttaaatagtgtttcatttgcagagaatatgcttctccaaagagatcataacttgtggcaagaaaatgctattttaggataattactagcacctcttttggttgtaataaaaaccaaattttgagtcattctttatgtgcacaattcccagacagagaattgccttaaaaacagatgagaagttgaaaagaatataaaatagttctcggtttgtggtatggcctcttttcaagtaaaaaaaatcaaagctgtctatttttattatctgtggaacataagtcatcgtcaaaaacaatatccagtagaagtctttaaagcaatattctaccctcttaaaaatatttctagaatgccattttaaaagatgtgtatagctattactttgtggtaccaatgttgtgtgtatatgcacttgtgatttttaaaaatattactctattatggaaaagttaaaatatgtgcaaaggtgaacagaatagtacagtgaccctccattttatccatcactcaacttcaacaactatcaatttgtagtcaatttggtttcctctataaccctacccgcttgcctcctcccatattgtttttgaaggaaatccccaacagatataatttcatccatatatattttagtatgtttctctaaaagatacccttttattttatttatttatttttaagatgcagtcttgctctgtcacccaggatggagtacaatggcatgatcttggctcactgcatcctccgcctcccgggttcaagcaattctcctcctgcctcagcctcccaggtagctgggattacaggtgcgcaccaccatgcccggctaatttttatatttttagtagagatggggtttcactatcttggccaggctggtcttgaactcctgacctctggtgatccacccgccttggcctcccgaagtgcttgggatcgcaagcgtgagctaccgtgccaggcccaagatacccttgttaaaagaaagcatattcaccaccagtttcactcctaaaaaatgattaggccctaatatcaccaaataccaagtcattgttcaaaaattcaattagttcatgtatgttacaactgattttatatatatatatatatatatggttttttttttgtttttgtttttgtttttttgagacagagtctcgcctgtctcccaggctggagtgcagtagtgctatctcggctcactgcaagctccgcctcctgggttcacgccattctcctgcctcagcctcctgagtagcttggactacaggcgcccgccaccgcgcccagctaattttttgtgtttttagtagagacggggtttcaccgtgttagccaggatggtctccatctcctgaccttgtgatctgcccgcctcggcctcccaaagtgctgggattacaggcatgagccaccgcacctggccacaactgattttattttggttacagtttgttttgagcaggatatagagaaacgccaaccattataagtagatgatatctcttacattttcacaataggtgcccctatgacacttttttctacttaaaattgattcgttgaagaaatgagatcatttgttctatagagtttctctacagtatggattttcctgattctatctcagtgttgtagtttcacacgatcctctgtcttgtatttcttttagataggtagttagctctagatactcgatcagcttcaggtttgaatattttggcaaaattactttataggtggtatggtgtgttctaccaagaggaagcctgacatattcagttgtccatttttgtgatgtcaccagcctttgggaatcagtgtctatatgttttaactccttataatttgtaaaatggtgactttttattttgttctcagttattccgtgaaatactttttctttaaagaaaaacttttccttatttggcatagagttattcaattgtgtgtttcttatacaggaaatgcaggattctttcctttagtttaccaattttcaaaataatgagcggtgtcgctagcaccttccaccaaaaatgaagaaatcttcttttttccttaagcgttgtaatgaactcatagaattaaacatatttgatgtgttttactcttttgcaattattattgttactgatctccaaaacatttcgcctttttttttttttaaatacagagtttcactctgttgcccaggctagagagtacaatggtaagatcatggcttactgcaaccttaaccccctgggctcaagcaatcctcccaccccaccctcccaagtagctgggcaggtgcacaccaccacacctggcaaattttgtattttgtgtagagatgaggtcttgctatgttgctcaggctggtctcaaactcctggcttgaagtgatcctcttgccttggcatccttaagtgttgcaactgcagacatgagccactgcacctggctaaaatgttccatctttaagttcaccttgagtccttttgacatgaccttctctgctatcttcttggatatgacactccaggttcattttgaacagtttttttcctcgagacctggattgagccatttctccaggcagctctggatctttaatacattgtggaatggctaaattgagctagttaacatatgcattaccttacatacttaccagcttttgtagtgagaacactttaaatctactgtattaatttacaagaatacaacatattgttaactattattactgtgttgtataatagagctcttgaacttatctttcctgtcaaactaacattttgaatcatttttgttatgatgtttctgttccattgccttgattgtcttcagtacaggaggcttttataatacacatataggaatttcttgtcttccatacttacaactttctcttaaatctttttttaaaatttctctttgatttaaaaacttttccttattttatttctgttttcattaagacattagctgttgtacttattaactcttgtgttacttctaattcagttttcatgtgtgagatgatcattttaaatttcagattctttactaagttcttgtaccttatgtctgagtttttaaaattttgagttttgttttcatagcctttatcattttattaatatcttttagcctgttttaaaacactaggcaacagtctttatctgttcagtagacatgtcgtcttcctggcatgtttgtttgatagacatgtctttctctcattggtctgcagagccattattttgctcctgttttctttcaataagtttgtttaggaaccatttgcaatctcctgtattccgtcttttcatctccttattgttctttctttcccacttctctttctctctctctctgtttttcttcctcctttcttggttagttgaggcgtaatttgtaaacattaaaaatgcacaaatcttaagtgttcctttcagtggtttcttttaaaccaaaatattaaaacagttgtgtttcccaatgtatttacttcacacttctctgaagaggtgatcattgttctgattagtcaacatagattaattttgtgtatgcatggacttttataagtggaatcatatggcgtgtataattttggctctgcttttgtcacttatttttttagaggaacttcatattgatatatcagcaacttcttcctttttattgttaagtagcatttcatcatatttatagatcacagtgtatccattcccctgttcatggacatttgggtttccaatttggggttattattagcagggctgctgtgaacattccttttttgtttttttttgttttttttttgttttttttgaggcagagtctcgctctgccgcccaggctggagtgcagtggtgcgatctcagctcactgcaagctctgcctcccgggtccacgccattctcctgcctcagcctcccaagtagctgggactacaggcgcccaccaccgtgccctgctaacgttttgtgttttttagtagagttgggattccaccatgttagtcaggatggtctggatctcctgacctcatgatccgcccgcctcggcctcccaaagtgctgggattacaggcgtgagccactgcacccggcctgaacattcttgtatgagtctgtttgtattcatgtttcatttcccttggaattaataggcgagggtaggttttctgagtcatgttatacatatataaatttatacatatatgtataaatgtataaggaattgtcaaacacttctccaaagtggtttgccattttacactctcaaaagcactgtgtgaaaattttaattgttctacattctccccaacatgtgagactttatcaagtctttttgatttaagccaactcttatgagtatgaaatggcataatggtatatttaaatgaaaggaatttttactttgctaaagtctgatttatcaactttttttctcttttgattagtcctttttgtgtcttatgtaataaattttgtttggcccaaagatgtaaagacttttttaatgttttcttttagaagccttatgtttctgtcttctacatctaaatacttatttttttttattggagtaaggattttttttccaaacagataccccattgttctagcaccatttgattaaaaaaaaaaaaaaaaaactttcctacccccgcattgaattggctcgccaccttttgtaaaaattcagatgaccttgtatgtgcaaatctccttccaggtccttataccaataccatactctattaatgtagctttataataactcttgaaatcagacaatgtaagtccttcacctatgttcttttttttaaaaatgtatttcttttttgctatttcatatgctttacatttttacataaattttagaatcagcatatcagtccctttaaaaaaaaaaaaaactcttgattgggattgccttgaatccatagaacaatttggggcaaatggatgttaacattactgaatctttcagcccaagaatatattatacctttacagttatttcagctttctttaaattctctcaacaatgtttgtagttttcacacttttatttgatttattgttagatagttgatgttttataatagtaatacaaattatattgctttaaaacatgtctttccccagtggtcttttccagggtgtataaaaatacaattgatttttaaatatctaccttgtatcttatgggatcaatattaagttcacttatttagttctgagtaaattcacttattggttctaacaggttttgttatgtttgtaaactccatagtgttttctgggtatacaaccatgttttatatatatatatatatatatacatatatatacacacatatatatgttttatttcttcctttccaattttttcctctattgactggctagagatttcagtacaatgttgaatagaattgggaagagcagacatccttgttttatttctgaactaaaaagaaaatatcaaataccattgcgtatgttaactgtaggtttttcatagatagtatttatcaaattgtgtaagtttacttctaggattagcctgcaaagagtttttcctttttgtaataataaactggtgttgatttttttccatgttttttatacttactaaaattatatttatttttctttattctataaatgtggcaaattacactgattgctttcactgttaacaccaaattgtattatgggggtaaaccctaatttgttatgtattatccactttagaaattgctgcatttgatttgatgatgttttattaaggtttttttttttgcttatgctcatgagggatatttgtctatacatttattttttttctttcataatatcttttttagttttccatatcaacatcagggtaaagctggcttcataaaatgagttgggaagtataccctcttctattttctggatgagttagtgtaagattggctttatttcttcatcaaatgtttgttaattcacttgtgaaacaaatagggtcagaattatttggagtgtggagataaatttgattaccagtttataaaaaataattttctatttatggaaaataattgaattgtcttagatttaggggtacttatattttctgtttcttttgtcagttttagaaagttctgttgtttaagtaatttgcttatttcacttaaggtgtcaaatctacaggcataaaattgtttacaacatcatcacattatcattttaagccagtatgatctataaagatgactgctttcatccctagtattgatattttgtattttctctctttttttcttcatcagtctgggtaggggtttatcaattttattaagcttttcaataaaccaacttctgactgagttgattttctgtaagatttagtttttatttctttgttttgtgttcttttttattatttctattcttctactaagttgggtttaatttgctcctttacagtttcttgagtttgatgtctaaataactgattttacacatttctttttaatacattcattttaaagttcaatttctctctaagtacttgctttatttgtatcccgtatattttgatattttttgtttttatttttatttagtttggaatgttttttcatttcttttaggatttctttttgatccatgggttatttatcacaggtttgcttaattgccaaattggatgttacctagatattatttttgttccttcataatttaataccactgtgctcagggaacttactctgtataatttcagtttgaaatttactgagacttgttttatgactcagcatatggtctatgttgaatatttcatgttctcgtgtatattctaccattggtcataatgttctacagatgccaactgggtcagtttttgataataatattcaactcttctgtgtcgttagtgatattttaatctagttctcttgactactgagaaagaggtgttaaaatatccaattcgatgatgatttttcctctttttccttttagtcctgcaatttttgcttcatgaattttgaaactgtttcattagatgcgtatctttatgattgttatgtcttcttgataatgtggatgcttttataattatgaaataacaccctggttatgttctttgtcttggaagtctactcagataataaaaccaggccaactttgctatggttagtgtttttacgtagctttttccactgcagtattttcatcttgcttatttttatttggaattaattttactgaaatgttaggagaaatagatgcgcgaggaaaacatttctaactttagtgctctagagtttcctcttttgtttcttttgcacaatgataagtgcattttacttgcattttctattttctttgttcttgagtttttcctgcacaatttgaattccactctcagcattttctctcaacgcagagcttagccctaaaagggagttttctcttgggtcagtactaagagttcatacagctcagactgcttccagtcctttcagaagttactatacatcctttcttctgttccatgcattcaattgtgtaaaacatcttccagtttcagcacagttctcaggttagccctgacccttttcaggaatacctttttgtaatttgagggttcttcctgcttttaggagagatttcctgttgcttccctctgcttcctcctatacagatgatgttaccaggtgggttttatgtcgtgaggagtttgtccttagctgtaattttgagtttcgttggggacgttagatacctaggtctttgtaggtctgttagctttgatttttaatattagttgctctttccatttttgtgtgggattcagagaaattccgaaatggtcctgcttctgtagctatcattttagagctctgcaggtacctcgattccattgcagagaagtatatttgtactgtctaatgtttgtaacaaaagacgtgtggtgttgatcttttcaaaaaaggaccatttaagaatccagaccacagggatgttgattgttcagtgacatctggagttatctgttattataatcatgcatttttttaaataactgaacatcttttaactactacctcttcatgtgccagggtcatttcgagggagtctcacagaaaagcctgtgtagtaaggaaggtcctaggtaagatgtctgtctttttgtagtgaatcctgtattggtatatggtggctgggatcctccagatttcagatttaaaagaaggaaataattcagaaaagatggaatttacccctcccacccaccacccaagtgggtctctttcgtgttatgcaagtttgaattcactgagggctacctaatgccggacaggattacataaccaaaaatgcctctggcataaaagataccttgataatctgtagaaattattgtcctgttatttgcttgtttttttttgttttgttttttgttttttgtttttttttgttttttgtttttttgagatggagtctcgctctgtcacccaggctggagtgcagtgacgctatctcagctcactgcaagctccgcctcccgggttcatgccattctcctgcctcagcctcccaagtaactgggattacaggcacccacaaccacaccctgctaatttttttttttttttttgtatttttagtagagacggggtttcaccatgttagccaggatggtctcgatctcctgacctcgtgatccgctgcctcagcctcccaaaatgctgggattacaggctgcttgtttttttttttaaagtatttacactttctttcagggagtactagtgtacagctgagacagcactcgtgatcctcagataattcttctggacactctacgtcacatactcaagtacacttattctttcaccatggccacatccaaagaaatagctaccagcgaaagtttctttttattgtgactcatgccaataataaggttcacatttgactttaaatcaattgttggatactcatttggctcacaggttcataaagttttatgcaaagaacatttttattgaaaaatttttgcctcttataaagtgaatacatatattactacttcagtttataacttgcaaggtacttttatttaatcttcatgacaaccttgaaaagcaaccacttacagatgaaaaaaactgaggctcagaagttaaattaactgcctaaatctatgtgctttatataacagagccaagaagaaattattgaataatcagaataattatcactagtatcagaagcttttgtgcctactggtaactaaaaaaaaaaaaatcttcagagaacatgatcacatgagaatctgttaataaatcagccccaattgaattagttataatttagagaatacttttaggaaatatatatttatatttatttaatatgcaatataaaatatatagcatatgtaatataacatatgtaatataaaatacatttgttttgtgttgacacattcaacagacactttggcaattcatttttacccattggacttcagaacaactgttgatgataatctctgttttacagtagaaaagctgaggcacaatgatgttaaatggtttgctcatatagctggtcatagaggcaggattcaatattccatgtcttctcattctaaatcttacattctttgcttttgataccatactacctcgtgataaaactttcaaaatgttgcaagataactgactgggtgaactagctattgcgacttacatatggctacccaaacaggtgggcttgctctgaaataatcagttttatgaagttcaaagaccagagcaatgatgaaaatgaataaatggatagaaaagacttgagacctaacttcagcctaacaggtcatacattctttttaggtatataaggaaaatgaccagttttccgagaaggcatgtatgtgtttatgttatcagttttaataaaatatgacccagatatgtcttagactctgtgtgttctctgccatctactctccgggcagttctgatgccatcaacacattccgccaggtgcattctaacgtcattaccatagcccgtggcagccagatcctcacatagcgtatgcacttcacagcctgactctttctcaggtttaattgactgtactctgtcatttttctagtaggctaactaaggagaaaaacataatacctgagatccacacatttgattaaatcagtcttgtcgtctctgcctagagcttaaaaagctgatatcctgggaatcttgctgctcagagacagccataggcaagtttaaacacagagcagattagtcatacattggtaacccacagtcaagagtagctgtgaatgtttgtttttacgtgtgaatgctctgactcttttatctcctgagcaaactcaccttaaagatctcagtattttaaaaaattagccgggcatggtggcaggcacctgtaatcccagctatttgggaggctgaggcaggagaatcgcttgtacccgggaagtggaggttgcagtgagctgagaccatgctgttgcactctagcctgggtgacagtgtgagactccgtctcaaaaaaaaaaaaaactcaatattttaatgctcaaactgtttttcataatagacatttcaaatcagctatggcaagctgaatacacacagagatatgtgtaagtgtatatgttagggtatgtatgtttatatatgtatatatatacttttgtcactgagcaaaatcaagttgcctttgatatttctacttcagagtagatcaaacttgagtttttgtggagcagaaatagtgctggccccaggccagagaaagaaagaaaagacaagcttatttgcatgccactcctttgcagcatctctgacctttctctaaccagttctcttgccacgcgttatcgactgtattggtcaggattcttctcagggcatcactcatgggactggaagacttttgtgaagtcagaaacctaccatttactagtggtatgttctttgtcaaataaccactttgaaactcttctgagctccatatagctgtaatatgaagcagcctctgagtggcaccttctgaaaactggccctgagcaatctaccgtcaaagtcctggctgccatattggtctctactcaatgatagcactgtagtctctgataggagactttgtcagcatctcttgctttttttttttttttttttgagacggagtctggctctgttgccccggctggagtgcagtggtgcaatctcggctcactgcaagctgtgcctcctgggttcatgccattctcctgcctctcagcctcccaagtagctgggactacaggtgcccaccaccatgcccggctaatttttttttctttgtaattttagtagagacagggtttcaccgtgttagccaggatggtctcgatctcctgacctcgtgatccacccaccttggcctcccaaagtgctgggattacaggcgtgagccaccgcgccgggctgggactcttgcttttattccttctaacaatgtaggaaggcaaatagtgtataagcaatataatatagatatggactacatactagtttggggacacatggttaatatttcatttgtttagggtttagaaagaaagtataggcccgccactttcaatatgtctcatcttgatgacaagttcatttctggagtatgtccaacacagagtgattaattttgaaatagaattggtcaaggggtagttattagtatgtggaggattctcgtcagttgctgctgtctgtatccaaaactcttaaccttaaaccataagagagctactgttggtgcttgaagagcttgagtcctcttggtaataataattgtgcatgaataaaatcagcatttggatagagaaagaatatcccatattggaaagtaatcatggcttttatgcttttgtgtgtgtatgatttgacagctttttggagaccacggcatatttcttcatgaaaccaaaacttggagagaaggaggtgtccccaaatgctttcttcagtatctggcatgaattcagctctgactttaaagacttctggaagaaagagaacaaacttcttctacaagagaggtaggtattttcatttgcacaatggcattttaaaactggtgttttattaggtgtggcaccactgggttgccaattttcgtagcctgaagaaaaaattagatggccctcaacccggggtagcaagttgaagaggatgctgacatttggcaaaatttggagttttaataagaagagtcagcacagaagctgggatgctacagagagtaactagggtgctggcttgccaggaccactgtcgggtaaatcaacttctatcatgaggaaaccacgtaaaagtgaccacgtaagaaggctggaacaaccctgctgcaatggcagacccacgcacttcaaagaacagatagcaaaggctagaagggtaaaaggaatagtttgctcaattcatgggatattgtcagtttaccactcatatcaaaagttcatccagatatcaccaagaaacacagatgtcaaaattttttaaaagacctttcaagattcttgtagaattatgtgataccttctaaaataaatcttttcaggaagggaaatgtcccctcttcagtatatggaataaagtctctgtgattatgaaattccatagaggcatattacatattaagtaatgaagaaggctagccctcccagggcgccatccccaaatagctgcgtctagtgggaaactaaagggaaacgtaatctatactataaagcaagccataatgccaaactaactagtatacttcctaacatcactaacagtaactttgctttagatctttagaaaacttacatcctgtgagccaggatcagtggctcacacctgtaatcccagcactttgagaggccaaggcaggcagatcacttgaggtcaggagttcaagaccagcctggcaaacttggcaaaaccctgtctgtactaaaagtacaaaaattagccgggcattgtggtgggcacctgtaatcccagctacttgcgagactgaggcaggagaatcgcttgaacctgggaggcggaggttgcagtgagccgagatcatgccactgaacttcagcctggacaacagagcaaggctgtctcaaaaaaaaaaaagaaagaaagaaagaaagaaagagttacatcctgagaaactttgttcacaaaattccactgttttctgcttattgtcttcattttggtctgcttacacatgataccatggttgtccacctggttttcagttgtaattcaattttgatacctccttaaattagatgaattaattggttacatttatagagcctgtaaaccatgccagacttgcgcttactcctataataattacttagattccataggtctgtcatagaagaaactatcctcagtgaatagtaggtggaaaaagaaaatggtttgaacagaaggaaaaccctttaaacatgcctgctaaagataatgagcttattctgcttccaaatgcatcagtaacgtaaaatatgagagctttcagttacattatatgcaggtggggtagaagagataattgcttaaaaataagcgtatgcgaatcactgttcttttccttcagactaagtcatatattaagtgatatttaccaaaaacaggcttgctcagtttggaagattgtaaagaggaaactctttttttaactttagcacgtcacacagaacttcccttcatgcccttccctaagtccctacattcctccttttacctctaatctaaacctggtcccctagaaaagggtttgaaacttatttacactaaggttcaaaatgaaaagagtcgtgtttccccttgcgcgattattttcatcatgtctaggattagagtcctcaatggagtgtagatggtgtgattttagacatcagcaagatgggactgatgacgttgtcactttggagtagctggtccgatgcacatcaggtaagcaagtgcatcgctgtcggagaatggcttggtcctgtcgtggaggtcccaggccaggatgctggacaccctccctgtcgctttcttctgctagcatagaccagaatataagctggtgagatgcttcctcagagaaaatgttgagatggactaattcagatgctttgctccctaagcatcctcacagccccatctaatacatgccccatgacagcctcctcagagtcccatctaacacatgctccatgagatagaattgtttctagatgacattatcaataacaacccactgtttggtggcattatgtgcatctgacatgcccagaatgagctttccttcactctctaagtatctcataaaatcagctagatccattttttttggttctttatcctgtgcttgtcatgtcctagaactatgtgatgggctttgggttcacacttggtgaacttacattcatgttagcagtgttgcgaattggcagtttacaagtgctcttgacttcagacttctcagttttctaaatcatttgcttttaataaagggctaaggaagaacacgtggcagatgagaacgctgctttgcccattgacttgcaaaatctattaccctcttggcaattgataaccagtttgcttgaaaaggaaaaccattggttggagttgtttgaagaacaactctgttcctttccttagtgagggaccagctatgtacttcttaggaaacagtgaaaaatgaaaatgcacaatttcttgtataaaaattatttcaagacagcaaagcattaaagcaaccacagagcccttctaagggtggcgccccatctgacatctgactgcccaaatgcacacctatgccctgctttggtgtaaactttttttttttttttttttgagacatagtctcactctgtcgccacactggagtgcggtggcgcgatcttggctcactgcaacctctgcctcccaggttcaagcgattctcctgcctcagcctcctgagtagctgagactacaggtgcccgcctccatgcccggctaatttttgtatttttagtagagatggggtttcaccatgttggccaggatggtctccatctcttgacctcatgatccacccacctgagtctcccaatgtgctgggattacaggcgtgagccaccacacctggcctggtgtaaactttatattttctatagttaaatggaaaagtatttccaaaatgttttgaatgccctgggacatggataggaaatgccagtgtggtcatttaagagtgtgaaacttcttgtacagttactatcagtgtgagtagaacctcaagtggaattacaaatacttaaaatgggatactgttctccaacctgtttctcacctctgtactcctatcctatttactatcaacctattttcttcaatggctaatcttatactgcctaacaatacgtctattttataccattaattttttgatatttgcatattggtcttttttttttttttttttagttaaccactcggtgttggtcctcatatctggattagtgtcctcatatatggtatagctctcatatctggtatggtcctcatatgggattagtgtcctcatatctggtatagctctcactttcagcaagccacactgcctttcccctctttgtgtctccataagtatttgctgacttgttgcatcattacctttggaacagacatggaaataagaacttagcctagtaaagtaataaacatgttttcttgcataacttgagttgatcattgtaggtaataaaaccccgctctgaatacctcaaagcaaaaagagagagacagagagagagagagaaattttatttgtttagacagtcaaacctcagaagggcaagagtggaacttacttgtggaagtcctgaatgcagaattctacctgctgtgagtgtggttagtcagccacatgtgtctgtacctgtcccttccgtgatccatgtgtcttttcaaatgtcctctctctattctttctcctcctttttcctcttctttctctcaccctttcttcccaacccaccacccctctgtagcttagctttaacttcccagctaggctgtttcttagctgtcagccactgccatggcttatattctcataacccaggaggacagagcagtttccatatccatctgcaaaaataccagggaggaactccaaatgaattgtgtccatctctggatcagccctggtggtaccgtggttagcttagcagttcacaaacctgatcctgaagcaagagaagagtgttaccatgatcaacagttcccttcagagcagtgtttttgaaggaagaacagtttccccaaaaaagtaaacaataatctggcctaatttattaagcctttaaaatcacccatgtgattagcaaaatgtcttagcatggtagaaataacctgaaagatggtgttaatggtgtccttgaaatttttctgatagaattttccttggaatagtttggtgtatatagattgaaaaatatcgttaaggttttaaatcctgtattaatctttcttatgccactatttctaatttgcgtctgattacagagtgataataataactctattttcttgcttcatcctgatgacgcatgtgatttggttgatatatttctcaaaatagtgaatttctacacatccgtgtcggatagggcttctgtctttctagtcaatgtgtttggatttttaagctctgccacttactggctccagaatcgtagaaaatcaattagttttcaagagtcagtttcctaatctgtaaaagagaaatgataatacagtcttgcagtgttatcatgtagactaaatgacataacgtatttgaagtatatagcacagtatctaccttctgaatgcctatactgtttttccatcatttaataaaaatggtatcctggtcatggctccctacaaggtgacataacattgctaaggcacactgaccatcttaagaacatagtctgtaaacacaaagtattattgtgactcagttacattcttggttagacaaaatatcttggttgtgagtccaaggatgaacttttgtttgaaaatgttcatgtaacctacccctccatatctacactaggtgatacaatagacacagatcaagtgatcttgtcacgaatcagaaaaattattttttcatctacttggaactagacatgtacaattgttaataagaaatcctccttttttgaaaaaacaatctagacttgtcatcactgagcaacacaaaacatgtgcaagtatgcattttttaaaatttcaatttgtaggccaggcatggtggctcatacctgtaatgagcactttgggaggccagcactttgggaggccaagcactttgggaggccaaggtgggtggatcacaaggtcaggagttcgagaccagcctggccaacatggtgaaaccctgtctccactaaaaatacaaaaattagccaggcgtgttggtgcatgcctgtaatcccagctactctggaggctgaggcagaagaattgcttgaacctgggaggcgtagggtgcagtgagctgagatcacgccactgcactccagcctgggtgacagagcaagactcagtctcaaaaaaaaaaatttttttttcaatttgtctgtattcaccagaagatgggaagggagactaacatttattctaccaagcatctccctaaggtctcacagagcacagttgtagtgggtaaggaaataggcaatcttcatctcttattttcaggaaggcattggcatgactgtcacctagccactaatgaggctctgtggagctaggataacaagagctgtattaattaaaagaaagagatacagattgactaagaatgtgtgtcttttttttaccctgattgagaggctatggtctaggtcctgggaaaggagggttaggcttccagaacaacatcacttctctgttgtaagttgcgctcagttttcaggatgagtgttcagctatataaccatgtgaagctacctgtgattattcactcattccatatggagtcgtactggacactgagacgttcaagtatgttaaatgaaggtctcctcttctttgagctagcagtatagcactggttggtgtatcatgcagtgggaggaaccaggagcagggactaaggaattctgcccagaggacttttgacctagaacgtggagcaagtgtaggattttcacagacagtccagagagctaagggcttttaggcaagaagatctggctctggccactgggcccccagcctcatagtgtgtattgtggcctatcattatttcatttttagttggcctgagacattttaatttaataaatcatgacattagtaagggttatgtttaaagtattgtctaacttaatttactggtttattttactttgagacaggtagtctttgatgatccaagagaaaggatagctacttctctaattgcacaagcatgtggcagtcacgtcttgtttcagcccagctgaaacctgtaattagaggaaaataatttgaatgtttatccttagaaggttatgcgttacattggcgagcccctcgtgccttgttaacatttctttttccgtaatttgtattcaagtgatttgtattcaagtgaactacatgttcagatttatgtatgatattattggagtaagtttaagaaggaagagaccattttcaaagaaattgaaaatacatctgaagaatggagataaggaaagtttactcttatggaataacgtacttgctggatacgtaagtgaaactgcctcttggactgcaaggtagcattcttgcattgcatgataaatgaatttggccaaccattcactcttttcattcaggcatcaatttttagaaaaatgacccataaagaaatcctcttctcagtgccaactttctgtaaccaaaggtttggcagaagagtcgacaaacaggacagtcaaaatagtggccaatggaggccgagggtgtgagaagatttagctgtattcatgaattggagtaacgcatacacattaagacagtaagtaatgcattcaacaattttttatgatatgtatgccctactatatgccaggcaacattcctggccatgtggatcttttctcttctcatgagagaaacagacaacaaaaagtaagcgcatatttaagttacaagctgaaatcagtgctatgaggaaaataaacagggagtcatcttgcagaatccaacgggaggaggttcatttagagaggttggtcagaggaggcctttctgaagaggcagcattgctgtggacacctaaagaattcaagggaacagccccatgaaggggcacagtggggagggtgtaatgtgctgtatgagcattccgggtagatggtaaggatgttcacggcaatgtggcaggaaagattaagcactttccaagaaagatgggggccatgcaatgaatttgataaagcaagctgagtcctgagcattcaggccctggtaagtcatggtaaacattgacttttattgtgcattcaataggaagccatcaaagggttttttttttttttctggagagaaaataaccttatatgatacatgtaatgagaagattattggctgccaaatgggtagtaaattggagagtggagagtgctagtaaaaagcaagttaggaagttattttagtgacctaattgagagctaggactctgcagactggggtgaaggcagtaaagattgtggaaaataggtgaatttgagatatattttggaggaaaatctacatagatttgctgttcacaggctcctggatgaaccagtttttggaatcagaaaattgtaaatgtcagctcagatactgaaaagctaatattcactaggatgctagagatcaagaaaacaagaaaacagatttctcctttcttctaaaatgctgtagaaaaagagctgaggaaagatatgaaaaccaggatattaagatatttactttgtaaaatttagttctttttaaaaaatggaaagccctaacgtgaagattagctgggaaagggctttgcatttgcttctttatcttgccgtgttccaagaggtgtttttaaaactttgggaaatcttcaaaatcctcaattcaaaaactgaagaaactctcagtaggtagttctagagaatccggaccaagagctaagaacgtggcttgtccaaagatgtttttagtttggtaaggatttgaacattgtagcatcttttaatgagtgtgtagacacttgtaaggtatctgagcagtttttaattcccctttagcatttgctaaaagggttttttgatgtcatagcaaagtttgcagtagaactatcctggatcaaaatatacttcctggagtgaagatatttaaagttactcttttaaaaaataacatcatgtggcttatgtgggccgaaaacaagatcctattcaagctagatgacgttattttttcaggggcaatttttaatttctttaggatactttcaaatggttataatttgctagaggaagtacagacctgttgaatttgaataatatcaaattaacaaattgttaggtttgcgtggacttctgctagagcctggatttttaagataatcaaaaacgtaaggagccaaaggcttccccatggctcagtcccaccatgacatgctccgggctaactctcacacctttgggcaaaggaatttccacattcacacactcctcctgctcgactttaggatttcagcttcacacactacccctgttcccattagggggagtggagctttagaaaaatggaaggtgtttcttctgcacttaaacattagcagccttagggcaaatggataatcaaagactattcctgagagatgagggaagagattgcctccacctagaggtatcgatccctacggcagggttgaagctaacaacagatgttagaccaagacatgttagtggttattttatttgacagacagcaattcgctcacctggttttggctgctggactctggttaaggtttagaagcagctgtaatgagacgttaagctcagttttaaaaggaattatttgtgaaagcatgtgctgggtctgtgtgtgttgggggatgttgggaggttggataccaagaatggacatccgtattgaggtactttgagaatatatatttcaatataggacctacaaaaaataagataatattcaggtatcttggacagagaatgaaaagaaaatggtcctaaaaaatgtaagtagaatggccagtaaacacatgaaaagatattccacattgttagtcctcagggaaatgcaaatcaaaaccaaagtgagatatacttcatactcactaggaaggctgtggtaaaaaacacagacagtaacaagtgttgcagatgatgagaatgtacggaactctcatactttgctggtggaaatacaaaatggcttttgccattatttttatggcaaaaactgcaattacttttgcaccaacctaatacgtggggcctgaacgtagattcgtctttgtgaggagctggagtcttggggtacagagggaggaaaatggagagtgactactaatgaagtttctcttgcggggggtacaaaatgccctaaacttagatggttttagaggagtgcacaaacctacgcatctactcaaaaaaagttgacgttcactttcagtgagtgaattgtacggcatgtgaatgatagctcagtcaggctgttctggaaggaagaagaattaagtagaattcacacattagagttgcatcagagttctaagcatgagagtggaccacagttgaacatactgacaaccttcagtgatcgttattcagagtgttcacagttttgaaaaatctaacatcggtccctcttctgcctgcctggtacaactcctgctacttcccctgtacccgagtaattttgtatgtacccaagaaaacaaaccttgaaactacaaacatgagtattagctaacagaatttgggagataaatctgctggaaaaagctattaaaaaattgcacagctcattccagaatcaaaaaagaccatcatcaacttagataattagtcatttgcagtagtttgactctgtagtgatgaaacaggctggtgctttccctgtgtaaacccacttcacgaactctaagtcatgttttaaaaatatacacacatgcaaaaaatactatatgtatgcatatatatgtgtgtgtgtatgtgttttgaacaattattcatctattgtgaataaactttttcaaatctaatctccatgggaagagtcctattattcaagtttctgtaatacataggacctttattgctaatggaaagagataaatacttagaaaaaaagaatttggtcaggtgctgtggcacacgcttgtatccccagcactttgggaggctgagggaggacaattacttgagcccaggagttcaagaacaacctgggaaacatagggagaccctgtctctacaaaaacaaacaaacaaaaattagcttggcatggtggtgcacacctgtggtcccagctacttgggaggctgaggcaggagaatcacttgagcatgggaggttgaggcagcagtgagccatgattgtgccactgcactcctgcgtggtcaacagagcaagaccctgttttaaaaaaaatagtaattcaatatgataaaaagtggttaactggcagggtagggtggctcacacctgtaatcccagtactttggggggccaaggcgggtggatggctggagcctaggagttgagaccagcctgggcaacatggcaaaaccccatctctacaaaaaatacaaaatttagttgggcgtggtggcgccttcctgaattcccagctacttgggggcccgaggtgggaggatcacttgagtctgggctgttgacgctgcagcaaacagagatagttccgctgcactctagcctaggtgaagaaagtgagaccctgtctcaaaaaaaaaaaaaagtggttaaagtacataagaagaaaatgaatttgtctgtctttgctatgggtgaagatttgcatctttcccttctgtttaatgaacacttcaccctctctccggaatccttatgccccctggtacccactttccctgcctttcctgtgactttctgcttactgacactgggccccactccatggccttctgaccaagtcaccgctcaggctttttgcttgccatacaaggttggccttagaaacttgaaccgtgggcagctgctaggtcatgagaagaattttgagcccgtggaaaggaaacttttgtttaaggcagacaatactagagacagacctttgatatggtactttctagtgagcagatacccagtgaagattaaccatgctgatgctgaagaaccggctatagaattacagtgtggtcttggatattgacacttctagttcattcaagtttccatcgattaaaccacaatcatcatggcaaattaggatcatgtagcttggagttcttcggtttgtgtgaaaagctattgtatacaatttgttcctccttaaagggacatgtaaattgtcatcatcattatttaaatcattacatatatatgctatttcattttccagatttattgaggcttaattgacaaataaaaattatatgcataaggttatacaaagtgatgtcttgatatacattgttaagtacttatcacaattaagcgttaatatatccattaactttttgcggtaagaatacttaagatctttaagatctgttatcttagcaggttttaagtgtacaatacatattattattattataggtactgtgctgtacattaggtctttagacttgttcattttataactcaaagttataagtattctttgaccaatgtctccccatttctcatatacttattataatgtcacatcaaaattaaattctaaaattcttggtgttttagggcctatgattttgcaatttttaagagtaataattctgcagagccaaataaatgaaaacagcattacagctaatataattcctaaaataatgtaaaacatttttgttttacaattaggctttctaattataactataatttattaatacatagattagattatgaatacaacagaggtctgtctgcagaatccctttgaatattgtcttatgtgaagcctatgagcattttcatttcatttcattctatttcgatttactttgcttttgtttcctaagatctgtaataaaacacctaggatcccagataccttgaatgtctttctaagtctgaacactttaggtaatcaacctcatctgtcattttatcttgttggtaatactaaacattccctaactaatcttttagcattgtctccatcctctcccacccggccccagccacgttccacctccgattgattatagaggtcgctcccttcctttagggccagcagtgaggctggcacccgagcgtcacatgctctgtatctagatgaaagaacgtgctcctggccaatgtggctccgtagctcattgatctctctctggagaaaggctggtatgtctccttgcacatttcttctttgaatgatttaaaacttgatgctgagctatataaagttctgtctggatagctgtgccttacagagggagggtcatcctgaaagatgccacttctgcctttacagaaagggcacgcagaccgttcctagggcaagccacctccaccatggcgttgtgtggaattagctaatggttatacctggcaaagatgaaatgaaggttaacaggacaacagaggtatccttgtgctactgtacggtcagaaaggaattcagccctatcccttggagttatatgcagattcaagttgtctggttttttgtaaggaaatattaatttttaaaagcatttgtcttggctgggcgcagtggctcacgcctgtaatcctagtgctttgggaggccgaggcgggtggatcacgaggtcaagagtttgagaccagcctcgacaagatggcgaaaccctgtctctactaaaaatacaaaaattagctgggcgcggtggtgggtacctgtaatcctcatgaggctgaggcaggggaatcacttgaacctgggaggtggagggtgcagtgagccgagatcacaacactgcactctagactgggtgacagagcaagactccatctcaaaaaaaaaaaaaattgtcttgaggaggacagaattgcaggtgtgttggctgagtctgtagctgttttgctgtgagcagaatagaaccagcgtcattaggtcagtaccaactctttttgggctttacaatattctgcccctgcagtggttctggggatgagctgggaaatgagatgattggcgtgttccccaggaggaaatgccagcaagccatgttagagaggcccaactgcctgctccccaacaggggcctcatcccctgagtttcattaacctaaagatgacctctgtctccactaacttaggagtcactgggagtagaactagtagagcaatagaagaaagtgcgcttataagcctgatatagtaaaatagtgggtagcagcaccagcagtgagacatgaaggaagtgtagtgttgggtttatttttaaataaacagatagtatctgtcattatattaatgatttagtattttgctttgttattttagcactattaatatttctcttgttttataatggacatctaaagtgggctgcatttaccatgactctgaaaaataaaaaaacttaaaattcagttatatattgggaggccgaggtgggcagatcacaaggtcaggagatcgagaccatcctggctaacacagtgaaaccccgtctctactaaaaatacaaaaaattagccaggtgtggtggcactcacctgtagtcccagctactcaggaggctgaggcaggagagtcacttgaacctgggaggcaggggttgcagtgagccgagatcacaccaccgcactccagcctgggcgacagagcaagactctgtctcaaaaaaataaataaataaaaaatttagttatgtagccattcactctttttcaaaagaatatattgaatattcatgacttaggcattcatttagaatttcaaatacccagaagtgaaagttgacaggcaagaatccccactcctttaattagtcagaaaaaaatggttcagagatgagcctctaaaatgtattgaacaaggaaaaaggacagaggtaaaagtactaactctttaatctttaaaatattccaatgatcattatatttagataatatatatttttgcaaaaattttatcagaaataaaagtgtattcctagatcttaactttacgagacgggtttattttttaaaattaacctctaggttcaaattcctatggcctaaaggtaaatatttttggaaagtgataaaattccatttggccactttaaatttttccaggtgttcaggggaagtaaataaaatgaggcataaaaaggaaaaagtatgaaaaaggtagaaaaaatagtagaaaaaagtatgtcatcagttaagagatttcatcagttaagagaattgcaggtgctcacagataactcagtagctttcattttaaacatcttactagctgtagatattaatacattcttaaattcatgtgctgtttttatgacagaagcactcataattctatactgagtatgtacacaagtttatttcctacaacctctgattagttttcttaatgttttcgttttacaaaggctgaataaggtatgtagcaagagcacgtgcttgtaggttaaaaagacctggatttgatgtatatctctgagagcacccatgtaacccttgacaaattaatgtactctctgaacctgtttccccatttgtaaaatgaaggtactatacgcacccaattgctgaagtaaattaaaggagacacagagtataaaacatttagcacacgctttcacatatagaaacttcttagttaatgttagttgctgccattatcattaatatattaacgttgtttgaaaagcaataaacttactatgagaaagatttagcactaaataaattcatagaagccaaaccccacataattctattctaccagccacccttccttaggtttgtattcccaaacatgaatcgaagcattaccaatgataagccctttgaccttgggcagttatttaatcttagtgaacttcagttttctaatttaaacaatcgacatatcaatcactaaagtacatggtattgaggctgttaattatattaagtgtcatagtcccaacacagtgcctagttcatcacaggtgctgactattaaaattagtaccaatggtgttttggaaattactactattattataaatgagcccagtgtttttctctccatgaataaaacattgaggaagaactggacagaatgaggaagagcttggaaaaggaggagaatgagagtgggtattaatgaagcatagagatgaggaagaataatggtgcttaaaaatggaaggcatagggccgggcgcggtggctcacgcctgtaatcccagcactttgggaggccgaggcgggtggatcatgaggtcaggagatcgagaccatcctggctaacaaggtgaaaccccgtctctactaaaaagacaaaaaattagccgggcgcggtggcgggcgcctgtagtcccagctactcgggaggctgaggcaggagaatggcgtgaacccgggaagcggagcttgcagtgagccgagattgcgccactgcagtccgcagtccggcctgggcgacagagcgagactctgcctcaaaaaaaaaaaaaaaaaaaaaaaatggaaggcatagaacacatagaaggtaaaagtcactggaaataacttctctatgagggagttcatatctttttgtattagcagcatgatccgccacttaatattttaaaatattcttaccatggaaccctgtgctttcttcactgtggatccgtagcaatcatggcgttttctcttttttgtctccaccaaatcaactcactcttgctgagcatcattcttcattaagatatggctttggggccaggaatggtggctcatgcctttaatcccagcaatttgggaggctgaggcaggtagatcacttgaggtcaggagttcaagaccagcctggccaacatggcaaaaccccatatctactaaaaatacaaaaatttgctgggcatgatggtacccacttgtaatcccagctactcaggaggctgaggcatgaggctcacttgaacccaggaggcagaggttgcaatgagctgagatcgcaccactgcacttcagcctcggtgatggagtgagactctcactctaaagaaaagaataaatatatatggcttccaatcctttagattatagatctcctatttatagtagtgttgtgttgaggtcttttaaaggacaaggattgtgcctcttttgccctctttacacatcttgttcttcttagttaagcattaagcaaagctgtcaacatagcatagaaacacagaggttggagttagggatagagaaggggctgggagcattgaaaatagaaagccagacccaagtagcagcaccagagcacagggtatggagcctgaacttgaggctacataatattgatggcaaattcaagataaaggtggaaaagctattgttttttaatgtcatgggccaacaaatgaatggacggttggttagatgaggagttactggaaatgacacaaccattcaagaaagaatacaaacccaagttagcaaagtgatggtattatgaggaaagcttggctcctacgtttaaaagctctctactttattattagttaaaaaaaaaaaagtcaaatcactcacagcacactttgccactgattacaatccactagtgtgtcccagacattcaaatgagaaccagggactctgcacaacctcttagcttaagagaggtgagaacatgaccatcggaaagtaaagaggaaatgtgttgacttccatataagatatactttactattcattaataattattaaaagcgagtttcggccaggtgtggtggctcaccggggcaggagggttagttacttcaggctaggagttccagaccagcctagaaaacatcgcaagatccccatctctacaaaaaataaaataaaaagttagctgggtgtggtggcacatgcctgtagtgtaccaccaggaggcacactacaattgagataacaattgctgaagatggtattgatgctgctaatgacattaagtgcaaaagtcccaacgcagtgactagcccatcacaggtgctactaaaattagtaccattggtgctttagaaattactgctattactaccagctacttaggaggctgaggtgggaggatcacttgagcctaggagtttgaggttatagtgagctatgctcatgctactgtactctggcctaggcaacagagcaagactctgtctctaaaaaaataataataggctgggcttggtggctcatgcccgtaatcccagcactttgggaggctgaggagggtggagcacctgagatcaggaattcgagaccagcctgaccaacaaagtgaaaccccatctctataaaaatacaaaaattagccaggcgtggtgacaggcacctgtagtcccagctactcaggaggctgagacaggagatttgcttgaacccaggaggcagaggccgcagtgagccaagatcacgccactgcactccagcctgggtgacggagcgagactgtctcaaaaataataataataataataataataataagttgcataatgatctcagaaaaggtaagagcgacatgttcatatccaaatattcttaatcactagtagtcatgtgtcattttctacctgattatgacttctctaacaggaataatggagtctacacactttggggataattattataatatatacagttttattcctaattttatagtccagacccataatctcttatctacaattttgagacccaaaaacctcagaaactgaaagcttattcatatttttgtggcaaatttatctgtcagcaacactcaactttcatgaggctatgtacagtctttactcattctatagtgtgagtgttcatatacttacagaaataccattgtgtttaatcaaacattgattccatgctatgtcagacccttttgatagtgttatgctccatattcctatctgaaactggaaacgttctgaattgtttttattttttatttttatttgagacggagtttcgctcttgttgcccaggctggagcgcaatggcacgatctcggttcaccacaacctctgcctcccgagttcaagtgattctcctgcctcagcgtccccagtagctgggattacaggcatgcgccaccatgcccggctaactttgtatttttagtagagacagggtttctccatgttggtcagactggtcgcgaactcccgacctcaggtgattcacacacctcggcctcccaaagtgctggaatcgtaggcgtgagccactgcacccggcggaagagtgctgaattctaaaatccttctaagccctaagaatttggggtaaaggatgatagaatgaatggctggccgactgaactatgtattcactgggccttattctgctctctctagaaccgcacagataaatccaatcctttgttccatgtaataaatctgatatttaaggttcgctatgaagattctaccaggttttctattgccctgacataaaccctttgtcctcttcattgttctggagtctcttggacttttctgattcatttagcttcccgctcaccctgggcctcatcatctgatagttcagctatgccagcactggtactatgatttatacaacagattacacctctcaacttaccacttcccaaagttggcaggccagacccttcacacctcttgctctaggaaaaatcttctaagctggacaacttcaaaatcaatgttccccaacctaagttagattctctaaggaatggatatcctgagacaaatcctgggaagcatgaggggaatggcaagtcaagagcattttcattccaatttccattttcctctctaatcgttccccgtactgccaccttccacattcttcaaactgtaagcaccacttctgcatgcttcactacgaatgtatgacttgtccgcatacttccctgaggtccttcagtatgtacttattaagtgtctatactaggcagtggagttgtgaataaaaccaaattcctgccctggtggagcttacattatagaagggaggtccagaccatcaataaatatacagcgaagctccaaggaaaaacagagcagggcaaagagaagacagctatgggaggtggtttattttatataaattagccagacagtgcctctgagaggtgatgtctaagcagggactcggagatgagggaataagctaatggatatctgaagaaagaaccttccacatggatgaagcatcgcatgcaaagctcaaggaaggagcatgtttagtcaagtgcctaaagtggctggagcagagtgagtgagagttgagaggtagaagatgaattcggagagggagcattggggccagactatgtagcctagtgggccaagtgaggtcaggcctttaagaaggagcgtattgaggaagaaccatgcacactactgctagtgctagggtgagaaagatgaggactgagaactgacctggatttgggatcttgggtgaatgagtgacatccgcaagagtagtctctgttgactggttagggacagatgtctgattaactgggagcacaggaagctggggcagtgactctaggtaacacgctcttgaggcattggtatatgtaaagggtcacaatggaaaggaaagctagcaggagggcaagggaattagggttttgtttttgtgtttatttttggtgctgggataaacagcgtatgtgtcactgggtagaaatgatccagtaaaggaaaaattgtgaactttgttctctcttaatatgtgtgtttcgttgattcattcctgacttgtatctcccacatcttatcccttaattaagccattcttcctcttgcataattgcaaattattatgatataaatagctttgttgtactcttttatgagttttacagggaggaaattgcataaactctctataaagtaatttctatgtttaaaagcccttaagttctcccgccccatagcctgaccaaaaaagtcttactaaacaaaaataggatacaaatgatccatacacatcatcctggctagagaagggtcagaaactacagtgttgttagaaccaatagagcttaactttatatctcactggctttaataaaaaacttttctgagctatttgacacaaaaatcactaagattaagaaaatatcttaacacaggtggaaatagtaaaaggatgtttgcatgaaaaccgtcaaatgtaataaacagcactattctctgataataaaagatgaatctggctgtcagatgcaattttataatagcttcgaccatcatgtacggcaggagtatttttttttatttactatcgttaagtttgtggaaccagtgattgttgttttactattttgttaaggaaacctaaaacattcttagaatgtacagaaagaatatggtcattcttataggaccaaagggcgtatcaagtgagctgcttttgtaaataccatgaaaatccaagtctgacatggaattaaaatcatctctactacaagatgcagaaaaaaaccaaactcttttttttctatatcagagacttaaaaatattagtgatgaccaatgtgattagaagctttaaaatcctaacatttatgtgaacaaaaatcttcctgttttcagagacttaagcatatcatctgagcattgaaaaaagctcttaatagtacctttcagatttctcatctgttttcagatcccatattaaactccttgtggaagaatgagaaagaaagctactctaaattttacagaatagaattcaggctctttatttacaaaatggagtgtgaaccttgctgtttactcatctaccccctcaagcaattgtgttttccttccttatcagcacagaccatcacagttccaggatttgtctgagatgctagccacctctgattgctattcactggacactcttgtgattgtgatttaagattgtaggccaggcgcagtggctcacgcctgtaatcccagcactttgggaggctgaggtgggcggatcacgaggtcaggagtttgagaccagcctggctgatatggtgaaaccccatcctactaaaaatacaaatattagctgggtgtggtggcatgcacctgtagttgcagctactcaggaggctgaggcagaagaatctcttgaacctgggaggtggaagttgcagtgagctgctatcgtgccactgcactccagcctgggtgacagaacaagactctgtctctaaaaaaaaaaaaaaaaaaaaaaaaaaaaaaaaaaaaaagattgtagaggaagtatgctaactgtcctttcttctagatttttcatttttaacctcatatgagattagatcaccaaaaacctacatggcatacttgaagtgtttgtaagcattactctcctcagaaatgctttcaccaagttaaagtttcgtctcagttttcattgaggatttgtgtgggaaggaaaaaattggccattggaaaatgtctgtgtcttctacattttcagatttatactgactacaattcacatcctttatttagacaatcgtgtcaaaaattcctcctagaaattagagtcaggagaatgtggtggttgttttttcttctccggatgaatcttacatgcttttctttttcaaagatgaacgctatagcccactgtgtttccacgactacttttgcttgaaaagagttcaaaatttatccaattattcaatagaacttctcctctgtatttgctaaaagacatgcatccacttctctagttctcttttaaaataatatcttcagtgttgtaaaagattcagtctttcagaatcaaatgattgtaggccaagcgtgctggctcgtgcctgtaacaccagcactttgagaggccaaggcgggcatatcacctgaggtcaggagttcgagaccagcctgggaaacatggtgaaacgccgtctctactaaaagtacaaaacttagctgggcgtggtggcaggtgcctgtaatcccagctccttgggaggctaaggtacaagaatcgcttaaaccccagtgagacaagatcatgccactgcactcctgcctgggtgacagagcaaaactctgtctcaaaaaacagaaaagactcgaacgattgtaagtgaatagaaacataaataaataaaatacatgtaaatgaatataattaacataaatatataatgtatatataatatgcattaaatataaatgcatatattgatataagcaagaaagtaaaatattaaaaacattctgaaaatcacgtatttattaaacaatataaatattgtttttgtttgtttaattttccaaaatattatgctatgttatgctacctccaaacagaggttttcaacatgttctcctgggcaaacattgtcaccatcacctggggacttgttagaattatacattcttgaactcccactctgggcctgctgattatgggggtagaaaccagcaatctgtgtttcaacaagcctttcaggtgattcctacacacagtgaagtttaagagccactgttctgggtctcataataaaaaggtgcctatagttccaaccgcaagctctccgcttacctgcattcctgccttgctatttgcctgccttccttcttgcatcctgtattcccgctttttatccttcctatgtgtgtgcattgtgagagaaaatagtgcaatgatgaaagcgaacgctctggaagtacatgatgtgtgtctggacttgaactactacaagtctgccacaaattagtgtgtgatcctgaacaggtaatttggccattttaagtgtcagtttcatcatctgtaaaagttggacaacaacaatatctaccttagggggttactgcgaaatttaaaggagatggttatctgtaagctctcctagctctgcatttggcacattataaggtcttggtgttagctgctattgtgatgagccaggtgccgtgctgggcatggaatagagagagaaaaggcactctctgccttcagggtgcttacattgcattacatcttttaagatgcttcttctgtgggtgctctctaaagggaaatggatattgaacttgggaaatacattgcaagtcatctattcaaatctactttccactgtaggaatatcattttcatagtaataatggctagacatttaagcccatgattttgtcccctttttagtgctattgtgatatggaaagagtgcagactgtggagttaaccacatctgggttctcttcttcattcttctatcgcgtgacctcaagaggctctctgagccccagcctgctcatctctaaaataggatggtggcatcactcatgtttggtcacaaggtggtcaaatgagatggtgcacatgatatgcccactgtctctgcacaccactgccccactgtaaatagtcattttcttcaaataaaaaatcaacccaggcctttttctgggtatctgtgaatgccaggacagctttccctgttctcagattaaaacaatatctatataaattttaccagttgattatatttcaaccttcctcaatgagacactctttaaaaaaggaacataactgtatataaagtcaatctgttatcttccttgagcatgtttgttcattgtaaattcatctaggtatcctctcatgtagccatcatttctctttctggtccacagatatcccatgagagagtctttaaatgattttttggaatgaaaatatattacatatatgtctcctaacctaggagttagtgaggctaggttgacatgatttcttgctgtatccttacagtctcctaatggtcatgtattgaagacattagttcttctataagatagaagaaaacataatgccctaaatattttataactttaaattttatgtacattcattcaaactaaattgttatttacagatggaattatagcagcaagtcagtaaactcaaaggtcaagtccaataaaatccttagtagtttactcaaaatgtgaattggacatgcagacacattgctgaagagttcaccggaagaaggaggcaaaaaacaagtgatttcaatctaagcctagttgtttaccagaatttatctctgtgattttttaagcttaatcgtcgttttactgtgcatcatcatccattcatttagtcagctattttttaaacatctagtgaatacttgcttgtgtgagctttaatgtaatgccctggaaatataaagatgactatacatgactcctcaactcaaggatcttactatttagcacagtaaagacacagataaatagtcagaagtcatccttaaagtgaaaatctgggggggaaagaagtatgtgaaagcttagaggattacgtaaataagcttgcctggagggtcagatatgtttcctataggaggctaattttgagtgtaacctgaaaggcctcatgggagagcacaggaaaaggaaaaatgagtaggcagtcccaggggaacagattagcagagacatctcataggactgggaggtgcttctgtattgctggagcccagggaacattacagagaataaggggagattaggtgagttggagccagtctgcaaatggcctcgcagacctcgctaaggaactttaaacaatttttgcttggcaaatgagtaagtggctcagatgattcccgtgtttgtaaaggatggatagatttcacacatggaggccagtctgcagggtatggcactggttcaggggacgtgagaaggcttgaaaaacagggacagtggaattagaaaggttgagacagattttaacgtcattactgaagaatgacagaacttgttaactctttgcgtatgcatagaaggggtggggaagagggagagaaaagattcagaggtttatcaaggaactggatggatggttttgaatggttatgctcttaaccaaggcccaggtgggtgagaggaaggagaatgtcctctaggacctagagcttgggagaaaggtcaaggctagaggattggatctaaaagtcttcaccgcagaagtggtagttagaattacaaagtggaaaattcctacagatactatggaggccagattagagtcctggagggaaagcatgacatttgaaaggaagcttaataaataagcaacagaagagattaaggaaacatgtccagaaagatagttggaaaactcagaagttctctgaaaactgaaggataagtgagttgtcaagaattagggaccagtggccaggcctggtggctcatgcctataatcccaggactctgggaggctgaggtgggtggatcatctgaggccaggagttcgagaccagcctggccaacatggtgaagccccgtctctagttaaaacacaaaaattagccaggcatggtggggcacgcctgtgctcccagctactcgggaggctgaggcatgagaatcatttgaacctacgaggcagaggttgtagtgagctgagatcatgctactgtactccagtctgggtgacagagggatactccattgaaaaaaaaaaattaaaaattagggattagggactagttaaccatttcagaattgttagcatggtgaagagtaaagactagaaatcaacaagtagatttgccagttaaaggaggactggtggctttttgtgactaaacacagaaagaggcagatgtgtgtgatgatttgtatgtgtgtacaatttatttgttttgttggtttaaaatgagtgcacagcagcgttcatccacacccatcattactaatctatagccattctaaaattatgggggagagttcttcatttctgagggagctcacccatgagtcacagtgttctgcatcttatagaatctttgacagtcatcaaagagattcagccaccagggaattaatttgattggtcaaatatgttttcttatgagtaaatgatcctctcagctcttttcacccacatatacccgacaaaaaaatggtttcaggaaacacagatacacagaatatctgtgcattaattttatgttcatgggaggaatacatttgtggtttttggaacataagtatagatacttatctaattgtcaaggagtcctagattttagactatgaatagtctgtaaaattcggctcctgttgttgataagagtggctggtttgcttcatgtgttactgtgaagggaaaggaatacgatgtgtgtaaggcatccgtgctggccccggacccccagggagctgggggcagacccctccagaccccacagcatgatgtcctacttctgcactgtccattactgagccacattcctgtagtccctccagggctgacacttgcatgaagcagctcaaagatgtttttaaagcttgattttctttgtgttaggaactactttgtgctcattcgagttgtgattcctgatcatttggggtgcaagcgcagtgttttctctgagaaagtcagagattctcagtgatgaaatttataaataggtgcctgaggaagccttgtaagtttttttcctttgagataatgataagtgacttggggttgattttgtttccagtatatctcaggggttttgtggttttgtatgtgtgtattttaagtcactgaggttacaaaggagagaacagagagctcgtaataaacttcaccaaatcacctttaattccaaaagacatcgaataaacttccccagatcaccttaattccacaagacatctaatactcacttctgtctttacctggagagaaagactcacagctcctaagctggcttttctaaccagcctttgtctagaatctccaccacctctctcctccccacacactccctaccttatgcctccctctgtgtgtgtgtgtgtgtgtgtgtgtgtgtgtgtgtgtgtgtgtgtgtgtgtgtgtgtctgtctttctcttttttctctccctctacttttgggtaaaaaagctttaaatttcttagcagacctgatggtgttatgttttagtaaagaatattgtgaactggtagtaacgatcattatatctgctttttgtttactgttagcagatccatctctgctctatcagaacctcagacctgtgacatcccagctccacaatgcacttaacctctcccatgctgggagattccataggcgaacagggctacttccagcaagccgagctgcagccagcaggaaatgaaaccgtctgccacagatacttatttagaccaagctattaatgtttagtggcagaaaagtggctccctttctcattcgattgaatgatgaaagcatgtctgtttccctgataagactgtggccagcttggctttcggtctgaaaggtggatgaagatattctgtctgcagagcgggctgcagggatgtctggtttcttttctctgtatctatgccagagtgtatctcccttcttcatctcacaaaccatttttaaacttaatcacactgaacttttgtatatgtttgcctgacaataaatgggtctggggttacgtagggagagtgtagagaaaaatacatctttattaggagagaaatgagaaactgctgtcgttgtttaaaataacccttaatgtaaatgagcccagttatagtgaggccaaaatgggagaaactttttgttggttttgaaaaataccaaaataaaaataataggaatttaaaacaagttttaacaaattctgtaatgaaaagtattttttattctctcacatattcctctctgatattataaaacttaaaaatagtctaattttcctagactcaagtttttcttttcttaagaacttacttttatgcttaatgccctaaccaaatgaagctgttaccacttagaatgtttgcttgtaaggagtaaaaatttatatagatgtttcaaaatttatttagcttctctttaagttacatttacaactttatttttggaaaataaatttattataaagatttttttaaaggtaaatttgaacttaagttttaataagtaaagatgttttatattcatatggtcatttttgcccaagacctagaaaacagcttcaactgaggaataaccttatagtcatattcctcaccaaatgcttcacacctcccaggggtagttctctgtagcatcacaaactctgtcattaccaatcaacaatttcacactttttttaccttgataagcttgaatttcaggttttatattcattccagcattactctatctttatgggaacctgttgaataagccagttggaggatgcaatagcttagaatcttatattctttgaaatgtggagccgcgattccctgcctatctgtaagtcagcctttggggcttccctaaccttctctaggtgcgactgtgaacaatgaagtatgtgggagctgggggctggggagaagcctgcgacaactgaaattactgcctgtaagtccaggaactccattcgttttgttagaaacaaactcggagtcctactgctctcattaattagcttagtcatctggatttctctagagaagacagagattgtgaaaaggaaatagagtttctgcttaaggtaggcatgctggctctatcaagaagtgatcacagcctatcatcctaagaagaaacagaagacataataagtacaaacaaaaccggcaaagtacagtgttgggtcagggactgggcagactgccttacatatctcaggaggccttagtccttaggaagggggccctgtattacagcacattacaacagtgaagtgtccaatgatgaacatgggccatcaactaaaagttaaatcgttcctttttttttttttttgagacagagtctcactctattgcccaggctggagtgcaatggcatgatctcggctcactgcaacctccgcctcccagattcaagcaattctccagcctccgggtagctgggattacaggcacccaccaccacgcctggctaatttttgtatttttagtagagatggggtttcaccatgttggccaggctggtctcaaactcctgaccttgtgatccaccctcctcagcctcccaaagtgctgggattataggcgtgagccaccacaccaggccttccatttctttaagagagagaaaagtttaatttgtttcaagaaagactattcaaaattggttatacaaagatagtaccgtaaagggggcaagtttccattatctgggaattacacattcattgattaatctcactgtttctgagcattgctagaaggaaagtttgcttcgagatgaaatttattttactcacattggacttacctttgaaatttattcagcgtagttttgtttctgaagtttcatagacaataaaagatattgtaaaatattaaaataaacatcaagttttatagccattatctaccatttagtgtccatctcttccatctaaaagataatgctacatttcctgttttctagtctctgctttctgtgttgtttgattttttttccccaaagtcactaaaagtgatgaatgaagtttcttttcattatcatatggtttggttttgctcatattttccttctgttatctggattgctaattagaagttgcaactgttaaaatgagcctatcacagatgtcatcttaaaatttttacttccctttttagttctctaatagggtgaaatcttgattcacaaatgccctgggtagtccccctttgtgtgaatgcatccactaaaatatatatatatgtgtgtgtgtgtgtgtgtgtgtgtgtattcacacacacacatatatacatatgcacacacacatatacatatgcacacacacatatacatatgcacacacacatatatacatatgcacacacacatatatacgtatatatatctcttcatgaatcatgcacagagctgtgtctctgaacagcatccatagacccccaccaggattagaagttaaactcaagtgcagacacagtttggaagccttttgaccatcttcagccccgctctggtttcctctctcaggacacacttccctcttcatggtgattgcgttctcactctatcaatgaggtattgtccctctttttactttctcctccttcccaaacaggacatattggtcattttaatttattgtttgaaatgttatctccaccatgccttttcactaaaagcctttcaagtctggttgtgacatgaccatcttttttctacttagttaagaaatgttaggcatcactgaatgaggagtgaggcaggagagaaagtggatggaacacgtacaaacagttactcaatagactcagagtggcagctgatgaaatctgccaccgtaaaccaaatggagagcccaagtaggaagatcgaatgttggcagctggctcaggctgtcttcgtaccgacttctccctcattatttttcttatttctgccaactctggcaacatagtcgacctccagggacacattcttttttcctgccgaaagtgtggaaaaatgtcttgttgtcagagttttgttgaaataaaattggcttttggaagcagcaacatttgctgggaagcttaggaggagtgagactcaggagcaagttgatgtggtttgggtttgcaatctggtacaagagtgggaactgaggaagtgtcgttgttttgggggtctggcagcaccgctggggcttcagggagtgttaatgcctcagttccagggcaccgtttctcagggtggtccttacaggccacctacaccagattctgccagatgctacttctgaaagcatcctagagtgactaaatcagaatacctaagaataggcctagagagctgcattttaacaaattctccatgaatctcctgctccgaaattagaagaggaactatattcaaggttctggggctcagttttccagctgcccaggtcatttatgtgtgcataactagaggcgcttagagtgaggtgactgactcatcctagtcacacacataagaaaccgaggcataaacctgaaaaccagttggaactcttgcctccatacaggaatcctatggcagcagaaaggagaactgttcatagttcttgaagctcagtttgctgtttcttgactcttactcaacctttatatgttattctttcatgttcaatccattttccttttccaagagaagtataaacgattaagatgtgcctgttaaacaaggctcggcagtcgcttactccagaaagatctctgtaaacccagccttcccacccaggatcctcctccaggacacagttgtaccttatacgaacctgggtggttgctcttaatgcaacattgtcatttacttgctcatgagtatctctctcctactagacattgaatttcattgtccctataatgttgagctgtgcctagtgctggacctcgagctaatgcttcagaaatgactgaaaaatgaatggatgagctgaaagatcttgtgaggcctccgatgcacattctcctcagtttttgtggtctctgccataaggaatgactggatgtttttgtgtaaaattaaaaatgtttgtattagactcggtttcctgtgatccttacaaaaatgtgttttgagaaaaaaataaataggattgggagaaaattaagatgctttgaggatctaaatacttgtaaagtacattttattggaatgccacaaaatgctttaaaaagctccaagtaaatttaagaggagatccactggattttgactaagtgctgaaaaaaaaaaaaaaaacagtttccttaattccctatccaaatacttcaacttaaatttactggtagctgtttcagagggagatggggatgctgcaatccttagtttgttataaagaaaatgtttttatcttcaaatgtttagaggaaggattaaaggcaatttatggcttgggtgaaaagtaataaaagtggtaacaatgaagtatcttctaagttgtcatcattttctggaattgctaacaatatcaaccaggcaggcattttatatctgaaaggagttactttcatttgtcatgctttaatataaactataacatcaatcttatagctgcaatactgagttgtttgtttgattctattgtttaaaaagaggaattgatttagttgtaaaggagatgaattctgtcattagattttttgccacagggatcaagaaatatatttataattcacttctttcaggaaattaggctataaggtctatatgaaatgcattttattaagaccaagccacagcctctttggtttctccagaaataattcatttttaattcccaaggaaaagtcacagtaataaaaaataaattttacctgttagattattttccttgtcatagctcccctttttattaaaaaaaaaaaatccaatttacagatttcttactatttgtttaattaaaacaataataaattttatagccttttacaatgcataaagaactttttaaataaaattttactccgtctttgcaactctgtgcagtgataatgaagataatttaatatataatggaaacttttcactctgtgagggaatagggaggttcaggggtacaagaacattaccggtgtcaaatagcagagccagaacttcatacaggactttgctccaaatagcatcttcttttaactatacctctggtcagttcaatgttgttttccttgtcatatatgcttaacaagaaatactagaaacattaaaatgttattactgctcactctcttttttgttatcaaatgattggttcccatgctagatgaagctcagtttttagaaactgctcaagtatttattgcaagtgatttgtatgcatgagtgtgtgtggtataggaagttaatctgaaataattttaagtaagcatggcatgtaaattttcttttttttttttttgagacggagtctcgctctgtcacccaggctggagtgcagtggcacaagtgcagtggtgccatctcggctcactgcaagctcagcctcttgggttcacaccattctcctgcctcaacctccgagtacctgagactataggcacccgccaccacacccagctaattttttttgtatttttagtagagatgggatttcaccgtgttagccaggatggtctcgatctcctgaccttgtgatccacctgcctcagtctcccaaactgctgggattacaggcatgagccaccgcgcccagccggcatgtaaatttttatgtgacactttttttttggtggggggtggcaggggagagggtctcactgttgcccaggctagagtgcagaggtgctgatcacagctcactgcagggcacgcaccaccatgcccggctaagtttttgtattttttgtggagtcagggtctcactctgttgcccatgctggtctggaactcctgggctcaagcaattcacccgccttggcatcccaaagtgctgggattgcaggcatgagctactccgccctggctgtgatactctttaattattctaatgcttctaacttacgtcatggtgccaatcctatttatataatagaatcaatctcatactctcagctgacaatgaggggtatttcattttttacttgtatataagattccttttatataggatgaaatgcatacacactctgcatagaaattcttatgtgtttgtatattactccattcaatcatactatgattccaagttaagaactcctagataaattagcgtctgtagctgtaacagttgaggctttcaattcaaatgtcagataacattcttctgtgtattgtattattttctgcagtaattcaaatctttattgagttgaggtttgctcacttactataaggtagaatgaggtgatctaagtaggttttgtttaaatacatgtgtcttctccccatcagagtaaaagaagccgaagaggtgtgtagacagaagaaaggaaaatcactttataaaataaaaccaagacatgactctggaattgtaagtattactgatttttaacttgttattttctttggcttttaaatcctattttcataatatatacaaactcataatattttaattatttttctactaagtgtgaataaataaggagcttctgacttcaagaatctcctttttcttatgcctttaatcaggcccagaaggctaagagtcttgatattgattattcaaaacttaagaattgggctgggggtggtggctcatgcctgtaattccagcactttgggaggccgaggtgggcgggtcatgaggtcaggcgatcgaggccatcctgcccaacgtgatgaaaccctgtctctactaaaatacaaacaattagccgggcatggtggtgtgtgcctgtagtcccagctacttgggaagctgaggcagaggaatcgcttgaacctgggaggtggagattgcagtgagccaagattgcaacactgcactccagcctggcaacagagtgagactttgtctcaaaaaaaaaaaaaaaaaaattaagataaatctactgaatctactgagggtgtgcatttatgtggatatgtgcatgttggcaggggcagggtggggagaccatctttcactttctttgttacacacagatcacggcagaggctgtatttgagccacgagtgatcattctaattggattagatccactgggatgtaaagttggtgggaagcgccaagagcagtgtgacgctttgcccagggtgcccagaccccgtttatatccacagatggctcggcagagttggctgccggagagtggtcagtccagagacggagtttaacaagctcatttaagtttcctgcttgcccactccccgctttaaaacaaaatgccaggttatccaccctgggagggaagggcttggttaaaatgacaaggcttttccttgtgatactgaggatgttttgttgactgttttgagggattatcacttggtaccacagtgtaagtaaatgttttaaatgaaaagttgagttaggccttaggataggaccattctaaattgaattagtctaatgtagtctaaagggaaaagacattaaaataacccaaattgggatatgattaaatagccctgtttttttttaaaaagttaggaattatatcttcatttagaagcagtggtgccttcagtttctctgtatcaaaatgatcttatctaatgataactactacatgatagttcagcttatcttctgctcctgatgattcagtcttataactgtattgaatgtggaggaatagttacttattagtgaacctcaatcttgctattatgagtacagaagataattagagtacatttaccatgaagtgaagcagccacttcagttttcatatttatgtatttgcatgtaggattgaggatgagaatggagagtttgacaccctctcatattggttagaagttaaatttttaaaacttttttttttctcaaaagtatttggcgatttgtcttgataaaagtgctcaaagataacacagatcccacttatacttttttcctttatggactggtagacctttaaccttgtcccacagaatttgatccaaatgaaaaggtcttttttaggctactctaaattctttccatttttaaaagttctttctaactaaaacttttatctggtgtatttgttttcagaaagcaaagataagcatgaaaacttgaacaatgaaaagcagaatgaaaatgagtcattgcaacgactttcacaaaattcagctgacctgagagtgggagggaaactaccgtcattctgctcatgtttcttcttgacctcttgcataatctttttgttttctagacagttcactaattgttgaattttactgtatattcatataaaaatgcaaacgtactagaccagtggagaatttgacaccttttctttttgtaaaagtttatggtattataccgatagaccaaaacagcatgtgtaagaggcagtatctgcactaattctcaacatgctaaacattaactacaattcactgttgtgagaatattcctcgtcacagcaaaaacactttcctttctactgacaaccagtcctccacatcacagcatttagacatatgggtaaaatgttatttctagtgaattgtttgtatcagtttcatgtctaagtataaattttctattttaaaatttaagaaccgtttataatcagtgctttcccaactcttgggttgctctccataactatgtatttgtgaaagaaaatggtcattttttttactgaagtcatataatgacttgggtcagctcgtaatgcattgtgatggttttgtatgagctgggtgtttttttccattacttttaatgatcttcgttgcaagttatagttgtggataaaggggagaatttattgctcttgcaaaccaattatggaaagcaacttaagaaaaccaatgttctaaatcataattgtttgtatttatgtaaagtatggtctcttactttttagtttgtagtttaagtgcaaagaaacagtagtggttttttttctattgttttgtagtcttcctgtccccttcagtccctccagtgtgtatattaccattctccaatgaaataatagggcatttaacaaagatcgctatgtgcaatactgtatttagtgtttctatttcaatttttctaggatgttaatttatatgaaaataaaatgaataataaaagaataaagatacttgcaaaagacagctgtcatatttaacatggggtggggaataagagaaggagggaaaataagttaggcatgctgcatattcacctgcacacacacacaaaaatgtgtgtacagtttcagggacttaagaacttaaagcccatcaatgatacctaagtaagaaatcctggtaaaatatttattcctttgtggcttgaactaggatctctttcctgatctcccaaagatcttctggtcattttcaatcagatatctcaccatgccttaaaattcattatgtgtaaattcaaactcagcttgtcatcttttccctccatacctgctcattcttgtgtattatctatctcagtgaacaaagccactattcattcagaaacccaagttcatcttttgacatattacttatcacaaatgcatacatttgtctctgtcttttctattaaagtcttagttcagaaccctcattaattcctttattaacctactcattgttctcatcttccgagatttgccctgcaacatatttttaaaatttgaatccacctttttctaaaatacaaatctgctcatttgaatttcctacttaaagcattttaatggccacatacactaagatatgtggcctcaaaatgttatctaaatgtttaatatggcagacggagtcccaagcagtgcctacttacattttgagtttagtctcttgacttaacctaccttgaattccagcctccagccaaactaaaatacctctaggctaatttcctctcaactatatgtctttccgcatgtttgccctcagcttgaaacattgtcaacatttcatggattcactaataattgtatctgagtttagaaggcatttgttccaggatatctcttgacactggtctccctggctcctagcgtgtgacagagactcactacatatttgctgatgaaggcaagataggagtgttaactatgccagatgcttcaggatacaagtaggttgaaaatggaatgaagtcccttgtttgctgaaaaagggtagtggtaaaaacgaaggtagtgttaaggaagtagaaaagggaggttcaatacgctccatacttggaagacttctgtcattcaagaaacattgtgctgtgagttaagaatttggatttcccctctgtttccaagtagaaaaataacatgaaatatattttcaaaagtatagatgcagggtgggaagtgggggttgcaagagagtgcatgaacaagaggaatctctatggagtaaagacaactgatcatgccccatttgtagagggaaatcaacccaggatcactaccagagatgtgagacttacctaccagtgaggatccactgaaaacagctgcagaggatgccacaggatatggcaaacattagccagccagacacatggtagcaggagaaggcagactacactgggccagctaacttctgggccatgtctgtacctgcagtgtctctaatgtcactgacacacagcccagtgccacccagaaagccgggttctggactaggaatgggtggacgcaatggaaaatgaccagatacagagagagagaagaggaaaaagaacgtgagcactctctcaagacgtctctgcaaaacacacatccaaagcacggaaggaaaattctcaaggagaaagaataaaacaactcaataaacagcaaaatgaattcacctttaaaatgcaaacaacacggcaaaacttagataatagttatatctagaatctgtaggctaggggtggtggctcacacctgtaatcccagcactttgggaagccgaagtaggtggattatgaggtcacgagttcaagaccagcctggccaagatggtgaaaccccatctctacttaaaaaaaaataaccgggcgtggtggcaggcacctgtaatcccagctactcgggaggctgaggcaggagaattgcttgaacccaggaggtggaggttgcagtgatccgagatcatgccactgcactctagcctgggcaatagagcaagaccctgtctcaaaaagaaaaaaaaaatctgcaaaggaacttcaaatatataatcattgagacacaaaaaacagaagctgaatgagttctagatgggcacacattaagtgacaagtgatttggaaggtagcaccaagcaatttagtgagaccacacagcagagagagaaaatatttgtaaacatgtaagagaagttaagagagatacaggataaactgagagactccaattaaagaggcagtccatatggagaaattaaaggaaatagtagaaaagccaaataatggcttggaggaaaaaaatggctgagaattttccagaattgaaaaaagatatatcctctgcttaacacgtatcaagtgccagacagatatataccaatacatttgcaccaagaaaggtcaaagtgaatctccagctaggtaaagagaaaatttgaaaacctcttgaaagaaaggacacgttagccgggcatggtggctcacgcctgtaatcccagcactttgagaggccaagacgggtggattacctgaggtcacgagttcaagaccagcatggccaacatgatgaaaccttgtctctactaaaaacacaaaaattagccaggtgtggtagtgggcgcctgtaatcccagctactcgggaggctgaaactggagaatctcttgaaccggggaggcagaggttgcagtgagccgagatcgtgccattgcactacagcctgggtgactgagcgagactccgtctcaaatcaaacaaacaaacaaaacgacagaaagaaaggacacgtcacttaaaatgaaacggcagttattctgaaagtagatttgtcctcagccacaatgtatgttagaaaatagtaacgtcttggctgggcccggtggctcacgcctgtaatcccagcactttgggaggctgaggtgggcggatcacgaggtcaggagatcaagaccatcctggctaacacggtgaaaccccatctctactaaaaatacaaaaaatcagccgggtatggtggcgggtgcctgtggtcccagctactcgggaggctgaggcgggagaatggcgtgaacccgggaggcggagcttgcagtgagccgagatcgcgccactgcactccagcctgggcgacagagcgaggctccgtctcaaaaaaaaaaaggtaaaacgtctttaaattgtggaaggagagcagtgaattgagatcattagacccacttgaaacatcattcacatggaaggggagagagagattttcagacatatgaaaagcacaggaggtaactacgcccgaagcctcactgaagcgcctgctgcggggcacatttcagcaaggaaaaagatgcaaacgaagtgagggcctgggatttaagaaatcacagaagccatagaaactggtgaaacaaaatcaaccctagaatgtaaacagtaacaattacaactaatttttcatgtttacaatgggcactaaaattttagatagtaacaacttgggtgggagaagttcagggaatagttcaaacacgcgatggggcatgtgctgctctcttcattcattcaattctgcaaatgtttagagtggtcagtgtgtgccagaaactggagtaggctttgggagtcacggacaaagaatgtcccatcctcgtgtaacttatgttctaatgagggagacaagcgatgtaaaataatatcaggcaatataatatttaagaagggtgacaaataacttattcttcaaaccagaataccattgagagtaaaagtgaggctattacacctggaaaatctccataaattgataccactcccagacaaactctggtcaccctacatataagcactacgtgagctttaagtgttatgaagagacatagaaagccctatctccttaaaaaaaaaaaaaaaaaaaaaaaaaaagaatggtcaagtgtggcgtctcacagctgtaatcccagcagtttgggaggccaaggcaggaggatcccttgaacccaggagacaagcctggtcagcttagggaaaccccatctctaaaaagaaaaaaaaattttaatagccaggtgtggtagcacttgcctgtggtcctagctacttaggaggctgaggtgggaggatgagttgggcccaggaagtggaggctgcagtgagctatgatcacaccactgtactccagcctgggtgatagggtgacaccttgtccaaaaacaaaacagggagaagatggtgataatgaatatgtttggactttgttacaaaaatatgaaagtaaatataaattaaacatttagcactgttcattaaaagaacaaaaagaattaaagaaggaataagaaaaaaaaacatatcaactaaaggtcaatccaatccaactaaaagccagaaaggtaagaaaaaacaaagccaaaaaaaagtatggtaaaaagagaagtgactgtggatggtaggtgggagaactcaagggtaagtggatgggaacaaattgttacaagctctgaaaatcctgtgccattgttccttgaattacaccagctgtcattagcatttccacttcccagctaatcggtgaactcagacttttggaggttgtatttgtttcctgtgaaacacagttaaacaatcaaaagcaatacgaagaggtttgatgttctaaagtggtgtgacaaaggggacattcacccccttctctcccaaaaatcattccaaagcaacaaggaacaaatatgcatcatttttgatttatcttcaattaaaattagaggtgtcgaaaacccaaaccacaaaatatacagaagatctcccaaatgtgtgggtatggaaaaaggcagagaggatgctcatgaagacacgtctcagaaaaagcaagaaagtctccttctccaaggtgaaaccatacccttaggaggtgttatctcaaaatccttctccaaggtgaaaccatacccttgggaggtgttatctcaaactgtgtttgcaataatggacctcggtacaccaattggtattagacactcccctgaatgtctcttactattttttacatcaggaaggatgcctacatgagaaattaggctgacaaaccatatttgcaagaaggtgtctatcaataagacaaaggtgaaggaagagaccctgaattacagtagtaaatactagaacgagacatgctctccatcgtacttcataatgaaatattgtctagcttgaaacacaaccctactgtctccccacacaaactattcaatatttgcaaatagctggcaaatatcattaacactgctatcaaaccaacaaagattatttaagtgagaatactataggccagcttattgaggaatagcagtgaaaaatactaaacacgttagcaaacatcagaagggccatggagaaatgggggttattcctggaaggctaggatgatcatatgagtattgccttgcatatttcaatatatgtgtatttaaaaatcatatgcatgtgtggagaaaaaaacacatgatttcctcaaaatgctaacaaattaactaatttttgaagaaaaaactctgaataacataaatatgtccttaaagaatcaaatacctcaaggtaaagtcagcctggggcataaggggacgctttaggactatttctggccagacatggtggctcacgcctgtaatcccagcactttgggagtccgaggcgggcggatcatgaggtcaagagatcgagaccagcctggccaacatgttgaaaccccgtctctactaaaaatgcaaaaattagctgggcacggtggcttgtgcctctgtaatcccagctacttgggaggctgaggcaggagaatggcttgaacctgggaagcagaggttgcagtgggccaagattgcgccactgcaccccagcctgggtgacaagagcaagactctgcctcaaaaaataaaataaaataaaaaaattttaaaaaagaactatttcctttaaaactcagggacaagaccaggttgtctactttcacctgctatttatcactgttctggcaatgaacaaaaaaaggtatacaatggaaaaggatgaggtaaagttaatttttatttgctgtttattagattatatgctcaaaaaacagacaataacaaaacaactattaaagataataatagaatgacataaatcgactaggccaaaaattaatatacagaaatcaagaactttcatgtaaacaaacaatacccagtcagaagataaaattgtgaaatatccccacttaaaatagcaaacaaaaaatccaaataacatggaataactgtaataagaaatgtgtaaggtctatatgaaaatagttgagagactcacaaaaatggaagggcaatgacaatgccagtattccctaaacaaattataaatttaatataaatttagtgcacgccaaaacatttaatgcaatccaaataaaaatacctgcagaatgtttcatcgggggaagagggagggtgagaactaaagaagttgacttcaaagtttgaacataaaaataagcaagaacagtcaaggttttggggaggaacgagtagtggaaagagaaacttgcccaattacattttacacgttagaaagtgacagtaagtgtttgtaatagcaaaacattggaaatgtctaaataatgaagtaacgtttaggctttaaaacagaaaaaacagctgggtgcggtggctcacacctgtaatcccagcacttcaggaggccgaggtgggtggatcacctgaagtcaggagtttgagaccagcctgaccaacatggtgaaaccccgtctctactaaaaatacaaaaattagccgggcgtggtggcaggtgcctgtaatcccagctactcggcaggctgaggcaggagaatcgcttgaacccgggaggcggaagttgcagtaagccgagatggcgccactgcactccagcctgggggacagagtgagactccatcccaaaaaaaaaaaaaaaaaaaaagagagagaaaaaacaggccctttatatactgatgtagatgtacaacattttattaaggggaaaaaaatccataaaaagtttctatctttgtccttggggggggggaaatcaggaagaaaaacagtgtttatagtacagtctcatttatgaagaaatgatggcagcatgattactgaatttcaagaaattaacatacatagaatatctctggagtcattgacaagaaactgattattagttgcttctggagaagaaaaacaggtagaatttgggatagaggagagagaattttaattgttatttcttttggttcttttagattttgatgagatgaaaaaatcagtcaatagagaaatattttataattaattttgtggaatttatctcatttcaaatatcaaatgacacccagctggtcaattctgttaaatcaaggagacaatacaggttgggtggtttacgtgtttccacatcatgatagcagctctatcagatgtcctctccaaggacgatcaggacaattctcactctagaccactacagagagctatgtgtaaggctggcaagccaatcttgtttctctgttgccagaatgaaaaaaaggtcggggttgtctgtaggccactgggcacattttctcctatggtggtctgattgtgacagtaacattgggctttttctttcacaataggcccattttggttctacttgtgcaaaactccctttcacctcaattttggagttgcttcatactgccctcctggactatgtaaatgttcctaatctatagctccactcctatcggatgctctaaagttttccagagattaacatcactttctaatccaggcaatggatcataggagcaatttacactttacttgttaatcaacaatgagaattatctgttggtttcaggctttttggagtcagaaactggcaatatgcttaaaccatgtcccaacaagccctacgataatgaagttcaattaatctaaattgggccccgcaatacttgttatttcctatccacatattttaccttataaatgctgtctgtaattagtcagcatacccttaaattagggcgctcatatttttcaagcaaagagtgaaaataaaaaaaaaaaaaaaaaaagagtatttagcttacagaatttcaagatagatctagaaatagaccccatccacagagttcctcccagcacagggaaaaccagacttgcggtgccgatggtaacacaaattgtatattctttggctcctcaaataaaacaaaaattaaaatatagatataccgtggtgaaaacaaaaacagaaagcaagaaaccccagatgtaaatagttggataactctcaaacctttgtgctagagtttcaaacatcaaatttaagttttccagccttgattagacacccaattcataatttggtatccaatgtctccttcccacaaattagcagttgcatcgtgttaagtaactatggtcttgctagataaagaatgtccgggcagcagaatatgacagatgaaggtggtggtttggaagacttcatgtgtgcctagtttattaaacacaccctctttgccttcaggaatgtgagttgggaatggggctcaggccatcagtgcgtcatcaggaagatgtggcattgctcaaagagcagagcaaggagggttgccaccaggaaggtgaggaggagctggaattgtctatggcaacagatatgcatggaaggagggaggattagaagcctgtgtagagcaagaggaaggcagtgaaaggaaggatcaaaaggttccacttttacatcaggcaatgggcagacattgcctgaggaacgttactcattttctctgatgtttcttcatctccgtactcttaaaaatttgtttttttttttctctgagatggagtttcactcttgttgcccaggctggagtgcaatggcgcgatctcagctcactgcaaccttggcctccaggattcaagcgattctcctgcctcagcctcctgagtagctgggattacaggcatacaccaccacgcccgactaattttgtatttttagtagagatggtttctccatgttggtcaggcttgtctcaaactcctgacctcaggtgatccacccacctcagcctcccaaagtgctgggattacaggcatgagccagtgcacctgccaaaaagattttttaattgacaaataataattgtacatatatatggggcacatagtgatgtaacatatataatgtatagtgatcagatcagggtaattagcatatctatcatctcaaatttttattatttctttgtattgggaacattcaatatcctccttgtagctatttatatgatatatgatataacatattattgttaacttcctattcttctaaagaaggattttttaaggttacttggccctgtgttcctccactgtccctattagaagtgtcatatatgggctgggtgtagtcccagcattttgggaggctgaggtgggtgaattgcttgagcccaggagttcaaggaccagcctgggcaacatagcaaaaccccaactctacaaaaagagaaaaattagccaggcatggtggcatgcacctgtagtcccacctactcaggaggctaaggtgggagaatcgcatgagcctgggaggttgaggctgcagtgagccaagattgcaccactgtggaggacagagcgagactccatgtcaaaaaaaaaaaaaaaaagagagagagagagagagttggaggagacttgactgattgagaccagggccatgatcccgccactgcactccagcctgtgtgacagaatgaaaccctgtctcacaaacaaaacaaattaaaaaaaaagtctcatgtatgttcgtggatttagttacaatctttttgcttcaatatcagtttctccagatctagctgctcatataaatttgtcctatttcttcaaacagggaaaaagtttcatttacataaatgtttcactatcaccacagacccaacatctataaaaacctgcatcagtattttctgtaaccggatcctcatttatcttgggctgcccatctgttgcactaacacccccctctttcatcaccgcattctgtgactacttcacatatttgtctcttctttcagatccaattctattacctggtctggccctaaccttcagtttatgttgttgcaagagcccctgagctggcctatctggacccagattctgttccctccaatcacctagcatgtcgtgactagaataacccttgatccaatctgtccgcgattttctatttcctatgatgtcaggtggaacttgctctgcctctctttcaaggccctccatgttctttcttctctgtctcctccttccccccatgctccagcccccacacctacccctaacacacagggaaaggtgactattatgttgctctccccagataccgtcttcagggctgatgtaccgatcccatctcaccatctcacctggctgctgaccctcgctgaaactaacagctgggtcctcactgagatttgcccttggaggcaatacacgccccgtcctagggatggcttgtgctcagtgactgagggatgtgggctacaaaagcctgtctctctttcttcaatttggcaccactctaaaatgcgccccccagctccagagctccccacaggatcagacaagtcctcatttatgacctgatggcttttcccactgcacagtcctcatgtgcttacaggtctctgttctgcaagcattcccccaataaaccttctgctcacaactctgtctcagagtttggaaaaccaatctaagatagacaattccagttcctggagaagaatactcgaacccaggatttggagaaagctcagtcgttgggcagctgctgagtatcggtcctggtgtgctgtagccctgtgttgttaaaactcttcccagaggtaaattaggatgggacactggttgggagactcactggctggtgcaatattgatacaggaactcaaatgaaattatttagacagataatcagataatgagggtaagagagtcctcaataaagtttcccttttgataaaaagcagcccccaaatcattttttttaataacaaagagcagcctgaaatatcaagctgcagatatagaaaagcagccagaagcttgcacaggggaatgccagcagctgtgccaataggataaggcacctgggggcaaagcctgttcctcatggaggctccatcttgacttttctttgtcacttgtgtgcaatcagggaacaggcagcatggtgctgggcaggtagataactcatctgcataataaaagattagggtgggacggccagcttcactatgtaaatgacacatctaacccaaccaatccattgcaccctatataaatcagacaccgcctcctcaaactcatctataaaaccaactgcatctccccacgagtggggagatccactcggaaccccttccctctgcacaagggagcttttctcttttgcctgttaaactgctgctcttaaactcactcgtgtgtgtccgcatccttgatttccttggcatgagtcaatgaacctcacatgtgaccccagaggaatgatgctgctttgatatctttggtgcttaaaagttgtgaggggcagagtgattataaggactttgggatcgggtacctgcttacaagtggtattgatttgttgaagagataataaaagactcaaagtgatgaatcaccaattcagacagaatgtaaaagccatagataggatcttctaggtagcattcaagtaagccctagtctcctgcagtcagaagaaggctcaattgtaaagaggagctctgtttcagagaattttgtattctcagcttcagcaagtctcttgtcccaagattagaaccctaatagggaagtagaacccctaaaattgggagaggagtacctgggtagatgagttgggactctcaaagtcccctgagcctgctaggtctgttgttagactctcatctctgctggggatctgctggattggctaagggaggaaacggactgtacggtgaaatcacagcaggagccgggagaagaaggatgggaatgtgtcccaaggctgctgtatcaaggaagaagagcaggacattaagttggataatgcttatcaccatgggagcagtctcccatgattcaggatttgaacctgtggaaaatcccccaggaatggtgataataagctactaggacaattcttggagtatctcaaacactttgattcacactccatgaaataaaaatataagaacttccatggtgcatgatggataaaaccaccctaaggctcagagaagtgggggtgctaaagtgggtttgctctgtaaagctatgaaaaccaaaccactcaccaactgtgttcccaggaaggtctctagttaccaaagctatgatgattgtgttggtgagaggggtagcagctctggtgctcagtagtgccatcatctgtaggccagggataactgtaggaagagatgctgctgtaaatctagattccctgagggacacgagaatagcaagatctcagaataaaatgagccaggttgtaatgcttagctttcagaagtgggcacagttattgcaaagaggggtaggactatagtggcgtccgtggactcccaacttgaagatggttactagaacatgatgttcctgaaggcaagatggatggggggttgtggggggagggcaacaagaagtattgcttaatttacacagtcaaaataaatcaataaaggaaaatcagagacagagggcagcatctcaatgaaaatcacaatcccttgttcggtttccagatcagacctgaaacccattggctgaagaagtggctgattccttatgaccctgcaataccagggcaaatctattcatttgttatttccctacttcttaaccggggagctcaggaccactttattcaggcaaatgtggtttgggagagaagaagaagactcagcacttttgagaattattgaacactgggtctgaactgacaccaacacctggagacccagtgaaccaccatggctccctcctgatgtgggagcatacagcgtctactagagtcctccaagctctggctctcagtgggcccacgggtccacagactaacctggtgatcctttccctcatttccaaatatgtaattggaagggacactcttggtagtttgaagaaccctcacattgattcttgagttcttaggtaagagctattgtagtggggaaagacaaatggaagcccctgaagctgctccccaccctagaagaaagagtaaatcaaaaatgacgctgaattccagaaggaatctgggaaattatgaacctctcatagactttaatagtgtagtagccctggctatattttgatttacttcaccatgctggctcctacgaaaatcaaatggaacatggcaggatgttccagcagtagccccagttacacctactgcactcagggtgaactctttgctaaagcggattaaaacaacttccagaactttacctggcaagtgtgttttccatcatcccggtaggtgagaggaccagaggtagtctgcgttccagtgggatgaacagtttatatttatggccttgtccccagacaatgtaagttattatgctctttgtcaaaatgtaaactgaagggacattctataaatcactacacagattcatcatatgattgacatcatataataggaccagatgagaggtatggggcaagttatgctggaggacttggtaagcgcacactccatacaccttagaaagtgggcaataaaccttacaaaaattcaggaaacttctgattctgggtaagatgcattagacatatttttttcctattccctccactaaaatctccggatgttatgtgtgtgtaagtgtatacactatatacactatacaccatatatacaccattctctcctttttctcgcacaatatatacactatacactatatatatattgtgtgtatatacacacatgcacacacacatataacaaacatatgaggctgtagaaggtggagaaaagaaggcagagaaggtaggaaactcgggattcaaggaatgatatggcagtgatttccctggttttgtttgttttgccttatattctagactaaatactagcaaagtcagtaacatcaatggatacaagcaacaacaacaaaaactgcacggtttcccgtgttttgtttttggtaagttgaatgggcatctgctgtgtgtgagaagcagggtgaaggggtggcaaggttggggattaaggagaattcagaaaataacatgatgaataagacatcttaggctgctctgcctatgaagtaggcattctttattcctttactttcttaataaacttgctttcacttaaaaaattttcattgcattattgatgacttggtcttattgttatcattcatgcagacattaataatcagtggtgataggtcaatcattaaataagccttctgggaatatatacattctaagttgttcacacaatagcaaaagtcattttcattgactttataacttaaaaatcatctggccaatttcaaaaacaagtgagttagaatacgttagcagtgaaatattctgtcccatttaataaactaagatgaattatttcctaggaagttgagtttaattcctttgaagcctacacagtggatcaaccatgtgcagtttgattgtggattttattttttattgattacggagttttcttaaatggcagattaagtcaattaatagaaaaatggagatgctataaactaagaaatatttaaattaagaaatgttggaactcatgaggagtaaatgtgaaaatgaacaaaactcagaacaagtgtgtccctggtgctaacggagagactaacagtggacttccattgctgcagtttctcaaggtttccttgtttagtgtttctccttcagccagcacagtgagaatactctgtcttcagctggcaggggatgtggaagaggcttggaagcttccaaagaccaggattgagggccacctccatcacttctgctccttggatgcctgattctatttctcttagaagattccagaccccaaaggagatcatgtgacataagctagaggttgaactcaccatggttgaacaaaaactctctgaacgcatagtgctgcttcacagctcactgcaacaagtcaaaaattccacttttatggcacgtcacaccgggatcacatataatcctagattatctttatttgttctataatttaatagtatacctataaaataattacattatacttatagcttttcttcatttataaacaaaacaaaaaaattaaatacaatttgagccattataaggtaaactttgtacatacgataaccccagaaggagcttcacactgcagcatatcatattgctttcattgctacacccacaattgggttcgaagagagtgtgctcgtgtttgcattctgtaagttcttagcttaatccctcccctatctgtgtgggttccatgttaataaaatgataggggttggctctgcagctggtcagagactctcctccactcacctcccaatccacccctagcctccattacaatcacgtaaatttccttccttcacagcttttctgctgcatgttctgccactgagtctgacttgaggttttccaccaaatgcaaaaatcactcctgaccttgaacacccttctctccattttcgctctatcctcaggttccagccctcaaggatttcttttgatttctgcctcctgagttcaggctgtatatacccatttatgaaaccaagaccccctctgccacagcacattcttgctcaggtctcatggtgttgcagaaatgacagaaatgcaccttgcagtgcagtggcctgagatagattcaccaacccaccccaccccaatccttgctcttcaagtgaatgtctctagatccaccatcactacctagtatcaggaagctaagtccccacagcggcttgcagagggtctctctcacatactagggaagtggcccctcacaggagcacttaccagggaatcatcagtgaaaggttttcaaagtttactgattcccaccaatggcagctcattcacatttgtcagattccataagcattactcacagggaagccttcctggggcaactgagcaaaggagcccagaagaagtatataatttcgctggaaaataagttacgtctacttccgtatatcaagagaccacagcatggaaacgtcaacaattcattataaacacaaaaggtgacctaatgtttgttcgtcccttttgaagtctattctttgaaaaggaagcatgttttgtgcagaacagttcaactagattactattctatatcttttattccttactcccttctataccacaaagcgactcaactccttatatttttcaatatccctctctttttctctttcttttaacaggaaatattttttgcctagtgtcatggcagtgaaagtagtatacggtttcaccccacatatgcatattccacattataggggctttctagtttccggtcatcaatttcccaacgaatgcccttccctatacctatccatcccaagccaatttctacattgtgctgcaatgcttagtaacgtcagtgaaatagtattcaaagtaaaaatcacgactcctcccatctccctgcccaatctaaaaataggtgcatgacagtgaattgctgaccaggcatttttttttctgagtaagacaccttctgggcctgctgtcatccttactccgaatggtgctgcaagccagagtcaaaacatgtgaaataatacatgaataggtctataatactttttaacagctctttacaatatacggtcacttataaaaccagcgttaatatagagacctttgtgtgtgataatattctaattgcagcaataatagcatgcacaccagagttcatctttagtccacaaatagggggcggggacagtgaggaagaagaggcggtggggacttgaggatgggggattgtgtagcctgctctgctcgaggtttcccgggaagcccacttcgggatccaagtggctcaagttgtcttcttggtatcaggtttattaggagacgccccgtccaccgacatatttatggaggttgcacatatcctcatcacagcagcgaccgagggcagcctgccagtcacaagaatgagcgctcccagccagaggtccagggaccagcaggagaggtctgaggggccgctcagaaaagtgacgcatccttcacttcgcgcgggaaaggggcgagctggagtgcagggcggggccagggaaatccttgcttttccacatggtggaaacatcaatgccggatttacagtgcatcacctcgaaaggtcctctctgactgctgggtggcggtggtggttttccagcattttccttcgggcctgatccaccgcctggtttagggggcacaggtgggacccggggtcggtcaggaacacatcagcaaaagctccacttgcgatccacgtctgtgacaaggacaccgtcagccctaagagaagtgcttgctgctgagggggaacaccaggcagcgtgacagtgggctcggagggcagggacagaggcggcggcggcgccacccagcggccgggcgcgcgcggggctgagctgcgtccggcccggcgctcactgcttgtccgagtcgctcaggttcacggacatgcaccggcactgcttcaccttctggattttcttgagtcggaagggtgggtccaggccggggcactcgagctccacgaggacggaggtgacgcgctggggcttgcagaaggcgcaggactggaaggactcctcctccttcttcacgtgccgcgggatgtagaaggagttgcactggccgtagcagaagcggttgaggatggtgcggctccggcagccctcctcgctcaccgtctgccgcagcggctgcgtcttgcaccagtcactcttgaggtacttgcgctcggtgaccaccagggcctcctggctggaggccagcacctccttgatctggtgctgccatctctccgagttgttgctgctgccgtccttgtaaggcgaggggatggcgcccgccggccggttcttccgggcttccgccaccttcaccagcaccgccaccaggaacaaggacagggaaagcttccagaacatcctgcaaacgagaaaagagaggggctggctgtgaagggccgtagagtacgggatcaatcttacttatttttttttttattttagacatggtctggctctgttgcccaggctggagtgcaggggcacgtagcttgctgcaggctcaaactctgggatcctcctgcctcagcctcctgtgtggctagaactacaggcttgcaccaccacgcccatctactttctttttatttttttttgtagagacgggatctcaccatgttacccaggctggtctggaactcctggcctcaagcgctcctctgcctcagcctcccaaagccctgggatcataggcgtgagccaccacgtctttttaatgctgtacggttttactagcagtgacagtcaggtggggcatggcagactgatggctgcccaggggcagctggaggtgaaaagggattaaatggtacaagtgtaggcagttaggactgcaccccaaataatgcctggaaggcaaggaggcggacaaaatggccagtaacttatgcagtaaatgcagttagaaaacacgcgtgttgaacagttacagaagtacaaagcaaatgctgggaagagagacctcaagccagtttgcagaagtaccaataatagttaatactcaatatttacagtgttttactttgtgccaagtgctgtcctaagagtacatctcatttacatgtatatctcatttcatcctaaaaatagccttcagttggaggtggtattatgacccctttacagtgaaggggtcactttacagtgaaggaaactgaggctggggcccacagaagttgagtcatttacctgaggtcacacaaccactaaacaatggcccaggatttgaagccagccagacatctacctccagagccatcaatgttaaccagcagacatggatgtgattacaaaaattagtaagtacaaagtagagagaagatgggtgtcgttcacaagtttctttaaaaatgagtattaaagatagaactggacataggctagaaaaattactagttgcatctgtattattacatatgaataataacattagcatttaacatctgcacacagatgttcaaatcattcaaatgagtcataaattagagtctcctagtagaaactaattcccaggtgtgaattaagaaatttccctagctgactttgggaggccgaggcaggcggatcacgaggtcaggagatcgagaccatcctggctaacacggtgaaaccctgtctctactaaaaatacaaaaaattagccaggcgtggtggcgggcgcctgtagtcccagctacttgggaggctgaggcaggagaatggcgtgaacccgggaggcggagcttgcaatgagccgagatggcgtcactgtattccagcctgtgcgacagagtgagactccggctcagaaaaaaaaataagaataaaaaaatagaaatttccctagctgtattaaaactgtctgatgacaatgcaaagtgtcatctcatttgtattaggagactatgacacaaattcaataggaatgagaattggacagaaattattctcatgctatctaaaacgtggcttgcagggcacaagccaaagtctgactaaagtgaaagatagacttcaaagtgtaattcacattttaaatttttgtatttttagtagtagccccaaggaacactaatacccagca

SEQ ID NO: 5628 - DNA, 579662 bp, Homo sapiens
  MYT1L gene - 1765602 - 2305263 of chr2; NCBI Entrez Gene ID: 23040; Build 35; sequence includes 20,000 bases upstream of initiation codon and 20,000 bases downstream of termination codon of the gene
agaaataacttgtttgcattttatgattcctctttatttccattttctcaactattatatggctgttacactacacacctcgcagctcttatgtgaggagaaaatgagacaattaatagatgtaaagtgcctaccacaatatatagcacttaaaactattctataaatggttgttattattgtttttccagactttttatatctaaatatctggaatattgcagtggctcaataaatcaatactgtaaagtaagttagttaaaagtgcccagctgggataaaacaactttgtgcttttatatttgcctaagaatttatataaattaagaaatactttatttcttaataaatcagtgtggcctgttttatcttctggcttttcttatgatcgttagtgcatgggggaattctcatttgcaataccagaactttctctctgtaggactccagttgacatcaactaatgattcttgcagacacgggaacacatcatgtaaaaacaatggagggactggactgtcttgtatatgtgatatttattattactattgaaacacgtgagcatgagcattcaatgagccacagctttggcaaaacttggcagtgaggttagaagttatgaaagcagagagagggggtttcgtaattgggttctgagttgttcacatgcagtagaacaggatgattttgcctgacatatttgaccccaagtgattacaagttgtgattgatcactgaaggaaagtagttcagaagagaaagtgctcatctgcagagtacctagaggcatggatgaaggcaccactctgccttcccactaacccacagaggtggtgcctgtgatccgctcccagagcctgtcagagccaggcagtctgtccctgtccacagggccccactctcacagcaaagacagtgccacatgtgggaaatttgggtgtcaggtgtctattgaggaagaaaaatcaaattatctgtaaggaagaaagaaaatttgtattatagtttccttcctattattctttaaaggaagcgacgcacgcttggaagttaagctttctgtaactaaacaagaaagtcgcaatgacaatgcagtggacaaagaaaatacaaaaaagcaagaaaagatgcatgaagtaaactttctggtagagagagaagctaataaggtgtaataatgacaaaaaaagaaacaagctaaaagtaagcatgagaggaggatttcgggagaggttactgatggtaataggcctagctcaggtgtacgctggcaatgaagacctcagaggcacagaaggaacaatggaggcacccatgggaatttattaatggagagaatattgtgacaacaagaaaatttcattttgttctagtccagagtaaatgaggaaaagagaaaagagatacagacatcagaagaagaaattgtggttaataataaagacactctgtcccattcatgttgttgtcagacaggctctagccaaattttaagaaacaggaaagtgattaacacaggtttacaaagtcatcatgcatgaaatatttagggaactctcttcatgtccagcaggaggctacagctatatgaaataaactgtatagtggctataaacataacacgaaaaacagttttaatgcttatatgaagataaatattcatcaatattgttcagaaaatttactaaatataagtggaagttattgcaaaaataaaaacaaacttggaaaaccaaatttatcctcagtgctgaacatgacagtaattaagaattagagaaaaattagtactaagcacatttggaatagaatcgaatgataatttaactaaaaagcataaggactaaatttcaataaaaattcctgataagagagcaaatctactttaaaaatatcctatatgcacagatgagttccttctctgttccctttctccaccaaaaattggtaaaatccgttgaagagaattagggaaaataaaaaatggtatgtgtgtgttaatatacaaaatataaaataaacattaaagggcagtggatgcttgtatttaaaatgttttagttttagagttgaacaaaaagttaaacttgagcataggataatcacattttattcttaattttaataatttaaaaattgttaaaattttaaaaatgtatttttgacatattgtatgtatttattcctctgtcctattattggtgaaataaccgtgacaaataataattcactgtaggtcaacattagcaaaagaattatattgttcaagacatcagtcttgactgcttagtatgaggactttcttctctttatattctttaaattgtttcttcggtgttctaaattgccttagttttattttttataaattttttccatcttctcctgaaataagttaacccccaagagatcattaattcaatatgcccaagtggagtttagaggattgatagtgacctttctgtgttccaaagattaatatatttttctcaaatccccatttaaattgcttgatcatgaaaaaattcctctcatttccgagctggtgagtgtgcaaggagagtctcagtgtgtctattttttaaatataaatgtatataagtacgtgaggagccagattatcagaacttttggtctgtgcctcctctgcttcttcaaatatactccatgtttctaatgacaatgcgaacaattatcaggattcagcattcttcaactcaatacactttgagtacttattttatagaatatgttattcttgggtgtgcaaagcatagaaagataaataattcattctctttggggaaaatcagccatatgtcaaatcactacaaaatagagtattccatggtgagggttaaaccagaggaaaacccaaataaggtgacagaagaggaggggagccatgggaaaccctcctgaaattcacccagttccttgaagggtggtggataagtccttttttaatagagatttcactttcctccttgttttctttgaagacagccagaggtgaaaagaggtgaagtaatgaagatgaattggaatgaaatttagggttctaaaatctacttttttttaacggtacttctgcaggttcctccctttctggcatcagcttctatcaatgtacggcaccacacaggctgctcgctttgaggtaagccttagttcttaattccagggatcactctgacaattactttttctttctttccctcttttgaaactgctttagtttttcttagattttgcttgttgaacatccttattcattcattcattcattcattcattcactcatttgttcaattaacacattcagtaggcagctaactattgccccatgtgttgctgagtattagtgtaacacgagtgaacaaagcagggcggtttctcacctcattggttctgtgagcaaagagacaagtctctttgagagactggcgggaggatggaggagagccacagaatgtgccaggtgtcagtcaaggcaaggagagtgggaacactcaaagaaaatgtggggaatttgggagataggtttgtccagatagacctgggaaggagggcaggcaggtgggtccaggacatggaggttcaggggagagagctgagggaatcccggacagcctggcttggtggaaatttgtacataaaagtgcagtgagctttgtaagatcctgaaagaaatgtgaaccaaggatttttatatccagccaaaaaacaccctcaagcctcagggaatgtgttcccataagtttttcttgaggagccttctagacagtgagcttctgtgaatcaaaatcacaaagcagatttgaatggaaagactatatcatcattaaacagacagctcctcatagacattacactacatatgggtaaaaggtagaaaggatcatatttaatggttatatcctttgacaatataactatagttcaaccataaaaatgaaggaagaaccagacaaccaattggaaaaataattttgaaacttctccgtaatcatattgatggtggtaatatttagtactgtcattttgagactaatacactttttagggctaaagcaaaaagaaagtaattatgggatattttaaataaatcatctgcacagtccttgatagattttttaaacagaagaaagtagatgtgaactatataagtgatacagtttggctgtgtccccagccaaatctcttcttgaattgtagcttgcataattgccacctgtcatgggagggacccggtaggaggtatttaatcatgagggtgggtttttcccatgctgttctcatgatagtgaatagtggacttccccttgcacacattctcttgcttgccaccatgtaaaacatgactttgctccttattcacctttagctgtaatcgtgaggcctccccagccatgtggaactgtgagtcaattaaacctttttcctttataaattgcccagtcttgtggatgtctctattagcagcatgagaacaggctagtacaataagagactacatgaaaaacctgtggtcctgaatttgatgggaagtatcaataggaacttataacttgtttgatcttgtttgatctcctggctgtgtttactgaaaaagcctagaaacaatgccaatgcagcggcaacattcatccctagccccagattgtggtccagaaatatcattcctcaggaaaacaaattagaacttctcaggaaactggagcagaagggtacaaaatgagcccgggacatcgtgacataccaaatggaaagaaagctatcaaagactactggcgtcatcttgaagacacaaggttcaccctgaagaggccccaccacccaaagatggaacagcttgagcttcaattaggaagataatgataatgcatagaaacctaatgaatatgtttaaatccacctcattagaaaactttttaaaaaattaaacggtcacctttgaaggatgataggaaactaattatcttgacaacagttaaaaaaaggaaagaaccaagtacttattctgcctttcccacatgaagtctaccagagaccaaatcgtgcaggtgagggaagcttctccttgtaaaaatattccatctaataaggaaaaattaagtgattgaattagaacgtcagcattttgtaatctccacagaatccatttatctagtcactgagcagcaaccactgataacaccaccaaaatatcccaaacatgacgtgcttcctcatggaaacacttggccccatgaaaggcaggccttaggtgtgggacgcaatccttctgaagcctggagtccaggatgccctaggcaggaaactcagaggacagaagaacatgttgaactgcaccatgcacatgaagttaagaaaaatacaggagactccatgatccaggtgaatttgtggaggaagaaggccgctgtgttcaggactcagcacgtggagagcctggtgtggggggctggaaaagtcctatttttttacctgagtggaggtcaagagagtggtttccttcagaagaatttattttctctgcatcagttctgtgtcatattcctgtatctttttttattttataacttaaaaaggttgaaagacaaaatagaaaaggcctatgatgtatctatactgttatgtttggaggaaattaagataaagataaaatggtcttaggctatgctggcaaacattatatatgttttaaaatataagcatttttagatacttagaaaaatacgggaaatatataataccaagtacacaacataaattacctaatgttaacatgttgtcatttttttcattttttaaaaaataaatgcaacactgaatataagttaggtcctcttatgctcgcccaaattctcatttcctttattccccaacattcctccctagagggaactaatgccatggtttatagtcacaaaaacaggaacaatgtagcctccagcattgattgaacatattaggtgtggacacactttgctcactttataggaatcaactcttggaattgtcagaacaacctcatgaagcaggtgctgctgttttcctcattttgcacaggagaaaacacaggcacaagggtcattcgctgacgacctcagagctaggaagccacgaagccagtgcccagacccaggcaagtggctgtgtgggttcagggtgtctgtgcacagaaccaccagggccagcatgactgcatggagtaagcgtgataacggagtgatgatcttgcatgcagaaatcgcaccttacctccttatggttacaattacattgtctgcattgaagttatgttagttaggacctctagcattaagctgaatataaaatcctggcctaaagggcacccattgggtggagactgctttcctctcttgtgatttttggactccgttaaataattaaatcattgaatgtacttgctggcagtcacaacaaataaaaaggtcttagtggaggtaacattcttcatttcttgaggcctgttttctcaactataaagagaagtgggtctaccatatttctaagtttttctcttatcttcaatttttgcagttattgttgtattgcataagcgaccactcagttctcattataaaatagggatattcaaaatataaagatagatgtcttatattttttaaagaagctgctgaggaaaggccaaatgaatggattttattattttatgtttagtgtaacaagtagaaaacaatgtttaaaaaatgtctgagcataacataacattaattgcattaaagctggcagtggaactttatgctttttttttcttattctttatttgcattttctaattgatgacaataaatatgaaacttgaaaaataaaatgagaacaaatctaagacctttaagtacatacactgtattttaataaatgtgccttctaacttccctaattgccacgcctgtgaaatcaggcttgctgttctcctgagctctcctcagaacctcaccctgcctctccactccacccttcccctgggccccttccagtttctgtggcccttctctccctttgcagtctgtctcttcctgatctcacagtgctcctcagtaggagtggtagagaggaggcatttgctgctgaggacctactaagtgtccccactgaagaaaaatgggtcttgcagtacaaggattgacctgacggttctctgcgcttcccgttttgatgctcagcccctgctggaggtcatgctgcaagttgacccttcacctaccctagggtctaagtccccacccattacaaagcccacgctctggttagaacaactgttattttgtttttgccttcatgttggctttgctggatactttcagatctgactcctttttacattattgaatatgctcaatctgcctttggtgttcttcacaatgtcaagtgccagagaagccaggaggcctcaggagcagattctaatcagggtttcacgtggctgggattttgaggctgtgaccaacataggttttttatttgagacccatctttcggacccagattttaaggcatacatttaaaaatttgccttgttaccttttaaacacattttacttttttgtctgaacagtattaacaaatggagaatttattttatttactagaattgatattttaacaattttggctctttctagacattcgacttccaagaataaagatttttctgcaatgaagaaattacataagatatgccagataacctaaaggtatcccaaacttatcttgaagaacttaagccttgtctcaaacaatataaagctctggaataaatatgatcctcatgaaagagaaagagtattttgaatgtcttcagtttgagtattttttaaatcactcatattactttataagtatatcttctgactttcaaattaagtaaaataatgtatggaaggtattttgtgaagcccctctgtcacttagatctggttaaaggaacacagcaaattcgatgagacctagcttgaaatccaccatgcagataatgtatggaaggtattttgtgaagcccctctgtcacttagaactgattaaaggaacacagcaaattcaaagagacctagcttgaaatccaccgtgcagatacacgtattcaaatttgagttaatgtcccaatttgagctctagtggcctagaaaagaagttttaatttcctgctaaccaaacattcttagatgtctttaagatagtataatttattggacaaaccaccaggtttattcatgcaggccagtactccatcctgagtgagtgactgtggtagcttaaaggatctctttctgtctctatctgcctgtctcatctctctttgtctctctgtctccctctgtctctatctctgttttctctctgtctctctctctcactttttctctcatcaatgatatcagaccagtcaccacctttctagacttcagttttctaaactataacgtagatcatctctaaggtagccttttcacttctaatttcctataattctaacatctgcttgtgtttttattataagtgaatttggaaaatgagattccaattctacaaactaaagtagattgtctgcattaggcaactatttaagataaatttaaagagagaggttccaaacaccacttctcatggcctccataaaataacatgggaattcaactccagcctttgaaattcttttcagatgagggtgaaagtaggttcaaggaaaaacagcacagctcatgaatgcatacattcagaaatagtgcagaagaagcatgtctcaggcaccctggtataaaacttgccatcaatcacagaatgttgtcaggagaggcctctgaaatttacattggtaaaagatctaaaagccaatacaatatatgttgttgtccacactggactttcagaaaggttagggaatgaatagcagagcaagtcaaacagaaacacaggtccagagccctggggaatggacaggcttcctaggaagggcctgtggcagttataggacagacaggccaaccccggagatccagggaaatgtgaggcaggaagagcagatgtagaataaacagcattgactgagttcccaaactccaaagctgcagaatatcccatgcctttctttttgttacatacaactaaaggaatctaagtagaacacaagttacaagattatacagtaacaaccagatgacaattgaagcaggcagaagggaaggatccacaaagacattcttaagggcggggacaagagtccaagcacgtgtcccagtgttgagcaaacattcatgtattcagtcagtcaatgaatatttattaatatttatgtctatgtgtgaaaatgtgctggatctttggttatcgacagtatttcacattgccccatagggtatttctatggtttctgtagacagggggaagtccagcagacctatcccagtgtgaaactagaggagaaatctggcagtttctatccgagaattcaatatggtagtcaccagtgaagtgtggcaattgaacccttgaaacgctgctggtacaaattctgatggggtttaagtgcagaacacacaccagattgtttttaaaaatgtaaaataggccaggcacagtggctcacacctgtaatcccaatgctttgggaggccaaggcaggcagatcacgaggtcaggatctcagaccagcctggccaacatagtgaaaccccgtctctactaaaaatacaaaacttagcgtggcatgttggcacgtgcctgtaatcccagctactcaggtggccgaggcaggagaatcacttgaacctgggaagtggaggttgtggtgagccaagattgcgccattgcactccagcctgggcaacagagtgagactccatctcaaaaaaaaaggctgggcaccatggctcacgcctgtaatcccagcacgttgggaggctgaggcgggcggatcacctgaagtcaggagttcaagaccagcctggccaacatggagaaaccccatctctactcaaaatacaaaattagccgggcatggtggtgcatgcccgtaatcccagctactaaggaggctgaggcaggagaatcacttgaacccaggaggcgggggttgcggtgagcagaaattgtgccagtgcactccagcctgggcaacaagagcaaaactccttctcaaaaaaaaagtaaaatatctcattaataaattggatgctgattaacaatattctatgtgtattaagtaaaatgaattatcaaagcttatttcacctgtttctgtttcaaaatatgtagctattagaataaatttaattaaacctgaggcttaaagtatatatcttttggaaggcactgatccagtccagtgtttctcaaactttactgtgcgtacagttcacagaagagttaggttaaaggcagatcctacgtcagtgggtccgagaggggcccaagatgctgcgttttcaacaagctctcaggagacacccatggctcctacatctatcacaagaataagatgaaatagaagacaaaggcctttcagtccataattgggaaagagaacacctgctgtgtagtgtattaaaagaaaaacaggaattgtcctttattacaaatgaataagaccacacatcaaagaaacattgttaagatatttctccttgcaaagtttcttccagcttgatatcacaaaagggttggtaactaactatgccataaagtttgtggggttttttagcctacttacttgtttcatttctgataggatttggactgtggtgcaatttattttgtttctggagtctagaggattttgcatttgcagctgagagagaaacaagttttggagccagaactcatcggatttgtgcggagcagggccactccacacaaaggctcagaagatggtaatgaatgaacaagaccacttctcagaaagcaaacaggccagggtttggggtgaagggtggcagcagatccatgatgagaggtagaaaaggagaaactgtgccggagcttgggctcttaccttgaaagacccagggtttaggtatctgtgtgtgtgtgtgcctttgtattctgtgtctgtgtgttgtatcagtgaaagctctgagatataaacaaaggaaaccaacaggctcctttcagcagaaaaggccatttattaacaagatactggcatcttgccgaatgctcaggagtggaagatgaggacagagggctgaggccatttctaatgtccaggccgctgagggggttccctcagaacagctccagcgcctcctccattcttgcactcaccggagaagccttctccacctgcccaggctctcagggtgtgaccttcctctgtgaagcatcaacatggagtaagtgtctgctattttcatcccatgctgccccacatcagcacacatccctaaaaagcacttatgcatcttaactcaatcctctcctgaacgagatcattcccccagttcttagaaaggaatggcttgattctctgtgctcagctcccagtccaggattcctagcttgtgcccacttcttctctattctgctacaattccatgtcaacatgcttcatactataggccactatcaccttaaaatgacaggggaaagagagaaaagcagaaaattaattcagttatataaagatgtacatgacccaggaaggaagataaatgcagttaaatattctaagccttttgtctacaaggtgagcatgagcatcttcctggctctgtcccaggctctctgcatccagccggctcctcagctggtcagaggtgctcaccttgtaggatggcgtctgcagtgagagagatgagttctcagtgttggaagctctagtcttcctttggctgttatgactgaacctggcattattgaaagatgccccaagaatcttctttttgctttcaggttagtcattagtccaccaagatgccatatttaagatgaaaaaatgaggggctttcagttcatggccctgaagttagagcggggccctccccgtgtagcgacccctgtattcctttgataatctgggtcaatccctttactgaacacctaacccctatgcaacctgctcccacagtagcctgagcctccaaaaagaggaaaccaggagtggaaggcaacgcttcttgcctttctgtttagaaacataacctggccattccccaaacaatcagattccagtaactttataaggtgcagacccctatatttttgttgaattcactttctgatctctagcaggtctctattttgtcaagaaatgtagcgtgaacactggcccctgttctccaggttcttgcagtgttctatcattgctgtagtggggccacccttatgtcctctgggcagagagaaattgtattttctgcaaagataaagaattaatataacctaggataggacagtgaagatgtgttgttgttcctaaaataggaagaaatactaatcttggtctaatcctttcattgggataacatccatttccttgtggttggagctatgaggatttgctggagtagagaagctacatttggaacttcgtcctctatcagctcaccacggttctccagaatcccgtcttctgtgctagccccaccaaagaatgaaagaccagcatgccttccgttatcaccactggcaactttacagctatcatttccccagcaatgtcacagtacttgttacatatgtaacaaacctgcacgttgtgcacatgtaccctaaaacttaaagtataataataataaaattattatttcgatttactattttgatagtccatttattagggatccagggaggggattctgctggctattgaaaatatcttttttttattattatactgtaagttttagggtacatgtgcacaacgtgcaggtttgttacatatgtatacatgtgccatgttgttgtgctgtacccattaactcatcatttaacattaggtatatctcctaatgctatccctcctccctccccccaccccacaacaagccccggtgtgtgatgttccccttcctgtgtccatgtgttctcattgttcaattcccacctatgagtgagaacatgcggtgtttggttttttgtccttgcgatagttttctgagaatgatggtttccagcttcatccatgtccctacaaaggacatgaactcatcattttttatggctgcatagtattccatggtgtatatgtgccacgttttcttaatccagtctatcattgtatgtcactgtgtctggagtgcagtgacatgatcatagctccctgcagccttgaactcttgggctccagtgatacacctatctcagcttcctgagtagctaggactacatgtgggcaccactacacccagcttattgaatatatggttttcatctctgcccataggaattttggggaaatgaagggagggtttaaggccccactgagcatgcatcaccagcctcactccctgtacatctctctcaagtggaccacttggtattctgggttcccagaagttgaggcaagccaaagtccaatgaagcccatgagttaggggcatttctgttttcaaatacagaattactctgacaaacggctgtagggccatctgggaaaggacatttatgttcacgatgttactgcaagatcattctttaaaggcatgtcttcattttagatatcctgagtctagaagccaacttatttccgagattgggtgaggatcctcaaatctttatggtaggactcaggtccgacacctgtgcacagataccaaatttcttcagttccgtaaatcaagtaggaactttgtagaacacccatctatttcagcaaattattccatacggtcagggctggccatttaattggttttctaccatgtatcatgagctgacaaattcctgtcttatgagatgttttctaccaggaaagataacaaaactgctgtttctcagagattgagttgtctgcattcttagtaaacacatgtgcctcatttcgtgtacttagttacaagtaaatattctgactgaattaagcacacaagtcagatctactaggatggttgaaatctcaaacttggagattagcacattagtgataatatctaaaagtatatagcacagctggttttctcaggatgctgctacaaccaccataaaccctacacactgccactctttctcaattatactgcacaaccaccattgccataggagaatctttaaggaatatggttttctgtgggatcaacacacaattcaaaatctaaattgggcatgtcataatggtgaatcgtaggccatgtgtccatgtctttgctgaaagagaagttggaaaaataaatagcttgttattttagtatctagagtgagaggcagtccctacctactaaggaggctcaaatattggggagggttgggatgtaggaaggaggttccaatgctggaaattcagaaagagtgaaacaattactacagtgtggaccgggctgtacatctttctccttttgttgaaccccatcgtcttctctgcctccatgtttttttctagattctcttttctgaatgattttcagcaccaaaactcttctaaatgagcatgataattattactgttttctgtacagtgaagaaaaatataattttgaataaagtaagtggcttttttttttaacttcagggatgagacccataagctaattataaaaataaataaaaatattcttattgagaacctgatttagaccagcactattcctatgtactcataagctaaaaggcataagtccctttcttcaaatagcttgaatcattgcagatactaacctgatagcacaaagaaatgaaatgcgatataaaaaccccagatgcaaaatagttcagagactgagtctcaagggtgtgcaggtaatgtggaaagttttgttgcaatatgcgtatttttgaatttattgggccactgagggtgaaatgaaaggtatttactttcacaaaattgcagacattttataaaattatagactttgagtagaataaataccttctatagattatcttagtttgctggttataataatctaaaccagcagtacccaacctttttggcatcagggactggtttcattcatggaagacaatttttccacagaacgtgtcggggtggggaggtgtttcacctcagatcatcaggcattagattttcataaggagcacacaacctagatccctcacacacacagttcactatagggatcacactctcatgagagtctaatgtcgccactgacttgtcggagctcaggcaataatgctcacttccccaccattcacctcctgtggtgcggcccagtccctaagagacatggactggggttgggcaccccttacctacatcttaaattctcaatgctcttttagatctcagaattatatttcatatttatatctatatattttgccaataaataaccagttctataaaatcaggccaagtgatctgaatacagatgttttcaactctacctgctccagactcccctaatatgggtttatactgaatagaatggtcagcctgggatagctgcaaaaataacgcatgagctctgaggttcatggtctaccccttgtggtccagtcatttcaccgagattacacaaccaaattctatctgaccacaactattcttgatacctcagctcttcttcatgatatgtctcctaaatttctttctcattattctatttagcaaattaaccaccaacaccttatttcttttatctatttgctattgagtcactctatagatgttttgattagttgaagctaattccctgtaatgaaaatgggttccccatccttatcattgataaattaataaaccaccccctctctgatatatagctaacttggaaagttgttccccaatacagtggcggagggctatgttagtgcctgattttgcatagtgtacactctgatatagtaatatctggattccaggttttaccaatttactacccaactatagcaattctatgctgtttgctccagacctaaattaatctcagactccctttagatgtcacagctctccatcactggtgcagacataattctgaagaaaaggtcatgaagtcatcgtcatgctttccatgaaggtctagttcccggctcctcacctggtgtgcaacatggcacctgaagaaacgtcacggctcctttttgtttctggtctcatgatgagaccagagtccagagaacagaaaggaaagagattgaactttctatactatgagagatcaatctatcgtttgttaaagtgatcagcatatgtatcctacagttggaaatacatcctaggttataacttgtgtgtatttccacacaaaaaattatatgggctttttttctttgtactaaattggaggacatacccattagaagtggcaatatgttccaatttcttttctcttacaaataaataaatacatacataaataaacaaaattaatgacatatgtatttcctaataccaagggctttaacatgtggaataaactaatacatgaagtacaaaatatattagaaataatttaaggaggcaggtgacagatacttagagacaaaacatttggttatacggtttaatcgcaaactacagatttttaatctaaatggtcatttgagtattccccagttcttctacatcataaaggattttatggtaccttactgcagagtactcgatatcatttttgaagaaatcatactgtatcaagtgagctacaatgtaactgcaaaatgcagactgcagtgttgctctgctgtggctctgtggcttcatgattcattcatttttcctcttctcttgagccatttgagggctggtatctcagctctaaaagtcatgcagagaatgggtggaaagaatacaaatgcttcactggagcccgattcaggctggggcagttgttgtcaacacgatgaggttgaatgaaatgcagtgacagtgtggtaagggaagacgtgttctttaatgctgctgggtccagggatgccttaccttaagggtaaaacattagatactatgcttatcaacacagcagcctgtcattgcagtgagttacacctacagcttaaggtaaccaaagctgttgaaagaatattgtgcctgcgtgtgtgtgtgcaggtgccccatatcaaatatacattctgttttcatagacatgcacaaatgtgtaagaaaaacatatacatgtataaatctgtgatttaaaatattgtgtcagtattatttacagatttctttcttcttaatgtaaggtaaggtatgtgggggtgaattttaactaagaatttattattaacacaactatgataaactcatagggaatgattacatgaatatgtgtgtatatatgtgtgtgtacatacatatatattcatttaatttgaactttatttttttaagtacatttggaattccttggaagtaataatataatgtatatgtaaacgcctaaataatacccaggaggtcacgatttgacctaaacactcgcatttgcgtgggaattttattgtgctcactttttttttagaggaatgctttgtcctttacaaaatggacaaatactcccactgtactgcagttccagttctataatcattttggaggcgctctttaccccgtggtgaccacaacacgaagaaccgtccttacccacatgctgcttgcctggggagctcaggatcagtgtcttacacacagaaggatatatgctcccattttttttccgccgactgtaaatgactcctattctttgctccacagaacatccgatgtggtgcccaatcagctgaaaaagctgcacagacgtcattagttccgtgtgtgtgtgtgtgtgtgtgtgtgcaagagagagagagaaagagagagaggagactgcagctgccttgccgcgtgccgagtggagtctccattagggcagcgctattgatttctgattcacactgcagcaacagggctagagctcagaagaaaaaaaaatcacgtctcagaaacaggaattacaaagacaaaaataagtagatagatagttttatacaaaaatcaagcatctgttaccaaaggaaagcaaaactgacaatttagcaaaatttaaagactgtttataacatagaataagatgtataggagaagtagagtaaaatgagtttagaaaaattattcgttctaatttttcaaccatttttttgagaggtgataatggtctaatttccagaatgccttgaaaaaccctggaatactcggcagaggtgctgcaaagtaaagcttatttgagggcaatcttgaagctatgcctgagaattttaaacaacaaaatatccaagatttattttttcaattgtgttcgattattttattagctagtagctttctctgttttaattctctgtgttgcataatatctaggatacagtaacaggctggttgcaaatgctcgaaacagaaataggtttcttcataggctgtgtttcagcatgtccaactgtgagcctgtgaagcagagcatcggagttctctcgaggtctgttgcttcagatttggttagaaattattgaatctggagtgtaaaaatcttgtctgggccttttaggcagcttgattttaaaactagcccttctgccccaagacttatcaaccgcccccccaccctgtcccaaaagaaaagctgaagtaagttcagtgttaaaataatggtgctgtcaggcaggcagtctgcatgtgagcagcagaaaattagaagaatagaaccatccattctcgtttccccccgcgacatgcacgcacacatacgtgcacacacacacacacaccacacacacacacacagacaacaccagtcagtgaagggggaaaagggtgatacctttttaaaaaatgaaaggcagtaagccattattagcaagagctatattgagcatgcttgccagacaagcagcaaagctgagctccagttccgcccagacatgtgccttgccattttcattttaatcagcctgctcaggatggctgctgattcattttgcaggatgtccccctgggagccaaggtggaagcctgaggcgagctgctattgcatcaatgcagcacatcagagcgagagcgcggaggcagagggaggagagaaagccttcagcaccgcatcccgatttcaatatggctagttagaaggtcctgcatgaaaccgagtctattgcagaaaacataatgaaaggaaaggaaaagaaaaaagtcacattgtcatttcattatccaactattctctcccccaaccccttcttgccaccaacagacacacacacgtacacattttacagtgaccatgaaagatttcaagccactctgtggaagtgtgtgtgtgtgtgtgtgtgtgtgtgtgtgtgtgtactatttacctggtaactagctggggtggtatacctgatttagctggagactttgatttgtaggactgacaaccttattatgcagtgagtttattattgatattattctgctctcggttgccatggccaccttgtgagagacattcaattttctctcttccatcatcattatctatgaggccatctgttgtggaaaatgaattcagcctcatttgcatgactgataagcaatttttttttttatctatttaacagaaggtcatatgccggggatttggagcttgtgaaaaaaaaatgtggaaaaaaaaaaaagcctaggagaggatgagtgggagcgtgtgcatgggggtgtgtggaagtcaaacagatccctgaggcctgcgagcctatcgcgctgcatttgtcattcctgcccgggcgacattttttttttccctaagctactgcacactaaacagtgagagagcttttccctgcagtcttgttgaagcaccccgggttttttgctcattgttggtgggtgcattttaattttttcattccctggactatgggttatgatatccatactcactgaagacaaaaagccaccttttctgcgtcttggtggcatgcatgtgtctcatcatcctttcaaacttgtggtggaacagggttttcttccctgtctgtgtattttgagccagcacagttaccaaaattgaacttgtctttcgcttgtgagcggttgtggtcattgtgaggtacgtgatgttcgttaggttaatttttcggggaacttagtgagcaggatgtgttttaccgtagctcaagggctgaggctgctattccattgtctgctcctttttaaagttatttttacagcatggctggtagctgaaatgttcctggactggaggctttgtaatccacaaaaaaatctgtctttaaactaaaatgggtattaggttgcatgacttaactgtgatgttgtttattaagaaaaaaagaaacaaaaacaaaacggggtgcatgtatggtgtttggaggataagaggatactgaaacaaaaacttcccagagactttactggattactttacattacaaatgaagcacatcattttatgcaaaggcaattaaaatgttagctattttggatgaatttacctgatggtaagaagaaagttgatttatattgtttaagtggagaaactcaaataaagatttttaaatttaacttaaatgtttgaagttcataataatgaaagaaaatgttatttataacagaaatatgtctttttgtaacacctaaattaataaactaaaagattaaactctacactttagttttaagatagatctgaataaagcaaaaatatatatgtaaatatttatatgaaagttagctatataaaatatagagaacagattttgaatttagtattaaccatgacaatttcttgtaccatcaaagctatataagctaaataatttctaagttacttagagtaaaactattttatataagagcctttttgttcaaatgtttatattttctactaaacaaaattaacgtcatagaccaaagcatcccaaaaccacccttactggcatatgagggtctttctaattgttcatcttcatttagtgtcatgtagctttaaaaataataaagtcatgtctcccatacagataaaaatgtaattatttttaaaagaaaagagttttataaaatattccttttcaaaaaaaaaaacagcattgcattcctataagttttcacctctcaagaactttgaatccaaagtgttgattgtaagttataaatgctactaagagaaacattccagaaaaaaaggaagtttgttttttctgattgacctaaaagaacatgtatgattctatcacctcaaatgcagtaagttaattgcttaaaagtctccttaaagttatacttgagtgataaattttctttattaactaacatagaccactactgatgtgtgtgtgtgatggtactttacttgattgcactttgaaaactcttaccatactatcatacacttttcataaacaataacagttgttatataatccttctgcttttaatcagccatatttctttatattttagcttgattttcagagaaataagtttattttaaatattaattgtgcatttaaagaatttaaaacaataaaattctgatagattatgaagattatttaaagtgacatcagctttctcagaggactataagaatcagtaatatgagatctggatctatattataatatgaaggattatgttgttgtcttttgatctgtacatatagtcttcagattcgtgaatcaaaattatcaacatctaaaaaaacctatgagatagcacagttgatttttctctcctccccacccccacccacaaaaagttaattaccaatcttggttggattcttccttgcctccctgacatttgactgctgctaattcactgattaatctcattaatgtgattatagtaggatttagagttggctgccattgttctgtagacagtgctattcaggctgagcacttgccacctcattcagttttgctgtgatttttcaaaggctggtggagtgagctattgtgagcaggcttctctgccttccctttcagcaccaggagctgtccgcagctgatagcgattgcattcaacagtgactgacttcctcctagtttattggcaatgtgaaaatggctcactttcatcaccttaatgattgtgctagttgaggtagaagtaggagaagccttcatggtcacatttggatgttttgaagatggtggcagcaaagatatctatacttgaacatttttatttagtaaagactttccatctgccattatacacatattttactctatttccaaatattcaaacatatcaatatgttaaaaattacttgtatatatgtatagttgtgggttggaaaattgtaaacattattacttttcaactggaaaattttatccaaatacatgtaattattaataaaattcatctttgaaaagatgcaccaggactatctggtgtcacagtaaggtagaaagtatgcatgacacacaaatttcaacttctcttgagttaaacttgcatccaacagcagaacttatgccaatttcacaaatttgtgttagaagctgagatcaaggtaaaggcccaatgatttgtgaccacatatgagtggtgtacaaaaattattaaaggaatatgagtacctagtcttcttcggggttataaaagctgtcaaagcatgaccttaggactatgtggatagtttcagagaatgagacttctttaatatgctgttttcactgtccctgttatgtttttcacctaatttatttatttattttttactctcttgaaaatgtttctattttgtaccttactcttgaatatacccaattatttcactgtctgatgttttctgtctgctttctgtgtcaatgtttaatagattagggaaaagaaataagtgattatgcaatttcaaagatttgtaaagtttttctatttgttacaattatacttaaaattaaaaaattgagttaataatctgattatttgttcagctgcttttataaatactttacatttataatttttaaaagccaattacttctctgtgaaaaattaattttgtcaagtaaataatgttttcaaagtcacatgcataaactagatttccaactctacctgtaagccaatttaatttgagggagagacattattttagaaatacataatatacaatctgaaagactttgtttacttgttatatattttagtggatacattttaacttcaaacaacttaaaggtttatttacccttaaatattttatattaaaaaaaactcctctgtggaattagagggactagtcagatgctctttgataatgaccactctgctttgcacttacagtttggtttggctgggtgtcccttttagaccagggctataattttcaatcaataaccagtgtttccaatgcatgttgtcctttgccaggaagtctaccttgatgcaaagtctcaccagaactctgttcaggaggcaaatgaatggtagactcagaaagagagatctacagttttggtaaatttttataatctaattactccatagcgtaatttgagcgcaatgatgttatgcattttcctatttcaagtttttaagagttctttttttgaatatcttcttttttatttgaaaagttgtgtagtattctttagaaaggagtaactgaggataaacttgaacaaaaacttgcaaataacatatttttcaccaagctaagtttcatcatactgtattctgtaccacaacacaacacctgacattgatctgcatttcttccaaacaaaactgaagacaaaagataccacaaacttgaagaagtaaatagatgtaggtttgtgtttgtgtgtgtgtggttgggggcagtgtcatatctacatatcatggttgctggtatgaaaaagatattttaaattgacataccaccccaatatttaaaatattgcctatagtgaccataactcatatgaaataatacaaatattctacttttatagtattttattgcatgattttttctgatattagattatttaaaggcaacagctatccattttttccatcagtgggctatttcaatgcaatgtggttctgtttgtaatatctttgtgtcttgtctcttctctctctttctctccactttcctttctctctcttctgccccctctctctttaacttggtccctgtttgtctgttttgccaccctctcttctctctgtgtttctttcacacctgcattgttcaagcatacacagtgatttttctatgcatgtttctacaatggaagtgtttttggctttgacatcataatgagtcctcagggtatctgtagaagtaatcagagatggcagagaaaatgtaagccaggtgttataaaactagaaagaatgcatgaatgcttatttattagatagagaaagagtgataagcattgctgtattaggctgttctgctaggaaaattttcctaccatgtacctcttttaaaataatctctgctccccacgtggtgattattggaaaagttggcgggggggaatattttagtcttactgtaaggagtattgtgttgtgagaagatggaatggtacaggacattctcttaaagctttccttgctttcagactgcagtggtgtctagcagggctcgatgggaagggaattgcagcctctatagtaaccagtaagtctggtcccaacacatcagggaagagctcggtcttcagaggaattacctctgagagctggaagagggtgttcctggtaacttggggcttctctgtcagtctccccacggaaaccacagtcagagctgtgctctgtggaaagcctgcagtggctgctccctcgtgctgttctgctctcgactctcactcactgtggatagtgggctggtggagtgcgggcgccagagggtaggggtgaatggaatggaaacacagagggaactgtgaccagcacgtgcgatggtctctccacggcagacagagccctgcgtgggtgagaagcagactgcggaacaggatttggcttgatggccaccagctcttccacaaaaaggtacctctttccttttattgtaaaggttacataggatttctttttttcttaatttgcctggtggttgcagctcccagttcttctcttaagtacttcaaaaatagttgtttctccacctgcctgcctatctccagctctcatttgattgcatacacaacacttcctaaagtctcttggttaggcgtgtgaacgcgccaacaatggaccctctctcaaaagagcttctccttcagtgtaatgccattgtgggcactgctatgtctgcatgctgcccggagttgttgttaaacatgagtctgtgtattcaaggctagtttcctggggcgagggtgggaggtgctaaagtagcctttatgatttaacgtagcctttcatagcggtgagtgttataggagagaggtttgcagagagtgaaacggtatggtcaccaccagagtaaaacatctgtggcttgactcaagaagccatttataaaatcagcacttttttaagccagaaaaaaatgctaatgaacatcaggtatctatgttcccttagctattttaaaaaccatattaggacttgtcttttcaaagaaaactttttctatatttttttcttcaaacaataataaaaggtgaaaaatgttttaactttcttagacaagtagtttcatagcttttgttttaaaagaaaacgatgcaagaagctcatactgaaacagaataatatagtgaggttggcaacccgaaaacgattttaagaattggttagagttaactcttgtgtcaccattcttttattttaagaagtgacaggttttggaacctctttttgttttgcttggatgttaaccagcaatgccatctaaaatactgtaggttcagcttacttctgtgaggtttctttggccacagcatgaatttaccataacatcaatgatacgagagatatttttagatatattgcctagctggtagctgctaacagcctgactccggtatttacagttctcatctattacattaaatacagcactgctcatgatacacattctgctctagagatttaggggcctgtgggtacaaggcaagcagcatactgcacacatctccactcgtgtctgactgtgttgcaagcttgatacacaggaaggttagaaattactggtttaatccacagctgtagcttgaaaaatatctagatcagcagtgaagttccctcccaccttaggatttggggaagtggatatgttttgtgttgcttcaaggaggcagcctgagacagggtaagtcagcaggatgcttccgaggctcttctgctgcagcgatgtggtctctaagggagcgtgagcctgatgcacgcagcacaggcgggactcgcagcccggcgctgtctgtctgctgccttttgatggaggctgcacttcacccgcccggcagagcgctgtacgcatgcccgtcttccctgtcgtttagtggtgtcaacttattaatttccatcttcgacttcaggcctgttagtttcctgtctgaaagcattattacttttgtccatgtggcaaaataattagcatacagatgagaagtggccccttgcctgggcgccggtagagagagaagatgtgcagtggaaagttgattggatgaatggagaacaaatggtgggcgttcaaaagcattagaagagttttgtagtcgtggagcaggttggagaattttctgggtgagtccctaagatggaaggcaggggtggctgccgtgggaacaactgcttgtcagacgctggcttagccgaaggtgccaagtgcggctgtaggcacagataattcattgggacgactttgttttgcaagtcttgaggctgctctttgatatcccctccaggtaaatatgtcctgtgctccctgtcttcaccagagcatttgttccacttcccaaagtggagcaaagttgaactcctgatggtcagtaacaaaagaatagtcatttgctgccggtttggggtagcggcttgatccgtcttcgtgtgcatgtgcctgaagtggaaattaactgtttagagatgactgtttttagaaacttacagcagccattattcaatgtgtttaattaatattttctgaaaccgtgcatcgagaccagcaaaattagcaaatgttgtttcaattaaagcccagacataattagttttgactagtatgtatttttcctagctggaagatgattttagctaatttaaccagcaacttactggagattgtgaaaattgaactgaagtttctattgatctgtagaatctacaactaggaaatgtggaaattagcacacagtgatactctgagttcttttcagaaaaatggagatcatttttgcaaatcagtcttctgagttgagaagtaagaataaagagcctgctggaatcctaattttctattgtcatcagtgacacatttcttatataattctgtgactgtactactgcaatatgggtgttttaatatttagttaattatacttccatggtaggaattcactgataaatagttctatcctgttttaataattcctattctcccgaaaaggcaaggtttttcattttaactgacctaattatttcacctgctttttaggtagaactcaagtagaaattgttattctttaactgtctttttatagattcctgaatattttagatcacttgattttattttgctttcattttaagctttttttctaaagagttgctttactttagctgtttgctttaaacaataacagtgaatatttgacagaaaatacaacttttggggggaggggaaaattttctgtttaaaaaaatatatcttttcaaaaaagaaagaaaccacctttaatgaatctaaacctcaaacacaagatatttaaaaacatattaacccttcatgtgaagctgctgaaacttgcttttgatcattttccctctcattctgcaagtttcttagtactcacattgagctttttctgcataataggtaaattatctattgttttttcaatgtgtgtgtgtttatacacacagacacatttctttttctatttcatttttaaatttgctggtaaactagaatgaagaaaaaaattgagtttttaaaaatttaactcaagcagttttaaatatcagattgttttcaagcagattcatgaaatcttacctagagaaaagtcataaagtcatagttccattattttctcattgctacatttcattttagagttgaaccaagctttatatgattaatatagctgcttttagctttatgatggtggtttataactttcttggggcaaaatatcagcatttactttttaacctcaccttgtgcatttctatgcagagatccctgaaagccccttctccacgatgctctttgtgcctggctgccttcaaaggtggagcccagctattttgtttttttttttttagggtcaaaattgtgtcatattagtctccacttcacggagccccgcgtgccactctccgtcacatttgttctcaggctgtggagcaggctcacgggcaaagacaatgaaaggtcccaggactggaaacagggtgatgtgcacctgtctgaaaaggtgatttctaagggaatttttccctgtctagttgcactttaaggttgagtgtcaactttggaaagaaaagcagcctttcatggcaaaatttttaatcaattgttgtgattccaagatattagtccaaagatgaagtgctctttgacttaagtaccctgtgtaggcaacattggacagtgtggggcgtctgctgtctcagtgggcctgctctgctcaccgaagccatagagggcattgctttggtggggtttccactgattgtgaaagaaaaaaaaaaaacaggtaaatattttttattcaaaaggttatttgactctattccttttaaaattcagtactgtcatgtattttcacactcttaggagtactataattcccctcttccatgattttgtgagtgcgtgtatatgtgtattttttaaatgccagtgtgaaaatgtgtgtaagctgacaatatttgagccatagggttagtatgtgtgccatgtaaacctgctttagatgtgtttgtgcactcattaatatagttgaaagaactttaggactcaatattacatactgactgctttttactgaagtctgactgtttacatagaacactccaatttctttaaagaaaattacctcaaggatatcgggcacttgcttgagaaattttcaagtgtggaatgtcaggtttaggactctaaatcaaacaactcatgaattaataatttatgggggtctttttttttagtacattgacaaagattttcattataggatttctagctcaaacactgttctgagtggtgccttcatgccgttatctcaacctaaatgcatagtgtgttttaatggccctcaacagaatggtttttcaaaagtcggcatcacctcttgactccaggggctaccacaccactgaaccctaaaagcaataaaccattcttaagggcttactttaaattcggcccaacctcccctccctggtgcacgaattccaccagcctgtgccatctgaacagaagctgaaagcacagagcattgtcgccatgaaacaatgctagccagactggttgtagaaataagcgagtctgcagggcaccccatagagagccatcaaaccgagtctgctctggagctgcctggtagattgtgaacattcggaaatcagtgccgcatctgccggtggaccctgtgcttctctgaaactcccacctgccctaatgcatctgggcaagagcttttcagaatccagtttcctccaggataaatttaatatgtcttgagggccaggcacaggcaaattgattctatctctgcaccagaagaactcatcaacatctgtaagaacacagattttcaacaaccccaggattaggggatgctattttgtaaaatatattccaagcctactcccttcatacctcatgccagcatggcattttttaattaggaagttgattaaaaagggcatggtagaccacggatgtatggtctcctggcatccatccagctgtttgttgtctgggtcgtggaaagcgttgctcatcaccagttgcaggagcgagggggaaatgattataagggatggcaagaatgaaactgttctgctgtatgtgctaatggcagctgattgtggcttcctgtgaaccagcctttcctacagatagacttgctgacttccttcatgagacagagaccacttgtacttggaaataacttggaaatgtagaaactaggtgtattattcagtggttctgatttttcagtgatcaacaggataagtcataatgacttgtattttctgtattcaaacctgtttttggcctcatatcctgtaggctggcgtcaatgatggtagttgttctaacagtgttgtgctgtttctcttcaagagtaactggtttttgcttgtctcccccaccctccaagggaaattcctttctttgctggctttttttttcttttttttttttctaggacttagagtatatttcacagaaataaaattttatgcctaattgtagtgttcctatggctagtgtggtgtgaatgagcaccatgtcatgaatttaaccctgtccatccctctcatcctcttactgtatgagcactttcgcaagacaaagcacactaaagaaagtaggaaaaagacagccatggatgaggcttgacacactgccaacaccaagaccctcatccccagggcagaggctctggggcttttacacgtcactctgggaagacactcagtgctcaagatcaggggactatgtctgcaccccagtgggactttccagccactggggtagcagttctcccttttgttctccttccctctgaacctacttgcacatatattaattatttttagattctgcattttaaagttttcagtgacagacaagctggagttagcaacaatggttggcaggcaggggctctcctcactgtcctcttctagaaagaaaatatcaaagtcaatgctgaagagaaaaggcgagaccccttaaggtcagcacctcccttccctcttagtgccataactgaataattaatacaatgtgcatatattgagtacctactatgtgcagagccaaatgagatagaactgagtaacaaatttctgccccacaaaaagtcaggtaatgtgtgtacttgtgtgtgtgtgtgtgcatatatatatatatatatatgcatatttctgataaagggtaatcataaatacttctaggtttacttttcttgaatgcattttgaaatagattaaagcattcttatgacttaagaagaagagttgagtgaagcctgaggcccctttcctgggtaatcagcacttcaggaatccaggtgaccattccaaaactcagtactcaacagcatggcattgtatcaccatattctctattcaacggcacgtatgatttcagtgtattgacttcttacaaaatcaagagtcacacattcttgaaggttctggatagttagccctcatccatcatggtttctaagtacacgttccctgtccccttccattatgcagagttccaacgcagcaagcctttgcttacctgagaatacatgaaacagtaaacagaatgctgtttggaggaaagtgttggtaactgtcaggggtctgttctgcagtttctgagctgttgataccagagatcaacaacagaacattttggatttggcatggtgaagccctaggttattgactgagggccaaccttccaagcaaacaggaagatcccctgtgtcatattcacttgtctctgccttctctgtgacataagcagtcctgccccagtgcagacagctgaaaggggctgccaacctggttatccaccggctcaccattggctgcagaaacatcaaaacaaggaggagaggagaattcaaattagaaactggtcatgtatttcagacaattccaatgactatttgccacatttcccttgagtcagacctgattgcatatacctgcctatttagaattaagaattttgccattactccctgtaaaagacaagttaggttagaattagcattttatagtctctcagagtatggaaatttaagtagctcaggcatcaaaaagccacatgtctttgcttaaaaatggaattctgagattatataaagtgagaagggttggttgatgctaggttcttgtatataataggaaataaaatcttaataatttgctcagataaatttcagatcaatttcttactcgtcctttgtttaatgtggcacatttggtactgaattaacatgtgaaattttccactgaatttgtattctgaatcttccaagatgttttgcaattcttttcacagtcctgagaacaagaatggagatagttttgctgcccaagtgtttttttagctaatatgctgttcctgggattatattagctcaaaaacaatcctttttcctaagagatccacatccatggtgccagccaagaaatgatgtatctgctctccagggacaagttaacacacctgtttacaaatgggcaaagccacctgttcatctagttttaaagttaatgatcaaaacagtatctgatcctaggggttagtaagagtggaaaggcaaatttgtgagacaacaggtaacatctcatttttattacctaacatttcaatatatgtatattaaatgtggaattagttagaaaatacactaagcctaagatacatattccaaatggtaaatatcaacattccaaggattagatgcagaagttgtgtaaggagtagtagagtcaatgatagtgtaaatttcatgctttacattttcaaaatccaacatgtgcaaattgaatcatgtattttagcctcaaaggcataactgaagtgtgaggcttgctgattgggcagtcagcattgcaaaaacggcctctatcaataaaaaatcagtaaacgattttcacacatctcgtccttcctcctacaagatcgagtctctttcccttcctcctttgactggggagcatgtggcttgggcccttataacaacatggcctccaattttttggcttgcattagagtccctcttggcacctgctcttagatttttaactaagggcacggtcaggaggatgattacaaaatcattttactgattattttggtctcttccaagagtcagagagactttactctgcctggtttggttatatcagctaggttgcacatgtgctataagtttctgactaactctccaaaatattaaaaatgacccatgacacagggaaacttcatttttccattactttccaggaggatatttttacctaatattaaacattttttcattttttatttttattttttgtcttttttaattttctaagtgagattttccacacatagtcaacctagacaatgacataaagtccctatgaaggagccctgcattgagaagaccttcctcctaggtagctctctagagaattcggagatgacttgaaacaaatgattgcagttttctgcctctcggtgcccttgtttaaagtgagggagtcccagttctaacacttgctgactgcgtgtttggcatcttcacatggacagcaatctcaaaggcattactgtgtaacagtagctgtcatgctatcagcaggaccacaccgacgggccccttgtttgtcaccattttgcagagacgtgcaaatgcaaacccaacaccaggaacctgagtatttagagtagatgctattgtttgattgatgagtctaatctgggactaccaaggtcaggcaggttgacgtgaaattcatctcatcaaatgtttcatggtcatccagaaaaatcactggactggccgggcatggtggctcgcacctataacctcagcactttgggaggccaagatgggcggatcacgaggtcaggagatggaggccatcctggctaacacggttaaactccgtctctattaaaaatccaaaaaaaaaaaaattggctgggcatggtggtggatgcctgtagttccagctacttgggaggctgaggcaggagaattgctggaaccctggaggcggagattgtagtaagccgagatcacgccactgcactccatcctcggtgacagagcgagactctgtctcgaaaaaaaaataaataaataaaaggaaagaaaagaaaaatcactggaccatgtgacactcagacacgtaactgaaacctaactttcccttaagttattttctctattgattttatacattttgtaaccagaattttatcttactttacacagaaataatgccagctgtaggtggtgggttgccttgacaattcacagaaacgtacgtgccgtggcagctctgcagttactacttggtttctctcgaaccaccctggtgactacatgagtcttcctaacttctcaggacgtaggccagggagatatatgccattaacatggcttggcatgatccttaaggaaatagccccattggctttatgtcttacctttctttttaaaggcagtatttagggtatgcacaggttaagcaggaatgcatttttagcagctaaaatctattatacaatccatgtcctacttctggtctcctagagcagaaggcacccaaaatgacaagcaagaactcgtgggtacaaataaacactaggtttttaccatggtagccgatggcatgttctcaccaactcaaaagagtgggcctgaatattgtccccaaaatatcccagcgaaatagagaagaacatcaggcccacagtgggaaaaggaaaggagtctgagaaatcaagctcatgttgaggttgggcagtggtctctctccacgcctgaatctcagactcttgaccggagtcaaaggagcctttccaggtcactattaccaaggaggctccactgagaaaattcaaacacagatatgttttatttaacacagcaacccactatttcaaaagtgcaaatttctacatgtggaacttttctctaagtattgggaaatgcttctcatatgaaaataaatggagaggtgtaataaaagaaaggtaactatgtatagaatgaatggggctggaaagaaaacaaatgcagaaacatttttatccatttgaaattaaaaacagtaaaaaaatttacaggcaatagaaatatgcttaagacatacaatttggctatttctgattcttacttagagtgagatgttgtaaacatagacccactagaaaactcatacttttggaagatcataaaatgagtaatgttaagtgccaaggacccatactctcttgtacacaaattcaaactgttgataaattatattgagaaactaataaaaacagactatcaggaaggcaccctgaaaacaataataacaatggctaatacttagtgggtacagtaaatttagtgctttcctcatgggttatatcacataaagcccacaaaaatctataggattgttataggcaccagtattatcttcataatcataaaataagtaaacatattcattaaagagttcaggctatctaggatatatactgtttaagaaaccaaacccccaatacaaagcttttcatagacagagaatatattgatgattttctacatcctctatttaatgcttactttggctgccgacaatgattttcaatagaccaaacacttatttactgaatgtctgtaggtgcaaatcttaagccagtgtaaggcataatccttgcctttaagaactgaaaatccagctgaggacccaagacataaccagagaaaaggttataatatcaacaattcccccaaaagttttcagggacagttgacacactaacagaaaagtgctgtgtgctctggagttccccatgtgagtctctgaagtgtccctgagatagaaagcacagagaagctttacatttaagtctttaatccatattgagttaatttttgaataagatataaggaaggggtccagtttcaattttctgcatatggctagccagttttcctagcaccatttactaagtagggaatcctttctccattgcttgtttttgtcaggtttgttgaagatcagatggttgtagatgtgcagtcttatttctgagatctctattttgttccattgctctatgtgtctgtttctgtaccagtaccatactgttttcattactgtagcctggtagtatagtttgaagttgggtagcatgatacccccagctttgttctttttgcttaggattgtcttgagggagggagaacattgtgataaatagctaatacatgtggagcttaatacttaggtgatgggttgataggttcaacaaaccatcatggcacatgtttacctatgtaacaaatctgcacatcctgcacatgtatcccagaacttaaaattaaattaaattaaattttaaaaaaagaaatcacagaagggaaagccatttgtcagggccagtggccactagaactggtgaacatgtggaatctgggatgagccctgaaaaccagtttaatttggatacatggggaaaaaggaccaggccttctatattactatgaacatggtatgtgtggtaaatagatgtagtgttctgaatggtcattatttaatgatatttgatagtgtgtaattaagtattcattctgttatattacctatgatttgtatatgattcacagtgacatggggggagttatacataaatatatatggcaggcagtttcatttggaaaactattaatggtttgctttttaaaaagtttccaaaaatgcatatcatttcattctatgatctgaacatatgacagtccagaagtttattggttggtggagttttgtttcttattgaatgatttacaagatgattaaagagttacttgatctcatggtacgcaaaaataactataagaactgtcataaaacagctaaaaacatttaagaaaataatgagaatagttatttctcctttgctatgaaaatcactatgtccaaataagaacttttttctttcttcttcacagagagaggtatgttagaaaaataaacatataatggtctctaaactagagtgagggttgggccccagcgttatttataaacgtatgtatcgagataagtaagctatttaattcaggtttcaacatggctttggatttagtaagagctcatgcttctagactaagatcaaatttaaacatgacttgcagaatgtatagtgtctctaaaagtaagagtataaatcatattttacttaaattttttaggagaagaccaagacagtattatatggtatatagtatatagccacacccttggcactttactatagtagtgaattcatcccccatttcctgtgtgatatcaagtagggtctttccctatattgagtctttgaagagaaatgttctatcttcctccttataccatttccattaaaaaaaaaaacaggtattttaaactaatttcaaactaagtaaagcctattcagaatgtgagatttgttatctgctttcagatcccacttaaattaaccaggcattatctctactgagccccagttcctctccagagactgactcctgaagcccttgctatacccacctctgagcatgggttaagacaaccggtagtggagacagcacattttaagggccagtgaaccgctgattgcacttgattttccaagattttttttttttatcagctgagatcttcagaaagcaatgtactgaattttatcagctttactttttataaagatgctgttactatgccaaggacatggagaaaaagctccttctttcaccctgccttaattgatgtattgaaggtagtgaatacacgatatgaatccttcagtcatatatattctgaaaagaacacaaattgtaatttcttcagctctaagttcattgctattttcattcttttcttcttctcctctgcccaggacactgacaatttttgaatcctctgcttcactcattcttcaaacaatagccactcaaccatcagctaattcatcaagtagccaaagatacattcctctctctctgtgacagcctgctgttcttcctctctgcttgcttctggccagaacccccctttcttcccatttctccacaccccagcttacaatagtcttctaccacctcttttgagtgaaatgtccttgatgcagcaatgaatatgttctcctctgtccttggttagcctaatgccgactttgtctctatctccatgggatccaaacataagaagagtgggaatggggtagaaagcatagaatgaaactgtcaaaaaagctactagtgatgaaaatacttagtaaacctcagaagtgttatattcttttttttctcactctgtcacccaggctggagtgccatggtgcaatcacagctcactgcaagctcttcctcccacgttcaagtaatcctcccacctcagcctcctgagtagctgggactgcaggtgcatgtcaccccacctggctaatttttgaattttttttatagagatggggtttcaccatgttgcccaggctggtcttgaactcctgagctcgagcgatccacctgtctcggcctctcaaagtgctaggattacagtcatgagccactaccctgggccatagaagtgcatgcaggtgaaagagaaagggagagatagagaataaattgtttctcagtcactaaggaaaggaaacaacctcatcagaagccaaagacagagacactgggaagggaggtgaacagtctggtaccaaacataagcggaacagaatggggagggctggccaagggagcatgaggagcatcacacaggcgactttgttctcctttccacaagtcccctttccaaaccccagtagctagaggtgctgtgtaaagtctacagctgcagtctctcttcactgtcacccacaaatctaggcttgtttccccaacagcagcattgctgcacacacaatgtgacctacaatgcttgtcattgagtgttatgattcatttgcactctgtgaggtaggtggaggacctaaatgtggcaaagaaatgtatttggaatcccaaactgtttgtgcataacttgttaatacattgaagccagtgacactacctcatttatgttccagacagctgaagtgactgtttcaagtcaccgtaggccaaatatacaaggttttggggtaaaacgagggcctggcgtgggtgggaacagaggccttgcatgctcccttatttgttcctgctcccctatcttgcagcaatgtacatctgtccaagagccagccatagtttgagaagagagatggggggaggaccgaccttctctccaagcatgcacaacactcctgttcacacggaggccaacctgaatggtgccccccaaagtcgtgtgacagaagagatcattctcattctttagatcacagcctccggtgcttcatttaataacaggaaggtagctccagggctctcagcttatatacccatctgagaccaacattattgtacatctcacatcttgggatctctttccaagttagataaggagaactggagaatgtttattagataaggcagagcagtagcctgatccaggccgctcagctgcatccttgtctagatacatcagcatagaatatccaagttggacacacacatctgtgtgatttggtctggaggaagatacaacatggttcgtgtcttaattctcatgcattgtcagcttgggtttgacatcagcctccttttctgactcttatgtggtcttggttatcaaacctttaagtttcttacatgtcatttgtagttttgaaatcaaatccttgcctgtgttcagatccggggtctggagggaccacaagaaacagctgagaccttggggtgtggggaatgggtacagtatcaaatgccagcacttcagggttgacccaattggggaaaggcagtcacagatccatgaagcagaatatttcttcatttttctatttgtttgttttatattttctttggttggatagttgggtaaaggaatgttgttgtgagccctctttctgctgaaagatatttatggaatttttctttcattcattttttcaaccaactctttaccttgttagatgctagggattataagaaagtgagtcacaaccgcccgtgggtctcagatattttatagaccaacagggaaggaaagacaaatttatagataactgtataattgtttggactttgatagaagtggtaaatataagttaggtgttaaaattttctgaaaggagggagacacaatgtcaagccaggctggagtggggataacatataaaagatattgtttaaaataatctttgaagaaaacgtagggttctagcagctaattatagtacaaaagctcatagaagagaatacacatggcttctctagggaatgatttagaggaagtttttgattagacaacagagcatcaatagagatgtagtagagagtagtatagtgtactgaagtgtagatggagtatagataaagtatactgaagtgtagatggagtatagataaagtatactgaagtgtaggtggagtttagatagagtatactgaagtgtaagtggagtatgggtagagtgtactaaagtataagtggagtatagataaagaacagaaaagtgtaggtggagtctacatagagtgttctgatgtgtcagtgaagtataggtagagtatgctgaaatgtaactggagtatgggtacagtataccaatgtataggtggagtatagatagagtatactgaagtgtaggtggagtatagataaagtaaactgaagtgtaagtggaatatagatagagtgtactaaagtgtaagtggagtctaggtagagaacataaaagtgtaggtggagtctacatacagtgtactaacatgccagtgaagtatacatagagtatattgaagtgtgagtggagtatgggtacagtataccaatgtgtaggtggagtatagatagagtatactgaagtgtaggtggagtatagatacagtatactgaagtgtaagtggagtatgggtagagtgtgctaaagtgtaggtggagtataggtagagagcagtaaagcataggtggagtctatatagagtatgccgaagtgcaagtggagcatagatagggtatactaaagtgtaggtggagtatagacagagcatactgaagttgtatgtagagtatagatagagtatactgaagtgtagatggagtataggtagagaagagtaaagtttaggtgaagtagaatgtactgaagtacaggtggagtatgggtagagtatatcaaagtgtaggtggagtgtagatgatagagtacactgaaggtggagtatagataaagtatactgaagtgtgggtagagtataggtagagtataatgaagtgtaagtggagtatgagtagagtgtactaaagtgtagattgagtataggtagagaacagtaaagtgtaggtggagtctatgtagagtataccaaagtgcagatgaagcatagagaaggtatactaaagtgtaggtggaggatagacagagtatactgaagtgtagatggagaatagatagagtatactgaagtgtagatagagtatagatagagtatactgaagtgtaggtggagtataggtaaagtatactgaagtgtagatggagtatagatagagaacagtaaagtttaggtggcatagaatgtactgaagtgcaggtggagtatgggtagagtatacctaagtgtaggtggagtatggatagagtatgctgaagtgtaggcagagtatggttagagtatattgaagtgggtggagtatgagtagagtacactgaagtgtagatggagtacaggtagagaaaagtaatgtgtaggtgaggtctacatagaatgtactgaaggacaggggtagtataggtagagtgtactgaagtgtaggtgaagtataggtagaatataataaagtgtaggtggagtaaggatagaatgtactgaagtataggtggggtgcaggtagagtatcctgaagcacagggagagtatagatagaatatgctgaagtgtaggtgggatataggtcgaatgtactgaagcatagctggagtaaaggtagaatatagtaaagtgtaggtgaaatagggatacaatgtactgaaggtatgggtagagtgtactgaagtgtaggtagagtgtaggtagaatatagtgaagtgtaggtaaggtatagatagagtatactaaagagtaggtaagatataggtagagtgtactgaagtgtaggtgaagtataggtaggttatacggaagtataagtggagtatgggtataatgtactgaagtgtaagttaagtataggtagagtatagtgaagtgtaggtggagtatgggtagaatatactgaagtgtaggcaaggtatatgtagagtgtactgaagcatagttggagtatagatagagtatatcaactaaagcataggtggaatataggtagagtatactgaagtgtaggtgaagtataggtagtttatagtgaagtataggtggagtatgggtacaatatactgaaatgtaggtgaagtataggtagagtatagtgaagtgtaggtggagtatgggtagaacgtactgaagtgtaggcaaggtataggtagagtgtactgaagcataggtggagtgtagatagagtataccgaagcgtaggtggagtataggtagagtgtactgaagtgtaggtgaagcataggtagattatagtgaagagtaggtggagtatgggtagaatgtgctgaagtgtaggtaaagtatacgtagagtgtactgaagtgtaggtggagtataggtagagtgtacagaagtatagatgaagcataggtggagtatagagtatactaaggcataggtggagcataggtagtgtactgaagcgtaggtggagtgtaggtagagtgtgctgaagcataggtggagtataggtggagtgtactgaagtgtacatgaagtataggtggagtatagatagagtgtactgaaacatgggtggagtatagatagagtatactgaagcataggtggaatatagagagagtactgaagtataggtggagtatagatagagtgtactgaaacatgggtggagtatagatagagtgtactgaagcataggtggaatatagagagagtactgaagtgtaggtaaggtatagatagaatgtactgaaacatgggtggagtatagatacagtatgctgaagcataggtggagtataggtagagtgtactgaagtgtaggtcctggagatcacgagtgtcatacttacaatagtctctatgcgataagtttatgactttgttctctcaataatgtgaaattactgaaggtttttgtatagttgaatggcaaggtcagagctcttctttgggataattagtctggcagccaatcagtggctacttcctgccaattctatctctaaaattgtcctcccaaatgttttatccctgccatttcttccatcattactttagagtagcctgtcattatcttcattctggacttttaatagtagccatgacgccacacacccccactatcacccacactcttataaatgaattctatattctgttttcagatcaattattgcaaagtacagctttggcgtttttctgctcaaacaataccagagtctttctatttcatacagaaataaacccaacaccttaccccactctttgaggtaattccccgcccattctcaagcatgctttctatccctgcattatgctcatctatttcaaatattgccgtgaggactgggccaaacactattcattgtctgtgcttcgatgactcacactgttacttctgcaatgtctttctctggtgtctatgcaaacacaccctattcactcttcaaagtctggttaaaatgccacttttccacatagccctctctgttccttccagatgaattctagcccttttcttttgaactttagcaaggtgtatttttatgatccttatcattgtctaccttgcattgatagctatttatataatggtgtaacctaccctatgaggctatgaaacactgttcttcatagatgtatattcctatcagaaatgttggacatagttggttctcagtaaatctctgttggtgtgaagagagaatagggtcaggactgaatgtggaactctctttagtgctgttgctgtgaccagagcaccatcatttgagggaccttctgtcctgggttttccaggcattctgattcacagtgaggttacctcttctgaaactggtgatcacctctctttgatctgtgttatgtagggtacctcgatatttggaaataggcatgttgcattgcatggaaagatattcccaaggcccttaggacacatgagtgcatgtgaccagctgttttgctgcgtttctgggagacttactgtgacaatgatgtggaataaagattccaggagccagacgtccagactcctatttgaaaaccttgggattctacacacagcattttactttacctacttatgtatgttctgtctcattctatttcctttggaccatttgataccacttaaaaaacaatagttgtgcatctgcctcttgagttcaagcaactgagaaggacccttgaaaacacaaactcctgcagcttattcacagcaatcaatgttaatgatgagagtggaagttgaattgaaatactggagaggaagtcttcctttttctcaatactttgtcccaccagggcaaaacctgggatgaggaaaagagtctgggcacaaaattccaggagtcttcacactcgggttcatggcaaagaaagaagcctttgaccttgctcctgttccaggatcagaaatgtcaccattcagattttaaaatgaaggggtcattgacattaagtgggacagatgaacactggctcccgaagatgccattgtccagaaataggcagccatttggtatgtaatacggtttggctctgtgtccccacccaactctcatgttgaactggaatcatcagtgttggagagggaggtgattggatcatgggggcagtttctcccttgctgttattgtaagtgagttctcatgagatctggttgtttgaaagtgggccacacttcccacttcactctttctccccttccaccacgtgaagatgcacctgcttccccttcactcttccaccatgatagtaagtttcttgagtcctccccagtcatgtatcctgtacagcctgtggagctgtggttcaattaaacctcttttctttataaatttcccagtctcaggtagttctttatagcagtgtgagaatggactaacacaagatttttgctagttctttctacaacagtgatcttagtagcagggcagtctcagtgaagtgcctgcttctaaggtaataaggaatcctccctgtttaatgataatttttaaaactaaaagttactttagtatttaatacaagttaacttttttagggaaaagagatatttagatgttgcacttcatttctgtgtattttaaaccaagtgttggttcagggcacacatttcagccatcaactgtaggaatgaatataatcaccttggtccaatatattccactgtgaaatgttctttgcatacactgcctgaagtttttaactggaatttgtagtatcctttacattaaatgcctgggcttttcttcaattgtggtgagttatataggctttgcagagatttgtgatgtaagtgtgcctccttcataatcaattttaccttatctccaaagcaagtccaaattcccagtatcaaaaaaataaacttaaaaaatgttttatttagcccaatatagtaaataataatcattttaatatataaacagtacaggataattttaatgagatatcttatacttctatgcaaacttcaaatctaagtatgtattgtacactgaaagtacatctcaactcaaactggccacattccagggctcaagagcccatgtggctagtggcacccacaagacagttcattcttagtgatcgtttcttcctaatgccatgcctgctctttcagtatctagaaagtacactagagggtacccatataaatattttagtgagatgcattttccagggttggcaaactatggtctgtatgccaaatccagacaacttgctgtttttgtaaagtttttctgaagcagccatggccattcatttgtgtgttgcctatgactgggcttgagttgcagaatacatatttccaaggctgctagacttccagtgatacagacagagcagcaacctgctccctgaaacttcaccacaagcaagctaaaaagcattaaaagattaaggaagaaaagaaaagttacctagtgctcattattaaataaaaatgaagaggatgatgaggatcattagcacagacaagacacttggtgtggactatagagagaggtttaagtcatcgtcctcacttcagagtacaactgatgttactcttcccctgctaagccctgcctatccttcagaggtctgcctcttcttatcccaatagctagccttatctacaccactcacttacctaccatagttacataacttttcaggctactcgctaatgaatttattactttacccaacaccagactgtatcccctggagaatgtgtattatgagttcagtgtgttacgttccaccatatggatttttctggtgatctgtagatacttgtttaatttttagacggatttggaatttaaatagtgaatttgttaatattttgttaaatcctgtacagctatagcgtctcactttatttttcagtgtcttttttgtttcttgtttccacataatccttattcaaatatttgttctggaataaaggggtcttcaagagacacttctaatgagaaatacaaaacagaaatcttgggattgctgacaactacccgcagctgggacaactgtggttaagtcaggacacttcgatgtgacgtgttgctcgatgtttttcaatgtgtgcagcagaagtcggggaagattcttccttgaatgtcgcgttacatacgttgtcctctgagaaggaaggtggctatccttggcaatggtttctattataacacaactatgaactgtggtcattttcagacaagctgcttccctcctcccggcccttggtttgtttggtgttaaacgtctcctcttggtttctgtgggtaaatgaattgttcttaacacggtgtcctctaagatgtgtgctctatccagtggggcctgctgagaactgcctgaacacagtccgtacgctgcctaagtgcactcctgtggctaaaataaatctcagccctaatgactagatccctcatcctgacccaagcctgattaagagagcagggagactctgtaacagtgacatgtgattttaagatgttttgactacattgtctttgtatatgtttggaaaataagcatcagttggtaggaactggctgactcctggtctgtactgataatggtgctgggtgcccttggggtataaaggaagaagagggcatgacctcagtaagaagtaaaggtgcccccgcggaagacaagagttacagggctcggcccgccaagccgagcatgccgtggaaccacggccactcaaagttgagcgatccgctttttcaacaagtcttttgatactggacattgcatctccacctgtgatgctgaacattatgttgatgaaggtgatcgccaggatacaagaagataatgtttgtgaaacataaagagtatctgcaaactattactatgatgactactattattcttgttgttttttttcccatttttaacctagaattaaaaatggagcctgattgactactccctggcaaatagtagatgatgagtaaatgtaagttgaataatttattgaatgactaaaaataaatacatgtatttatgcaaaagggactcaatgttgattatgatcaaacatcattcacaaatagtactaaaagccaaaagtgccttggcttcttcattataacaaaaatactactccttaccacagtcaactggcccctctcaaggactttgttcacgcatcaaaccattactgcacattaccacgtctacaatctaattaataatttgggtttcagcaaagttttaaatgagacaaaagagcccatttaaattctctaagagttacaagaatttgatcaggtttccactttttgttcgatcccagccatttgagcgcacaaagctgtctatctttctagggacggaaagaactcattgttcattgtaagcagacatccgccacaggaatgtgcatatatcagcatatttagtggcaggcatagtcattgcaatttgacatctcagtcaagtttttcttgagatctggcaaaaatagaagtatagcaacccctcctcctcaccatttcaaaggaaaagtggccccacattttcaaagctcaccttatatagatgaacaaactcacataaaagaacaaaccaaaatcatacgatcacttctgtgcatttttaaatcgattggtccaaaaatttctgaatatttagacagcattcactgactaataagttaggtaattactcatctatctactaaaattttagtccagaagttgagcacctgtttgcagaatgaatttctatttcaatattctgccatgtttcacatttgaggaaataatggatggataatggatatcagtttattttattctctgtgtgtgcattttctgcaccagtggtgaagtggacttattttaatgtattttaaaggtaattgatcatggcaatattagcccattgtggatatcaattttggaatagaaagagggccattgatgagcctgccctcctttatagaggttgaatcatgctttctttatagttgtatcaacaaactctaacttagtgcctgacacataatatacagctaaaattttaggtttgatcaaattcacatgaacttaatatttgggcccagtagtgaatctctatgatatgaccatatgtaaattttcttcttttttttttttttttttttagacagacagggtctctgttgctcaggctggaatgcagtgatgcaaacgtagctcactgcagccctgatctcctgggctcaagcaattagcctcagcctcctgagtagctgggactacaggcaggtgccatcatgcctggctaactttttaaattttttagtagagatggggtctcactataatgcccaggctggtctcgaactcctggcctcaagtgatcctactgcctcagcctcccaagtgctaagactacaagcatgagccattgtgccaggcccatatttaaatttttaattaaagaaaacttttagaatggctatattgaccaatccttccatttttgttttattttctcttataacgaaatgctgagggcagtgcctgacacataataaggctgaaaaaggtgagttgaatgctttctaataaagtgatgaaaaaatgaatgtgtctacctacgtatgtgaactaaggtatataggagagcaaagagagttttcaccatgtctgtttcaaataaagttttcttatatagagaggaaatgaaacacagagagaggaaaaaagacagagacagaggcagggagagtcttggaaacaaagaaaagagagaaggtaggggagggtgaaacactgagctgcacaagggcgaagagaaaagtgcaaggctggcacggagcgaaaggtctgggtttacagaacactctttggattaatgtgaacgtaggcttccatgttgtctgctgagtgcaaggctggcacagagcaaaaggtctgggtttacagaacactcgctggattcatgtaaatgtaggcttccatgttgtctactgaggattggaacagagaatgggccacagccaagagtgcttgctgtgaccagtagctcctgcaggagagtgggcgttttatggcacagcaaaaatcaggacttagttttcctggtagagtagaagacgagcacacagccttcttgatctctgctctgatgtccactaagatgtgaagagagatgcccagctccaggcggctctgtgagtgtgtgaatcaaagaaagcttgcacagccaactctatgaatccgctaagaatcatcgcgtggatttgagaacgtccacttcccctctcctcccacaccaccagaggttagacaactcaaaatgcgcatgggacaaagttcttttaaagcatcaccttgctgagaaaaacgatacttcagtgttactattatcattgggaaaactgtgcttcatttatggagtattgttcaagctgggagaatgtgactatgtaaattacctcaagaaatttgtgcctcacactaatgagatgtaaagagagagattctcgccatgttcacagtttgttggactttgataggatcagtttgtgaacaattgtgaatcacctaaaactgattatacaagcctgaaagctgagtattagaaacaatatactgctttgcttccactgttttctatgaaacaaagatattaaagttatttaggttacatgagcatgcgatcttctccatagtaagtaaaaggaactccagaggcaatcagaagtcaaatgcctctactcacatgtatccaattatatgtgttttcataaacatatatttatttgaatgtctttaggttagaacacatcagttttacttccagtaacttataagtcatcattaggcacaaagaagacacattttcacaggagaattttgagtttatgtgtttatggaatcttgttttgtgttttttcctgatataaagccttactgctccatcctagtgtttcataataataagcgaacttgaggccaggttaaacagcttgggaatgacttctaagccattgatataccaaatggtattgattttttttccctttgctttaaagttaattaaaaggacacaatacatcagtaggctgccggaagatgatctagtgccaaagtaagatttggggattgacaagtgaaagattatgatgacatggaaaaagtttgtaatgggactggatgtttcaaacaatcattttggataaaactctcctctcctttgtgagtaagagtctctcactgtcatttttaaggatggatcagtcagcactaagcagagctgaagaaaaacatgtgattaacagttcgggtgcttgaggtttgcaatgtcctgaatacttgtgattgcactagaaagacatccaggagtgtatcgtacttagtaagcactgagaaaggctgtaagaatgtcagcaacctctagttgcgtatcttgagtgaaggagcaaatttccctttccaagcaagaaccccaactcccacccttgcctcacacatcaccgtcccaaactaactggtgcacactcaggcttccaaatcacaagcatggcctcctgcccacaccagttcgaactggattcctggcttgccagcccgcaggcatccatggggctctccagtgacctctgacatgggtccctgctggcggctcacatgggccgctaggcaccaggaggagatcatggcacaggctgctgtcaggtagagccaggatctccacatattgatgggtgctcccccttagagaaattcttagtgccaagtccctggagaggaacccaagccttttggtttcatgaacaagtcatgcccctgtttaataaacacagagttggcagggctcggtggctcacgcctgtaatcccagcactttgggaggccaaggcggatggatcaccaggtcaggagatcgagaccatcctggctaacatggtgaaaccctgtctctactaaaaatacagaaaattagccaggtgtggtggtgcacgcctgtagtcccagctacttgggaagctgaggcaggagaagcacttgaacctgggaagcagaggttgcagtgagccgagatcgtgccactgcactccagcctggggacacagcgagacactgtctcaaaaaataataataataaaataaaaaaataaacacagagttaccgtggagagagtgagaggactgttcctgagcactgcgggacgtgtggcagctctggctaacttcagtgagggtgccacctcccacgagaacatgccgtgtcttgtgcttcttgacattgggaccaggaagctgctggtggcacagggacttgtggaagctcatgttcccctgaatacagattatcttattttactcctcccagaactcaggtgtgtgactatggataacagaatctaaggtatctatttttcaaggtattatttatcacattacgtatttatgttttttagagaaaagttcactttgaatgaaaatgtataaaagtttgtgctgttgtggcctgcttcttcatggcatctggtagattattattgtaaagccatgtgttaaactaaaacattcctcctgctggaatatttccctgacagatccacaccagaagactgttcagactttaagcttcatcgaatggtctctcattgcatctcttatcacataagttttcactgtttaagtttttgtacttctagcatgtctcttcagaagggatatgatcctgagtgtcagatccaaatcctcccagaatcttccacgtatatgggcctcagaggccaacaactgaggctcctgggaaatgtgtttgtgtcagtggtttgcaaatcaagtgtttctgtgtttatttcagcccaaaaataaaagccaggcttcataaaagccaggcttaatcagagaacaaactggtcctcacagcatagctttgttagggcaccaggggctgagcaagttaagggtattttgtggatgtttgcttctcctagtttccttctagaattaaccccagctgtgaagccagctttcttctcaggtcctcgttgtgtaactttaagtggcgtggacgcagagaatgaagcagatgtgagtaagaatgaagggctcaggcatcctcaatatccccttttgtgggagagagggagagagcagagtggttttgctttaccaaaatttggggctcctgtttctttcctcagacggctcccaaagacattccctttattttcctggctgtcctccctccctgggagggcagaaggaggagggcaatgcttcatgctgtagaaaggacacatttgttcttccttgagcagtccctggaaccttctggagtgaatgcctttgagcatcctgagtggcacatgcaactgttggcacggccaaggggagagtggagacaggcatgaagcatttgaatggtaggaatcttaaaatctgtctctgggggttttatgtatgaaataagtatgaacgccatgatctgtctgcagaaaagcatgtatttggtgggaatcttgtgtactggtagtagagagcaggtttctgccaggtttcaaagcactaaccccagggcctcctcctggtgggcctgggatgggcctggcttacgcccctgtgcaggtgtcccatccaccccacacacggtcccctgtcatgccatcctgtggttaggaatgttcaaatgcaatttcatgatgcttcctacttgagctgagcagggagaaatgactcaaatcagaaatcattttcaaaacctccgagggtcacgacttcactgagaagccttggaagcagagactcagagcggcgccacgggtgagggttgtgtgcattctatgtcgcaaaggcgggaggtcccctgatacttgtgttgttgctggccctcccttgaagcagggacattgcaggtggttccagtttgccctgaagggtcctctggcttcctgcagagaaacctgggaaggcaggtggttccaattggccccgaaaggtcctccagcttcctgcagagaaacctgggaagggggtgttggcccagctgctgttggcactgccctgggactaaagtgagcatcatttgttttctgtgcaccaggggcattgctatgaggaggctctggggtgctggccagccctgcacacaccggtgaggcctggtgatgacctgcccacaaagaggcaaggcttactcctgacgcagtgcactgtatggtgtctccaggccgagaccatccaccagcttctctttactagagggacgcatggtgccctggggcagcaggaggtggcacccgttcttgaagtgtctctcctttctgtgtccccaccgggcctgaggtaccacagacagagtcccacacgcccctttctcactctcactccccctctctcttctcctggagttaatgacattagccagacagcatttctagaaaaaaacaaaacatctgctccactgctgaaatgctaagatggaaataaaaagcatataccatgcccatacacaaaaatatctcgatagtaattacaaagcttttgtttatattttttaatttcttgaataaaaggaaaaaccctcaaaatggaaatagttgtcattgtgaatcacattttttctcttaaaaaaaaataaatgatctaaatgggactagtgacactttaccaaacaggccaagcattgtttaatagagaattggcctctttggaatcaatttcttcttccacttgttttaaaaggcactctttcctcttgcctcttaaatagcttttgtttcaggagcagtgacaggaggaagtttagctgcacctcaggtgacttttatagcaaagcttctcaaccacccagggtttccttttgactggctctggcttggtttataggcacctccttgaaaaatagaataaaattgtctatattttctatatttatcctactgagtttttaaaatgtaactccgctcttgggttgcttgattgtatgtatttgggttgccagcctttggaatctctctctctctggctttattcttctctctctttctctacctctctctcctcccccccaacctctctctctctagctttattattctctctctttctctgcttttattcctctgcctctctccctctgtctctctctgctacctcccgtcccctctctctctgtctacatcctctgtctctctctctctctctctctctgtctgtctctctatctctctctctgtctgtctgtctgtctctctctctctgtctgtctgtctctctatctctctctctgtctgtctgtctctctctctctctctctgtctgtctctctctctctctctgtctgtctgtctctctatctctctctctgtctgtctgtctctctctctctctctgtctgtctctctctctgtctgtctgtctctctctctctctctctgtctgtctgtctctctctctctctctctatctttctctgcacctcctctgcccccacccccacactctccacattccctttgggttggttttccatctcccataatgcaaagcactgatgctcagggtgaacctcttgccacagctgggtggcagaaaaagctgtctggctctatggcctcacagcatagaatttactgagtggacagcacccagcagaggaaatgtttctcaggagacctcctgttccaggtgtattgcccttgtccctgtccctggcttcaatgcagtgtgataccagtttcctctgcctggaacgcccttcctcatctgtctcttcccatcagatcacactcgggctacagagctctgatcctggctcctctgtctcagcttcctctttcctgagctcctatcacatctgctctgaagcctcagcacgctttagtatcacagactgtgatcaggaaaggcggatcatagatttcacaccatccagcatctctcctaattcagggattctccggaaatcttgactggtgttcacctgctgatccggtctctgcctgaatacctagattgaaggggagatcaccacctaaaaaaaaaagaacatcacttttaactgcacgttattgatctcatttatgcacattgattgcttctccacccggaatgttagcttcttgcggacagggactattgtataatataatgtagtataatgtcttctacaataccctgcccaagtctttgcacacactattgctttcaacagatacttaataattgatttcttctacaaggtaaatggtgaaatgagcatccgctgacactttaataatgggctgaatgtttattcctagttacatgtgacttagataccctcagcctccccagtaaaaagaacaggcagaaagtgaagcagatttaactcagttttggtctcatgtgtagaatgaggtaatttcaacttcactgtctgccctctctttcctccttccgttcatatctcgaatgcaatgcagtctccagcatgtgttcagtggcttaagctgagccttgctgggctgcctggcctcagatgaactgcatcaggcgcgggcatcagacgcggcttctgggtgatgctgtgctgagctcaagtcaaaattcatctgatctcagtccttgccaactctcttcccccattctttctaaattgaaaccatcctaagatatgcaacaaggacagccaggcttttgttgtgcttggggcctggcataagttgagaggatgccaggggctcccctcaccacagggctcccctcagatggccagttgttttctaagcagagtcaagtgaccggggcaccgcccgtgagtcgctaaccgtcacctgtgaccaaccatgcttgtctctcggccattctcatgttcctcattcctcagggtctgagctgtcaccataatttaatattttacactgatagatgaagatatcttttagaacccagattttttttctcttcctccttactctcctctgtattcaccccactactttttaaagcaagaccatccaattccactgaaagcggggggccctgtcctgccccccgtgctggtggccgttgccttcccatggctgatgctatccagaagcatccctcagaggcgcgccaagcacggagcaggctggcgttcttggaactgggcatgaacaagcctgagttccttccaaggatctcgtcccacatctttccttctgctttgtgcattttcaaaaacgtctgactccagaggagccgggaggagggagggggccggtcttgcacctgggggttggtgtccacctcctgccccaggccgaggggcaggtccttcccagaagggccagggcagcctcaggcggaagctttggccctgcgcacctaagggacacagacacaccatcttataccagttactacttcctcaggggtgtgttttgttccccggggaccccctgaggcccctcacctggaagccttcgttcttctaagttccacctccttagctccgagggaagcccagctccacctgtgtgggaacagtgctcaccatcaccctccacgccctgctcctgcagatctgcctctaaccaagggcgctctgtcctcaaggagcacagtcagcgtgggggaatggggaatgaggtcctctctctatctgtagtacctgggcactggggacggagctctgaagccctcactcttcctttttccttagtgcacttggcaggttcccctaagaatacacaggcattttctttccctcctcggtgctgttcttgttctttttcttatccctcagccctttggattacatagaagatggacacagctgccgtagtaaaggccccatgaggccagtggcacctgatgtcaacgacagttttgaggctttacttccccgagctgctaagctgggaccctctggctccagatgcctccagggtggctgtcttggccccagatccagagcctctatcttcttgatcctgtctctatgacttcagattttctctgtaagcagaacttgcaaatgaaacataaacatgcaagacagaggaaaatgttcttttgcagagtgtgtttcagggaaaagagcgtgccttggttccccgtctcaccgatttccacagatccgttcctctcctatcccactctccttatctcaaatgtctttctgattgctctgtgtacagacttggggttaaaataaattagggagaatagtttgtcagatacagtttatccaatacgtctgattccttggaagcaaacttgcttgtgatatcaggatgtagaaccacttcgtcttttttaaatttacaaatacaaactttgctctctgtgtgacttgagcacagtgttctcaatgtggcttgtggaggctgggaccctgagggccacacagacggctatgtctgtgcacctgtcccggcagggccccgcgctgagccccaacagggatgggaggctgtccccgagtgctgacgaaccacctctgggtttgcagtgtcctgtccagaaaccgtgtcactgctgagggcaatatggagtcctgacatccacaagaaaataaaaaatagcaaaggaaatcgaagtggggaattttcccaacagttctttccatagccaaccgtaagtcttttgtgcatttcacaaggactttttctccaatttcaggtttgttttcatgtaacgtttgggaatagaattgctatcccaaaccaaggaggccgcaggctggcctgagcggcaccgactcagcttcaggagaggctgagcagggcagccttcagtctttcctgagccacggaccccagagctgcaggcccctgcgcccgcccccagtcactctgcaggaattcttgcatctgaggatagtagagccttcacctgccctgctcgctgccccttttgcctgggaagattccttccttcccgctccacaccaacagagggaagcagagcccacgcagctgaggcccaggcccagagagcagcgccctggatgggcagtcgggccccacccgctcctctcagcccgggcacagccacccgccccgccctgcacctgcgggctgtcgagcgctcctctgcactcttagaatcgcactctgacgtctcgtgagatgctccagagaaagctaggctgtgaatagaaatgctaaaaattatcaaatactctgtgagacagtgacttttaggttcttttcagacccggtcatgtgggctcctgtaatgcaagagctggcacctgggggcacagggtgcgtgggtcggggagccaggctggctcggcgcctgcacgtggcaagggaagctgctgtccacctgcaaccgcacccagcgtacgcggtgcagaacccgactttccacacaggccacggcgccgggactcagaacccatcacgcaccgcgtctccttagaactgagcggcttcctcttgtttgtcccattagcaaatatgtcgcttttgattttcaccttccagtttgtgtgatgagcttcttcaggacaaagacctggacactttcctgttggccagtctcctgcctcccatccccaagagtcacctcttccatttccgcgaggagtaaatgcctgtagattaaatcttcttctgaagtcatgggcaggcatggggcttcagttccagctccaacctgtaaaatcatgggcttctctagctaattgtcctgagcccagaacattttcattttatatcataaagagatttaagctcaaatcacaaatcactggtttcatagtcaggaggcaggaaggctgtacgttggctttgtagctaaaacccagaatcacaacccttttttcctgatttttttcatcattctcgcttcttaggctgcttctgtgctttgtctcagggttctcagcataggagaatttaatgttgctctgagttattccttaagtaaaaacataatttatactgactttcattttttttttttacctagcctttcccttacataatctaaattgatttttataatggccctagaaggtgagtgggctggtgttgtcaatgttttatctttttcctctttatctaatggaggaagtggttgtgttttgaagttcatacagctaagaactagcagaatagcaattcaaatctggattttcttttgctagttctggggatttcttttgagccagtgtttcttagccctggccacacatcaggatcaccaggggaccttaaaaaaaatactgatgcctgggcctcaccccagactaattggatcagtgtctctgcaggcaggggtcagtgcctttccaaaggtcgcaggtaattgcaatatgcaaccaggtccaggaaccacatctttaaaccatgttgttttcctgcctctacgtcagagcatgtgtgtgtatgtgtggactgggggcatggatgctaacagaatgctgtcattttaacctgtagttcttaaacttggctggcacatgtgatgagcaattaagttttaatgactctttttcttcattgttatctttatgcccacaccagtgttgtatttccttaaaatgtaagtcctttaattatacaaactgtgtgagtataacatgttcttgctattatatggcatgtgataaagcacacagcacgctagtcttcgagatgaggtcatccagcgacttcagacttgcgcaaataaagaaccttttaaaaaacgaaagcagacgaaggcctcgctcctcagatggaagtggaagccagggctctgggccttccccagctccctctccttgcagataaacgtttgctccatcagaggttgggggtgaccatgggactctcagatatacagagcacagttccaagacaaggttctagacctcaatctagaaattctaactttctctactgcttctctgcccatgtcctgcaatttgtggctgtgtggctgacatcatgagctcatgtggcagcgttgcgatgctgagttgccaaggccagtgtcagaacataaatacccagactcccactggggatcccagccctgctatggggaggtcttccccagggagcacatttcctctcagcatactctcctctccttcttccatctcctgggatctgcctcctgggaacctgcccttgctgccagtgctgaagtgaagccctgtttatgccatgacacaggtgaactggagtttggggatttatgactgtggctattaattggatccacatctaaatcacttaaaataatactaagaaactcacctaacgtctcagatatcaaatgctttaaagtatcagccatgctctcaccccagttagagaggattttggttctagtccacatagcctgtttttattccatgggtggtaccagtgagggggagttaacatttgtttgcagaagatcaagcagtggtacaagggctcttcttatttccgtcttatggaaggatgactgttcaagtgaacacagcgatttgcaggttgttatgttttttcattattgttactagaggctgttgctttatgcttacatatttgcagatattttttatgtaagcccagcttttctataagatatatgtaaaaattagctcactatatgaaactagacaggcctgaaaaaatgataatcagcaaattaaaaattgtttttaattaagagtatgaaccactatactactagtatgcttgaaatatggggtaaaatcataaaagcctaaaaattataaataggtaagcttgagtacatttaaagaaagctttttggccaacatgcaataaaacttcaacgtatctggcagtatgattaacagagggtattcccaccctagccagacagggccacctactgggattttctcagggttaagggacaggcatcaccctctgttgtcttcagtcttactctgctgttagtggaggattctgtctgcccagacaagtgtcatcgtgggctccgtttggtgataaggaatcttgacctacctctgacatcatgagctgcagaagcctgcaggaaagctacttaacatgcaagcctgtggcttatattgaagggtagaacatttttaacaggataattatcttggagaaaataacttttattattaagtaactttgagttaagaagctatcgatttgaagaagaatataagcctggcattcctgagactgaattgaatgggttatattgttctctagcaaagaggtgttcaagctgaacatgtgtatgtggctctagtctgataaaattccaaagtgtagctcattgtaaaattaacctgataactgatactctagatcagcactgtctaatataaatataatgcaagtggaagaattacatatgtgatattacattttccagtaaatgttaaacataattaaaagaaccagatggaattaattttaataatatagctatctaacctaaatatgataatatcaacaagcaatcaatacataatgatcaatgagatattttacattgttttcatgctgtgaccaaatcttttgtgtattttacctttacggcacatttccaggtaaactgcacatgaggctggtgcacgccctgctctttgaatggatgtggaggacccagataatgagaaacactttgctcagctcttctcaatactttgctctgtctaggcatatgatgatctaatttttttaaagttccttttaattgcattgaggtttgagtgtggtatttaagagcgcttgctgagaaattagatgatcagggttcaaatccaactctactattgacaaactaagtgacgttaggccagtgatgtatcttcccagggcctcatttctgtgatctgtaaaactgatgttgtcctgtatctacctggtcgtgaggattaaatgacaattcctattcagtacttggcacatagtccctacttttaggtcattataaatatatcttccctgtctctagaaatgaactagagtgtgtcaggaaatgagaccagatgatctatctagggataaatctgatgtctgtctgaagaagccaaaaaagggggtgagtaaatattctagaatgatgtgtgtaccccaccagagagttcttaatgtaaggccttgtgtttagctattactctacttaaatctccagtaggttaaattccaaatttcaaactgagctgtagagttggtcgggcttaatagagtttgagtttcattgctattacaatttccatggcaaggcaagtgcttctcttctgcctaaaacgtggtgatatccacacagaaataactacaactttgtttaaaagactatatgaaataactattaattaactagaatatccatatgaatttaaaagaccaagctcttactgagaaataaagctggatttcagaggtcaaaaggagagtcttaaagatgatctaatccattatcctcattttgcaaatgagaaagtcactctgtgctcctgaaattgccactttcccatcttcagtaaatacagtatttatatttttttcaacaatctattttttaaaaaagactgggactgactcatgctagctgattttctgtaaatcacttacttttgagtatttgaacaggtcttacgtccagaattttgcaccaggatgctggcgatgcttaacaaaatgtttgaaagataatggtcctgacattaaataacttcgtctagtcaatttttttcaacacttaaaaatttaatacctaaagtcttgtaagctccttgaggattatctgaatttttaaaaaggattcaaatacttttttttttcagacggagtttcgctcttgttgcccaggttggagtgcaaaggcacgacctctgctcacgcaacctctgcctcccaggttcaagctattctcctgcctcagcctccagagtagctggtattacaggcatgcaccaccacgcctggctaattttctatttttagtagagaccgggtttctccatgttggtcagactggtctcgaactcccgacctcaggtgatccgcctgccttggcctcaaagcaatggcaattttagatgaaatctgtgtgtgtgtttgtctgtgtgtgtgtctgtgtgtatctgtgtctccctctctcaggtgatgataacagaatgggaaatagaacctagtgacatcgctttgacactaagtctcttccactccctgccttcgtgatttcgcgcacccttcccgccttctgcaggtggcctttcaagtgcaggtgggtggggagggaagcctgctgtgtcctggcatagttctccaaagccaatgcctggtgctttaggtagatgtgttgctggcacccttgaccacagatgatctctcctgctgtgtccaagtgtagcaaaccatgtgaggccacttaaacccattagaccatttattattgactcgcaataggcaagtacactttaacccgagtagaaactaaatttattatccttttcagttgtaaagtaaaatccgaagaccagacattctcataaaagtttactaatgggttctatgttttctttttttcaatttgttagaaatcattcgaaacttgatatctgcattacttcttttaaaagtgtacatatatttcatttgattttaaatgatctaagatgccctccacattttagtaatgaatgacattgtcctggaagagtcatcaattctatctgcaaaagagaaagtttctgtgtgtgagccaaagcatgtcacaaatgctcaatgcttccttttagaagaatgaagaacaggccgggtgtggtaatcccatgcctgtaatcccagcacattgggaggctgaggtcggtggatcacgaggtcaggagttcaagaccagcctgaccaacatggtgaaaccccgtctctactaaaaatacaaaaattagccgggggtggtggcacacgccagtattcctagctactcacaaggctgaggcaggagtatcacttgaacctggaaggcagaggttgcagtgagctgagatcacgccactgcactccagcctgggtgacagagtgacagtccatctcacaaaaaaaaaggaagaagaagaagaagagtgaagaacaaagaattggaggattgtttggagggtctgagaaactggaggctagcctgcagcagcagaaagcaccctcgagttgggaagagctggttttgaacccctgctaggcatgctctagctctgtctccaggggttaggcagcatcttgagccaatgtacagggaaataatgatgccgactttgaggattaagagagatactgaacctgcagtgtctgacctaacgtgtagcttctcagctggatactcggaaatgggagcagttgacatgtgtgctgctcttaccatgaagatccctgctcctctgtcaccaggaacatgtcacaaaatagaaagtgtggcttctaggcagaattgggaagacccagaaaggggagggcattccaggtagaggtaaagagatatgcaaagttgaaagcatagaagaatttcatgtttcatttttcctcccacagaactgctaaaattggaacgaatatggttagtgggtagaaaaagttgaattaattttccaaaggaattattgtccttttcttccaccaccctagttttccaagtgaacctaggaaataggaaatatgggaaacttcctggtctgtgcatgtttctttacttctgttttttaaacacctcttatttttcattgtggcatttgtcctgatatggccttagataggcaagctgcgtttgaggtccctattgaacctgcatacattgccataatgcaattcacgatgcactccccaagtccagaaccttctcttgcaactgcaatcactgcctgacaagcagccttttgggcatggagctcacctccagctcatctccccgggttagaagactttgtagggaggacggagacctagggactctctcaagtttcacacaactgaccttgttctttcatttttattaaagcacagacttttattttaaaagaagtacaactttggccaggcgcagtggctcacacctgtaatcccagcactttgggaggctaaggtgggcggatcccgaggtcaggagatcaagaccaccctgacccctggccaacatagcacatgatgaaaccccatctctactaaaatataaaaaatcagctgggcatggtggtgcatgcctgtagtgccagctacttgggaggctgaggcaggagaatcgcttgaacccaggagacaggctccagtgagccaagatcccgccactgcactccagcctggtgacagagcaagactctgtctcaaaaaaaacaaaaaattacaattttgaggagacacagtaggagtgtctaactccaagacccctccttagataaatttcagcaagtgtggctgtgtgtgcgtagggccttcaatactttaatgagaatagctcaagatgcagggaaactatccattcccattaactcaagagaaaagagtcccagttccattaaccatttcttcctcttctcttacatgcagggcgggtcatgaggaggctgtagccaaggacgaggtgtgtgcggctgttgcctggacgtttgtccaatccacgttgacatttgagggatcacagcgtgtggtatgtgaattgcaatgggaccttaccgttgtattaggaatgtaaaggaggtacctgaaaacaagcagaactcacaaggcaatgactgatttagaattcgggcaactgggttcttttgtaccagttatttcttgctgtttttaatgcttacgtgcttcagttgtatgccttgtctagtcaattacatatacatgttaaattcatacatcaactatgactttttcttatatctttatactgatgaaagcatcacctataatctaaatatttcataaatgaactgaaccaagcagagaacttgatccaaaaacatatagttatgtttaatttcctaattcttcttgttatacttacgtggtgttttctgaatttcaaactcctcccactcctactccttcactttagcctgagtgcctgctttgggtgaggccacattgcagacatggctggctctcttgaagcccttgagtaccctgtaagaaagttgccaccatcccttttagacatgaggaaactgaggcagagggaggtcggacaggtagccagaggtgcacggacttcagagcttacttccaatcagagccccattttgaggctgtagtttcctttttccatagacgcacatccttgggaatcatttgtatcccttttgaaatctgtcttggacataactgtgtaaattttcagctgcatgaaagagtagcattgcctgaccacgtgtaggtttgaggtctgagcagcccttactgcctggggactttgaagcagactctcagcttctgtggccttcactttctcttccaattatgagtgggtggaattgagaagtgctacaaatttaatttccagcaagactgagaaataaaccaatctgttggacccaatgtcctctatttgctacacaactaatttttaatggttcaaaaattatacttttcaaggcatcatctctgtactctcttacttttggtgtcaatatctttagaaacttatcctctcaatgtcgttctttgcattaacgtcaaactgccagagagaccaagtttttaaacttctattttctttacataattagtgtatgtccattgtagaaacattagaatattaaaataatagataatataatttttaaagcactggaaattcaaaaattcagtgacaaccaccattagtatgttggtttaaaattcttcaagactgatttctttgacagtcttcaaaaagattttaaattaacatgggtcaaactgtgccgtttgttctttactcctttttcccttatgcatcgtatgtatctttctgtatgaagaactactttttgtgttgggggggatggagtctggctctgtcacccaggctggagtgcagtggcacaatcttggctcaccgtaacctctccctccggggttcaaggtattctcctgcctcagcctcccaagtggctagggttactggcacatgccaccacacctggctaatttttctatttttagtaaagacggggtttcaccatgttggccaggctggtctccaactcctgacctcaagtggtctgcccacctcggtttcccaaagtgctgggattacaggtgtgaaccactgtgcccagcctgaagaactacttttctgttaccttattttattccgttacctcatctagcattctactttatgaatacactgaaatatacttcatcaattctctattgtaatttcataagttggatttttaaaattttgccttataaacatggttttaataaccattctttacctaaaacctttcacactgttaatgattttcttaagataaattcacagtagaattgcttgactcaagactatatacattttgaagcttttgagaagggcattatctttacaatcctgcttcattttatgtgtggtcctatcactgcatgttctctgctattgaaaacacagctaaccatccagtgtttgaacggtctgccattacacatagcagtgtcataaattcataaattcaaccttaagaaaaaactaatctcatagcacaaatttagttttgtaaaggctaaaaatgtatttcaaaatatcttctaaattttcataaactcagttaaaaagctgacacttctgttcttttgttcatatattaaatcaatgtatgaagtgcctactacgtgcaatacactgtgtgaggcagtggtgatatgtaaatgatagaacatgatccagattttgagaagtccaccttttagttgcagaatccacgcttatattgagtctctgatacatggtatgaaaagcattacaatacatttactttaaaaataagatctcagtatgagcaatttaatatagcgaccattattgtttctgatgtgtaactctgagaatttcgagatccactaccattaaagaaagctaggattgtgttcgttatactaaacgccagagtgcactacagaaacatttctgcccccatgccacctaccgctaaaaagtagcctttttattgcttcttgaatatttccaggaacagatagcttacaactcaacaaggcaactcattccattgttggattgtgtcaagggtttgcatattattcagttttataataggcacctgttgtttttactttcagcctctggagagatacagactatgtctaattcaattcaacttaatggatgtattttaatgatctactatgttcagaacatgttctaggttctatgggctaatttctatttcatatgacagtattttcaatatttgattattgtttttctaaatacacaagttaagttcacgccattcaaggtaattggatcattaatataagtctgctaaatctctataaagcaacacattttggcctcagttgttgaccacttacatgagctagttgggaagaattttacaatcaatcaggaagacacaagcatttactcttcccacttctgtacatattacacaacaattatattaaaaagaaaacaaaagtcatttgccccacactattactagttatgacatgaaaagtcatgccacgtgtactagttcattctcacactgccatgaagaaatacccgatgatttataaagaaaagaggtttaattgactcacagttctgcatggcttgggaggtctcaggaaacttgcaatcacggcagaaggcaaagctgaagaaaggcatcttcttcacaggaaggagaagtgctgagcaaagcagggaaagcccctgataaagccatctgatctcatgagaatttacttactaacatgagaacggtgtggggtaaccacccccatgattcaattacctcccaccaggtccatcccacaacatgtggggattatgggaactacaattcaagatgagatttgggtggggacacagccaaaccatatcaccacggttgtgtacatttggtataaaacaaaccctcatcaaaagctggaaaacctagtgtgtcccctatggccgcaccgaggcaagccaccagccttctctaagcctcagtcacttcatcagttaaatgaaggaattagaaatctttgaggagacttaaaccacaatattttaggatgaaattttgtgcttggtgttctgggttttaaatcacagagctctggatgcctctcaggttatggtttgtttggttgaagcttcctctccacctcctgatggggtctgaccctgctgcaatgctgcacgcgcgtggccaccctgcacagactgctgcactgcagccgtgtcctacgaagttgatgtgtgttacctgacttcctccttaaaataacactagggaaggaaacattatcatccccattctcagcaggagagacctgaggcagagcgttatgtaatgtgcacaagggcggatagaagaagtttagttcggtttaaaaggcaccccatagtctcagctcctgatttctgtcttatatggaatgggcaggtgaacacctttactcttccaaatttttcactccaaatagtttcttggagttggttcacttggttgtcctggagataatgcctattaccaaggcaactttgatatgcaagaaactaaagcaatggcaacaaatcaacaatacgtaaagctgtgaaccatacaaccagggtatgtatgcaatgcctaactagtgttttgtggtgaattcattaaaatgacctaatttgacatcatataagcaggaatagtatatgcttgaaatcctccttatgggaagaaaaacttctcagaaaatctaacactttctactttagtccacaaatgaattttcttgctcatacaaattttcttaatttttactttaatgttttctgatgacacttatagtttatttctttatttcctccttttctgatacatgtttttactacttcttatatccatctatttgaaattccacataatttttctacatcaaagcttttgtttcatttacctcttaccccatccttgactttatgccatgtacttgtcctgcttcttaaatagataaatcacgtaagtgctgtctgctaacaacagcttcctacctttcctagtttacattctttgattagaagaagctagtgaaagaaaatcccagtgtgcagtgttgcccgcttgagggtatacattaaaaacccttatgaacatagaatggcaaaatggaaataccttgaaggctgtcgctcaacccgaaactacctggccaacaaacttgaaggtaaaaagctgaactgatagggaaaagcaacctgggcatggaacaggtgttggttgacatttgagggataatcttgattccttccttccttccttccttccttccttccttccttccttcattcattcattccttctctctttctctctctccttcctccttccctccctctttctctcttcttactccattgttttcttccttcctcctggactccacctctctttttccctcccctccccttcccttccctcctccacctttccctcttcctccttctcctcttcttcttctccttcttcctcttccatgttgaatggcttaatcattataatacttctttgatatgtaagaaggcattattgtcctccatactttgaactatcatcacaatcaggcatagccttgaaatataggaaaagtagatactattagcctctatacaatcttaaaccataaaaccaagggagttttgtcctctgtacccagaacttcatagtggccttacagcatcacaactgttaagacactaagaaatggtaaatatctgaaaacaaagatccattgaggagagctctccttttattttaagaatcctcttaagtagtttggggtgaaagataatagcagagatggtccagggcctcccaggtgcttcctgcatctcagagacacaggctcgtggggaggggagtgcagagccctagtgaaggtgcctcccagagctgggcaagggaaagcgtggttaagaagttagaacaagagaaagagaggggccttttgttcttggtaagttcctgtgttgtgttcatctttcctttaggtgatgtggccttgggctcaaggggacactttatcccttcatagttcaccactgtcctactgtttcccataagaagaaatacatggtgttaaaatatagccaggaaaaatataactttatacattaaatttacccctgaagtttaaagcatcaactatttaaaacatctacatgatattacataattactgttgatttcttaagtatgttaatagtgtcctgcctgtgtttaaaaataaagttctaatatgttagatatgcacactgaaacttttgtaggcaaaattatatgatttctggaatgttcttcaaaataatatagaaatggttatcaaatggaggtctagataagcgacagtggccaaatcacatttttgtaactgatgggtatatggacttattatactgttctctttaaaattttgtgtctctttataattctccatacttaaaagttacaataaatgcaaagttgcataacagtgacagaggagggatccctaaaccagactggcaggaaataaatccagctttctatgtttgaaagtctgagggtaaattttcctctctgcctctcagtttcattttctgcaaaatgaggataatagtagcctggacctcttggaatcattgtggagatcacatgagttgctgtgtgtcacacgttacatatacacaacacatgtaggccacccattagtgcctcgtacacagcacaaatatggccactaccattaactcataaaagtaaaagcttttatttttactttccgctttaaatttcttagattaacagttgttatataggaaaagaagtctaattttgtatatgaaaagtgtttctgaattaataattaccttttctattttgcaaccaaaagcagaaataacttaatactgacttttctgtcactcgtaacattggatggatttctaaagatattcaaagaaattattgtttcaaattttgctaggaatatactatagttttttttcttcaaattaaggtatgttaattgattaggtagcttagccataacactggctgtatcgtgggtattttttctttcttttttattctgttgcaaagggtatacaaccccatttttttctataattacaattgttatatgaccatttgtagtttacctttacataacacctgaagggcagtaactttatagctgcttaatcctgtaattatttcttttccacactatttcaattctaactcatccctattacaggaaaagaaccagtcccaggactctggacaactttattttctaaagaatccattttcactgataaacacagtgaaggctgtggcaacatgagcatgtatgtaactgtgggttttgactgttccctctgttctggccatgatgcacctgtgtgcagtctgttccctttcctcccgtatgggacaatctgtccacccgtgggaccctgtcatccattacttgatgggaggtaacagaagtggttttccacaaggtcacccttgagcaaatgctttgtgcaaatcaccatcgggtatgaagggtgaaaagatgagtaaagatggagcattttggaaaattaagaatcaatcggggccaggcaaggtggctcacgcctgtaatcccagcactttgggaggccgaggcagatggatcacgaggtcaggagatagagaacataaaccccatctctactaaaaaaaatacaaaaaaaattagccgggggtggtggcgggtgcctgtggtcccagctacttgagtgactgaggcaggagaatggtgtgaaccagggaggtggaggttgcagtgagctaagattgcgccactgcactccagcctggccaacagagtgagactctgtctcaaaaaaagaaaaagagaaaaaaaaagaatcaatcggaagttagcaggtgaagtaaaggcaaacagaaatcgcacatgtgtggtgccgtggtcaagcaccatgggctctggggacaggagtgttcctttggatgcacaggcccatgagggcttccaggggggtgtggagtaacaggctccagcatctgatatggaggcaagagagaatcatgaggaggagtagaaagcaggcaaatgggaaatggagaggacagtcttgtatgcacctgcagagagggtgagattcaagggtccctcagtctaaaatgaaggcatggtaatgtgaattcagccttcccaagctgcttttcggtggcttggttgctaacaccatcgttgcatgtgacaaccagccttagcgcttgcagagtaggaagatgtcaggaggaccaaggtgaagtggaaactaacaaacccaaacaaataactggagtcttcctggttccctatagccctccccgttccccagccttggattcctgaaaccatttctttgtgtggttgtaaaaggactttattaattaactgacatatttgtaacattttaaagaactgtctgatccacatcccaatgagttaaataattctgataggcagaatcgagaaacttcaatatcccgtaacaagctgtcatggtcctggttgagcgaggactggtctgctcagggctgtgtagggggcaggccctgagaaatgtgtcaaggcaccacacaggcacgcaagggtgtacacccagctttcagagcatagtctctgcagtgtacggaccttacctagcaaaaaggttcactcctttgaaaggaagcctgtaacattgtttgacttcacagggtccctgaggacctattacccatacaccactgtatcaggtggtccaggcacagagctctgaatgctcacattccaccaagaaacacaacagatgaataaaaaaacacaactccataaagcaacaaacacaaggcagggtagtttgtcaggcagagaggagaaacccgctggggcaaggtggaggtcgatctcatttgggaatgacactgaagaatacataggcctttcccaggcagaggaggttggctgggactttctcttgaggacaagaacaaggcgtggaggtgtgaaagaataggttggttatgtgtggaaggttaaggtggaaagatgggctgacatgaggctgggaagacatcaacccatgcaaagttcattgaagtgtatcttggcagcaacaggaagcatgctcagtgtatatgtggaaagttttcacggtacatattgaaatgaaaggtaagtgatgctcacattccatggacgaggtagagaagacctctcagagcaggagctggtgttttaaagaggcaacttagggcaggatgcagcacactggcctgagctcacactaggtgcgatacgacctctaggaaaccactttccctctcctggttttgttcttctcattcaacagcatccaaatcgcccaactgggggcactggggctcagcatgtcatatataggtaggctgatttctgacatcccatgaccagaagtagctcctagtgctgaaaccacagaacactgaacagattttaaggtattagcttcatcattttaggttcgaccaatacttttagatgaaggtcctgcccagaatggccccagcaatgtgatagtctcacatgcagtttgttttcacatgactgctataacaggcatgcacacacacacacacacacacacacacacacacacacacacacattttattattatattttcttgaaatttctttccaaacaaacatgtctacccatttatcctccaagacctggctcagtgtctgcccaaggtgacatccaaccaccagcactctccagctgtggtccccaccccaaaccagcacactggctcccgctgactctaccgcacttgctcatgctctgggtgcaacactgccctggtctcagtgtgtggccatctgctttccttgttccagccccctcatagcactacatagggatcaatacgtgtttgctgagcctcacagctctccgagtggaggctctcggggtcttatggaatgagccctggaccaggttataggctggcttgagtcagcctctgcccatgctctgggaggccttcatcaccacttctcctccatcttaccgtggcatgctttaaacgtgttctgagactatgagcataaggagacattttacaaggtctacaattaagattcctgtgcaaagtgatgttattagaaacatagttcattgcaactgtatagctggagctaatactgtttattttagaaatatgttttaagtacactataccttctttctcaggctactccccttagtccaagaaattgctttagataaaaacaagcccaaatctcctgaaacaaaatcttccaatactagcaatagaggctaagagtcttcacatattatgagtgattaagaatgtccctttattctcctaaatgttttaggaaaaaagttcagtttatgttgtaagtaaattccaatgacatttgagtgctttgaatgcattaacccacctgcccactgtcctctctccctccctccctccttcccttctctcctaccctccctccctcccttccttccttccttttttccttccttctttcctttctttttaaaagtttccattgatgtgtaatagtcataaatattttggagttatatataatattttcatacatgtacacaatgtgcaatgatcatatcaggatattggataaccatcacctcaaatatttatcatttctgtgttgggaacattacaattcttcttttctagctattttgaaacatatagtaattattgttaattataatttctctatgatgcctttccttccttctttgtgcctacctttctcctttttgtttctttttgtaaaaatgtgtcatatggataattgagtatcagttctctatattcatttgaaaagtatttcattagtgttctgtaaggtctttacagcaattttttgtgttttaataatggagacaaaatatttaaaaataccaagaagaatgtgaattataatttcacccacaataattttttttgtgggcggataaaagcaacacttttatattactgcctcacctttggacatgtaaacagcaattgacttttctggtgtttttccttcttataacccaaattccctccttagtaacctctcagacatgcagcacagcagtcctcacagctgggtacctcccgctgctgcagccactctgagatgtgtggccctggtcacagcccccctaccctggggcaggtgcctctgacactcactgcaggtccaggcactgcctacaggccctgactgccctatgctctgagtggcttcccattccctccagacactggctttggctgggcgaccaggccaaagactggtccttaggaggattactatctggggaggtagaacatttaaatcttcctggcatgatacatttaaaaagctaccaaaccatagccccagtcctacaggaacatgatggaatttgagacttctccatggccacccactttctgtattggtctctgttgtttccaaacatctcatttatcaggggtcatttctagatgtgttttaatccttaaggaaaatccttgttcttactcattttgtttttcttctccctcactatttagtgtttttctcaatggctgaaggcaggaccagggccgaaaggtcctgcgatagtaaataggccattggtgccccagcagaggaatgaggaggagcgtcaccagggaagagtccagaattgtggcagggggcaggatacagcccgctgggggcatgtggacacaaagccaggctttggattccgtgagagacagcaaggggcccggaaggcacaggcccctgagagctcctgggactgacactgtcccaggatccctccactgcaggtggagaaggagctggagtggagagaagggagccaggggctgcaggggcacaggcaagaagctggggcaccaggggtggagatgggagacacctggacgccctggaggtgcagggccagcaggatttcctgacccagttgtcatggggtgtgagaaagaagcatcaagggtgacttccaagagttcctccgagcagccaatggaatgaaagtgccatttgctcaactagaaagactggcagggaagcccttgggagggacatccagagatcagtttagacaggttaagccaagacgcctgcttttcatctaatggagaaattcgtagttgaatatgggcttcaggagttcagagaagagacctatgctggagatgatattgttgaaggagtcgaggcagaagctgtttattttgttcctgtcggaactcactaacatgcacacactaaagtgtattcccctgagaggccagtttgttttgttttctactcttttcttatagtttgagatctgaccattactttttttaagcaaagaaatgagatggagaagtagcagtaaagggaagacacccaccccttgggcaggcagcacctctgagagcaccagggctcagcgagggcgggggcagggtgaggccagggagagcctgccatgagtgtcctagaggcccagagaacatgggaggtcaggtggtgccaggagtggacgatgacagggctggaacccagcagtgttgggaagagagctgggcaataagggtgcctgtcgtctttgacttcaggcagggcaggagggaagagagctgggcaataagggtgcctgtcatcttcggcttcaggcagggcaggagggaagagagctgggcaataagggtgactgtcgtctttagcttcaggcagggcaggagggcattactgctgctggtgggattgctgggtggggcgaggcctcgccaggatgcagagttcaggcagccgtgtagcctgtgagtgtctaacagcgacaggcagaatgaatcatgaagacaattttcccagcctctaaatttatttgaattctgatatctccctttgaagatctaccattgatccacccacctagtaaaaacaccgctattatgggctgaactgtgtgtccctccaaaattcaaacccaaggatgtcgttggggtggaatgaggtcatgggcatggcatccttgtccagggagctggcatttttgtgagaagactcagcaatgccagagtgaggacagggcgagtgtggccatttgacagccaggatgcaggccctcgctagaaaccaaactttctggctcctcgatgttgcacttcctccttctagaactgtgaggaaatgatttctgttgtttaaacactgacctatggcactttgtatggcagccccagctgactcccagaaccaccagatgacctcagcgccttggctcagagaggccatctggctggcaggctctgtttgttccctctaggagacgtgcagacagatctgcatttaaagacaaactgacctgcagtgtaaattcccaccattcgaatggggtgggagctttttaagccatcctttatcatatcacatcatggctgatgtgtgtgaacattgttttaggaatgtaagaattgtctttcattaactggaataaacaaaatgagagagctccataaagccttcctcaggtgggtgttcttggactgtgtgggcaactgagccagtatgcctgcggggagctcctcaaattctaatttaaaaatccatgttgttggcactgtgtccccctgtgacctggccagactgttgagacagagaaaaacaaaagggttacttgtcagttccttgctagatgtcagaacccttcactgcagacgtgattcatggtgagaatccgtaaacacatgtgtacacacacagacacgggacctctcgagccagcaaggccgcggcatgctccccggaaggaggaagcgaagaacacgcaaccacatccttgacacgggtaaggagtttgtacattctgacataataaactcgacaacatgaccaggaagggaaaagaaatgaaacaagagtcagcgtcagccgatttttaaagaggaaggtcatgatgagcaggatgcccggcactgctttgctcagtctcggtgacatctctgcagcctcaaactggctgggagggggcacggcatcctgactgagctggggcaggagcaccagggcaggcagagactgtgctgtactttctttattaactacttttgcttgattatgtattgtccttaatgtccttttatggccacacttaaagaatccctgaatacattgagtaccaattagggagattggctgtaattttttcattgcttggattggctgtaattttttcattgctcggattggctgtaattttttcattgctcgtgtgtcatttttgggggcaaatctcaagtggaacagacctctgattcagtgacagatcattcccttctgtccctcttcatccatccctctatctggcacatggtagagactcacagatagatttgcaaaggggataaattatttcatgtgactggacaagacagcaagctcatgactaaaggaatgtgatgaggcagatgcaggcagctctcagtccattgctgtctacaaacattgtgtgaggctgcccaggctgctgccacaaggcaccaactaccagacggcttaaacaacaggcatcaattctcatagttctggaggctccgaagtccagactaaggtgcctgcacatctggtgtgtggcgagggctccctccctgggttgcagacagtctcttctggccacatccccacaaggtgaagatgcagagctggctctctcttccttcttaaaaggacaccagtcccttcatgaagacgccacgctcttgacctaatgactctccacacgccccacccacctcctgacaccatcacatcaggctcaagatacgaattgtggagagacacaaacattagtccacagcccatgtgctatgttgtatatgtgctttctaatattagatcagaagtcatgaatagatttggaggcagagataaaggactgtatgatttgggaatagcaagacataattctggctgggagaatcaaagaggattgaatttatgcaaatggacccactgtgattctgccttcttgattggaggaaagacgttcaggcagaaggcactatagagaagaaaagggtcaagatgttaagcaagacgtgagagccttgataccaggctgagctgtgagggcttgccggggagcacaaatccaggggctactggagattactgggctcaccaatggcagatggcacttggcttccaaagctgaatcttttgggaatctctatgacagcttggagggaagagcatgtggagagaatgcaaggcagaagtaggatgggagtcagcaagggaaccaggctagcagcaatgacctaaaagctgcctgcatataaagcactcacatccgttacctcctgtaaccttcacaaccttcatgagatggcaagtgtgcccccattttgtaagagagcaaagacactgagagatgctattgcggtgctgctcagaatgtgggctgcagttgagcagggccacaaggtctttgtaaaccaccatgtccagagaagcgcacagcctgagaatacagaagcttctgtaacaatttgatctcaatacaaattcaagggcatggccatttccaaaaagtattgtaagttatcttataaaacaattagtctaaaataagtgtgtgggaatctttaaaaatcctcaccctttatctccagataatttagaaagtgttgagcgatagatggccttgggaggccctgatcactgagccccagcccaggcctgggtgcaccccacacacaggagactgggctgatggaagagaaacacagctacaaatctacacatcgccccgaatgcttgggtgcaccatataataatgtccgcaaagagacacctgctcaggtgtgcactaaaacacgagttaatcaaagtggcatttctatttgccttgtgaatggcttgtttgggtttttccctcttccctacagatttatcttcataataatattttacttaggctaataactaaatgagtttgaattccctaaacatgtgattcttgatttcgaggcagggatgttgtcaaggttctgtaaacggaaggcagctcagggttaacaactgccgcgggttatcttcaagccgaaaacacacaccagtgagagcagcttgttatatattggaaattaatgaaaaatggagctcctcttgcagatttcctggcgtggttttccagttgaactttcttaccattgatttctatttgtgagtttattactcaggccaaaaaagttttcaaacattttttctgattgtttaatgttaaacagcaacttttgttatacgtattactatttttaggataagaaatttatgaataattttcataggctatttgtggtctaaatgtggaaaaactgaccttaaaataaaatattttgcattttaatcatagctgttttgcactttacatgtcttctctcttttccactctgttcccccatgttgatgtgcaaatttacaaagaatgatgcccctcatctcactgattattaagagtaaaatgtgtgaaaagtaaatttctgtattatagaggtaaattactctattatttccatacttttcattagccctcatgcctagttaacaatgacagaaaaccttattgattatttacgactcaggaaataaatccttctatccaaagtctacaagtacatgcatcaaatggatgtgggcttgcatggaattggaaaatgaccttgttttaaactctatcttatcttataagtctgtttctagcattttggaattcccatctgctatccccccgaatctcatcttttattaatactgattagaagagtaaatcttcaatgaatgttgaagttagacatgcaaagcgggtattggatgcgtgaccttaaaggaacttgagtggtgtgggagcttaggatgtggttctgaagcctctgtccttggttttttttttcttatttgacatacttgccttaaggatggtgtccattccatgattttaactctcatcttcacagccgaatttcacatccctgactgtagcttgacggatccaggcacctccttgcaggatatttctccttcgatgcccctgcgttccttgagctcagcacaccctgaccacactgggtctcttctttcatctgagttcatgctagctggttgcaccttcccacttcagcccaccaagcggtgaactgcagggcaacctcggccttccctgtccccttctcctaaaacccagccatttaggaaatcctgttgcttccatctggggcattttttttctgtccattcctttattaggtttcatccccctcatttcccccagtatggtgtatcgccacatccgcttcttatacagcctccaattttctttctagaacatactaaagcgtgcactttgacgccttcatgtgggtttacactctgctccgctttttacctgtttggggatcttcggaattcactccacctctctgagtttcagtttccccatggaagtgagggcgaggcccctgtgcttgagcttcctgtgagggtaagggagactgcgaggccaaagtctgccccacgtgccatctgtgaagcagcagctagcacagggctgttgctccttttctcaaacactcttctcagactttgtgtttcagggtaccatttgcccagacgtcagctgctcccaggcacgccctgcccctacagcatctgcacactttctattcgcctcctggctcagtttccccacctggcttgctctggttcaccatggccgtaggacccatcctccctgtgctgaagcactctccacgtactccttagcttgctggctgtattagtctgttctcatgctgctaacgaagacgctcgagactgggtaatttataaaggaaagagctttaatggaatcacagttccacgtgggaggcctcacaatcatggcagaaggcaagggagaagcaaagtcacatcttacatgacagcagacaagagaaggagaggcaagcaaaaggggaaagcccttataaaaccgtgagatctcatgagacttattctaccacaagaacagtatgggggaaactgcccccatgtttcaattatctctcaccaggtccctcccacaacatgtgggagttatgggagctacaattcaagatgagatttgggtggggacacagccaaaccatatcatcactatccctccttcctgtaacaacaccctggcccactccctgctcctgtgccatcctaaatatcctaactggttccagccagggtaatgtagcacatggagccactgcgaaatgctgtggtccctcaccccaccccacccccatcaatatttttactactttgggcctttgtggcttccacacaaatccagaaaagcccttttgggacttaggcactcccatcctcactgcacagtttgtgtgaatattgaggtcttgtcatgtgaaaccagccactgctcctgatgcaaattccatcagtttccattgcacaaggaatgagtattcccaaggggagcaatgtcatattttgggaaaggcaggggcagtgaagtccggtagatcttagctaaaagccttgctgtaccatgagtcaatttggagctgcatggagttattcgcttccttgagagtcaccttattaacctataaaatggagatagaacctgcctcgtagagctattgtgaagactgaatgaggtcatacttgtgaaactcccagaatgtctcttgcagcatcagcaggctgtgaagggctgtgctgcatttgcccagctgctgattgcccccgcagacctgcacccggagctattctgtttctaacctctatgggaggctaagccacctccagtcctgcttagcattgcttagaaaacctctccccaggcagcaccttcacagctcacagccttcagtgttttcctccctccatccatgcctccttagggccccagatcccatcagcctcaaggctctgcccttcttttccatcattgtcattgtcaaacgtaaatgtctccattacttgctatgtaccgtgaacttctcttcatgtatttggattattgaacttcatgcttaccaaaaccatataaaatatccatattttatagacaaggaaatgttaccaaaagattaaataatctttctcacggtcacaacctcaaggcccatgctcttaaacaatgaagttcttcccatgccgcgggtgcaccatccgacatcatcccaaatcccaattagactcgggaggaaggcccgcctggtcccctctgtacccactgtctagttctcactgtgttctctttcacatgccactggctgcagctctttgagctcaaggactcgcacttattaaaataataaagttatcatttattaaatatgccacacaggctatgtaccaactgtttcacttacataatcttatttaactctaatgacaaccttaaaaggtagatgtcattattatcatttaaaaaaaggaaaaaaaaaaaggatgggccaggcgcggtggctcaagcctgtaatcccaacactttgggagaccgaggcgggtggatcacctgaggttaggtgttcaagaccagcctggccaaccccatctctactaaaattacaaaaaaattagccaggtgcctgtaatcccagctacttgggaggctgaggcaggagaatttcttgaacccaggaggcaaatgttgcagtgagccattatcacaccactgcactccaggctgggtgacaagagcaaaactccatctcaaaaaaaaaaaaaaattaaaaaagactgaattttagttgctcaagatgttctgaccagtaagttatagagcaggaatttgaacccaagtctcgctgcctccaaatgttgtgcttttacttactcactccttttctcggctttgcatcccctttaacattcattctggtattttgccatgagaagtgcttttaaaaaaagttgctgaattgatttgggtccattgggttttcctgttgcataattctcctagaggagtgctgaattcctctggacatttttacgattcgtggccgcttggactcagcttcagcactgaccttccactgacgttcaagtcttagtttcacagcatgcactgtgctgtgctgggaccgtggcgcgtcctcagcccacaggaggagtgtacacactccgctgagcaccatggctctgagcagcttgggccagcgttgcacagaacctgaagtccatcgaagccaaccccgcagaattagtgccttactgttctgctcagctgattaagattattaggttgtgtgaatgcttcactatgacctattttttaactttcattcctatataaagtaacttaggaagtatgattctttgcaaatttgagtattattctgggattttttttgggggtggggtttgggggagtaatcagagcatgctatttctactgatgtcatgaggttctgtatacgcacaaataaagaaaaaggcatcagacccagggcctcttagggttccacgctgggctgtggattagtgggaagcagagaccctgggtctcaggagatgcatagtccttgccagtcagacttgcatgagatagagatccagaaacacagagtaagtgaatgatgctaaaactgccaggcttaattcagatgctgtgctggaaggaacttgggcttcagggtcagtcaaggttcaaattctaaccctgccaccatggatgtttggcccagcaagttaactttcctgagccccaatttctttttctataaatgcaagatttttattattacagtattattatcacttaagtattagcggtccattctttataggattttttaaaattatactttgagttctaggtacatgtgcacaatgtgcagatttgttaccccaattttttaaagtgagaaacagatataaaactcaccttgcaaaattgctgcaagggtgaaatcacatagggaacccaagatgcaaacatcatgcttgacgtccagcaaatgggtacagtcactggcccctccaactagcagctcccagatgccaggagcgtctgaggatcctgaaaggtctagtcgtgaacaagaggccaaagtcatatcaggatgaactcagccagaggggaaaagggcctcttctgtgccacctgccaggatcctggggcgtgagctgcatcagctgacaggtgctgtaagtaaaggcagaggagggcagcagcaacgggcactgctgcaaaccccagcaccagttatgctctgttagtcccttgtcttgcttggtatctgtgtgcaaaaggcctttttaggaatatagttcacactcacatccaaaaggtcatctgcgccacacggttcaggcatttattgatttatgcattggaattgtttccttcatcaggcaatacattctgcgaccgggttttgcatatgtgcagcaccccttgtttctgggatgtaagcagagggcgtcgttaaccctggagctgggaggtgattggccctcctcgctctctgccagtagggttccccttctcttccattttcaaagtgattataaatgcacgattttcacaaatgctgaaagaagactgtttatgggaatcctaatcaattaattcatcaaaaaaggaagttgcatgttgtcattcagggaagaattaaatatgactaccttctccaagggcaatgatagttctctttttaaagttattagtttcaatgtgttttatatctggaaattttgtttgtgttttttgccctgccttttgggaaaaatattttatatgttcactttatgctattttgtttcctccaatgaagacctagatgtttattacctgtgatatatatatatatatcacaggttatatatatatatatatttgtgcctctcacctggggtaaaaacatcaaaattctttccaaataaatcactgttcataacataatctacgaaagaaaaatgctgtgctttgaaacacatgtctttatttggaattggacagaagtcatttggactttgggcgggctagaaaagctccaaccagctgcaaagacaggtcagatgttatagctgcaggaatcataatttttttttttttttttgagatggagtcttgctctgtcacccaggctggagtgcagtggcacgatcttggctcactgcaagctctgcctcctgggttcatgccattctgctgcctcagcctcctgagtagctgggaccacaggtgcccgccaccatgcccggctaatttttttgtagttttagtagagacggggtttcactgtgttagcctggatggtctcgacctcctgaccttgtgatccgcctgcctcggcctcccaaagtgctgggattacaggcgtgagccaccgcgccctgcctaattatttggtttttttttgttgttgtttgtttgtttgtttgttttgagacggagtctttctctgtcacccaggctggaaggaatcataattatttgtggaagtattttgcttgataggatattatggcaaaattggatattttataaataattccagaaagagaacttaagaaatagataaaacacacattcattcattcattattcttccccaaagttgattatttacctacttcacaaatatttatttagtgcctgcaatgtgtcagacactattctagctgttgggattcaacactgaaaaaatgtaaaaaatacacaaaaactccagactcctgaagttatgttaaggggtgtctcaattgcacccatggatcatagaatgtccatgactctaatttgagttgggttcattttatcatgcactttttaaatttaatattacctttttgggaaacattaagtattaaagttttatctcattccaacaatttgtttccctgtgtattttttaagtttatttttattcttttaagaaatgaaggatgttcctagtgtatgtcctccttcctggctggctccagaaactgttctaataatcacaagcacaaattccctgacttaggctttactttcagtctccatttacgagaagcacatcatcattaggccactgcctaacattttaatggtctgaagatctccacaaatgtattattttcaattgtggacgttgtttttgtatctgcaccactctcttacttatttctttttgacttctaacataaatgcattttttgccagattctgctatttgcctcattagccaaatctgaacatctcacctgccaactccctattgatagaagttttgaggacttggcaatggaagataattctgtttcctacctaacaggggggaggactaatgctgtggctatcccaggggtttgttaattatcttcttagttccattcagataattttgtgtctatttaacattagcagatgatatagttatgttcctaatttataatattctttcttcatttccgatttgtctaaaagactgtaatcagatttataatgcaactgaacaacaatatcaaaagacatagtgtataagtgcaatagaaatgtagttttctggtttgacttgatggtaagaacaacaaaatgcaaagaaattgtgaaacaaaaaagttggagattctattgtagacacatgttggaaacacatacacacacacacacacacacacacacgcactcacacacacatgcaccccagcagggaggaagggcggtagggtgagttgagcatggggcaatggactgaggcaaatgttgcctaaccaagacttcctgagacaggatttgttggtgctcaatctctgagtaatctgataaataacaccgttaacaaagtatcaaggacaggctcctgagagtagtgtgtttcagaatctggcagaatttcccaagagaaatgctaggagcattgtcccggaagacattaccatgacaacaaaacagagaaatcatcaccctcctcaccaggccaggtcaccgatgagcagccagctgagtgtccgattctgaagacaccctgcaggtgattgtgccacatgggctgggaaatatattccaattgcaaagaggaagataataaaaataaaggaaatctagggaaaattcttttaggaaattttaataaagcagagtctcagtataatataacaaaaaaaaaataattcaccagcaaagtaagcttctgtaagatagaaaaaaatacgtaaaacagaaaggtcgaaagaaagaaatttcaaagttgctccagcaggatacagatgacttaggctgaagtaggtgatagttctgctatcagccttgcaaaattagaagtatgaatggttctagaagttgtgaaatagtaactcacaagcacagcattcagtttctggtttatcactatggttcttcagtcaaacctgtcattttcacttgagatacagtaaaaattcttagagttgttgtataataataggcacgaagtctgtatatgcctttacaattttgaagttctattcacaaaacttttctcatttgatcctcaggaaagttttgtcaagttttattactccaatgcccatttcacagatggggtcacggaggcacagacagtgttagccaataatttttcagcatcacacatcagtcagcggggagccaggtgtaaaatctcatcacgcattgtgaatcctgtttctctctgtaatgtaatctccgtgctcggtgagtgcatctgaaaacactaaggaatggcgtggatactctgatcttgtttagagggagccaggccacgctaatgtcaagacgtgtgtaaaatgagcgcctgctcattgtcagagcctgggctggggaggctgcagtggaagagccatgtgaaggagcttgactgtttctgaaacatttttcacatacattaggctactgtgtcttcacagaacccctggccagtgctgtgcacatctttttctttctatatgaaataaactggagctcgggaaggttaaacaatgtgacctagcacacctggccagcgacacacattgacagggctccaacccaggattcccaatcctgaagcccatctgccgtcgggatgacccgtaccttgacatccatcccagggggattagcactccctggaatggatcgatactagccacattttctataagacgagggtcagtcagaatgtgattttaattttcccattaatcctaaagatttggagattttcaggtcacaattttcactttggggacatattcctgattttttttcagctcttttaaaatataattgacaaataaaaactatatgtatttaagatacacaatgtgatgatgtgatatatatatacattaggaaaggataccacaatcaagctaactaatacatctatcacctcacatagttccatttttttttttaatgtttttttttttattatactctaagttttagggtacatgtgcacattgtgcaggttagttacatatgtatacatgtgccatgctggtgcgctgcacccactaacgtgtcatctagcattaggtatatctcccaatgctatccctcccccctcccccgaccccaccacagtccccagagtgtgatattccccttcctgtgtccatgtgatctcattgttcaattcccacctatgagtgagaatatgcggtgtttggttttttgttcttgcgatagtttactgagaatgatggtttccaatttcatccatgtccctacaaaggacatgaactcatcattttttatggctgcatagtattccatggtgtatatgtgccacattttcttaatccagtctatcattgttggacatttgggttggttccaagtctttgctattgtgaatagtgctgcaataaacatacgtgtgcatgtgtctttatagcagcatgatttatagtcctttgggtatatacccagtaatgggatggctgggtcaaatggtatttctagttctagatccctgaggaatcgccacactgacttccacaatggttgaactagtttacagtcccaccaacagtgtaaaagtgttcctatttctccacatcctctccagcacctgttgtttcctgactttttaatgattgccattctaactggtgtgagatgatatctcatagtggttttgatttgcatttctctgatggccagtgatgatgagcatttcttcatgtgttttttggctgcataaatgtcttcttttgagaagtgtctgttcatgtcctttgcccactttttgatggggttgtttgtttttttcttgtagatttgtttgagttcattgtagattctggatattagccctttgtcagatgagtaggttgcgaaaattttctcccatgttgtaggttgcctgttcactctgatggtagtttcttttgctgtgcagaagctctttagtttaattagatcccatttgtcaattttggcttttgttgccattgcttttggtgttttggacatgaagtccttgcccacgcctatgtcctgaatggtaatgcctaggttttcttctagggtttttatggttttaggtctaacgtttaaatctttaatccatcttgaattgatttttgtataaggtgtaaggaagggatccagtttcagctttctacatatggctagccagttttcccagcaccatttattaaatagggaatcctttccccattgcttgtttttctcaggtttgtcaaagatcagatagttgtagatatgcggcattatttctgagggctctgttctgttccattgatctatatctctgttttggtaccagtaccatgctgttttggttactgtagccctgtagtatagtttgaagtcaggtagtgtgatgcctccagctttgttcttttggcttaggattgacttggcgatgcgggctcttttttggttccatatgaactttaaagtagttttttccaattctgtgaagaaagtcattggtagcttgatggggatggcattgaatctgtagattaccttgggcagtatggccattttcacgatattgattcttcctacccaggagcatggaatgttcttccatttgtttgtgtcctcttttatttccttgagcagtggtttgtagttctccttgaagaggtccttcacatccttgcctcaaagagaataaaatacctaggaatccaacttacatagttccatttttaaaaagttagtgatgagaacccttgaggctactctcttagcaaatttcaaatagacgatacagtgctatttaccatagtcaccatgctgtgcgttagagctccaggacttacttttcctgtctggtaaggttttctgttccttgaatggcatctctcctcatccttgacctcgtgatccaaccgcttcagcctcccaaagtgctgagattacaggcataagccaccgcagccaagattggatctttcaaggtccttatggctccaacctggaaaaacaatcccagggcattaagacatcatcgatagagaaaaccgtcagtcatttccaatatgagccccaagttcaaagtcataatagcaaattgcaggggctgtgtgtttcacctgaattaattttcactccacaggaggtatccagagggtcctactaattcgggaatggcgattattctctcaagtagtgttctcagtggggtgccctgatcagccacaggagcatcagctgggcttcttagacaaggacgttctggaccccattccaattccacagaattggaaactctgggggtggggcacaggaatgcatagttcactaagctctccaggtgaagcaaggggaacattgaaaatctgtttttcagtaacttcaaggaggcagcaacctatgtatgtatgactacacacatgtttataagtgcctgtgtgtctgtgtggctatatgaatggcatttacacacacatgcacactctcatacatgtgaacagacatgagtagcagacatttgctttgcacttcccctgtatcaatcctcagcccatttgtcactgctgacatagtgactgctatgcctttgcttcttatgacggctttggatgtttatgtcagcattacctggccatatagtgcaattagtgctctcgcttttaaaaaaggagcattttgtactgtcacacgattcccaaatgctgcttattgtcctgcactcagtttcttcgaattccctctgcacaatgttctaaaggttatagcatctctttggatttctgtttccagagaaatggtggaaaacagtagttgacaaactttatccttaaaaggcagatagtaaatatgtttgaccttagagccagatggttcctgttcccactactccattctgctgctgtagcgctaagcagcatagataatacggaattgtgaggatatggttgtgttttaaaaccccttatttataaaaataggtggcacctgaattagacctgtggccacagttggacaactgctgatctgaaacccttattcactttcctaagaaagcctaagctgctcactggatcaatagttttacctttcaggtgtggcctttcaagttgctgatggtgcccacactggcctcggcctgcggaccagtttggcctcacgcctctttgagcagcgtgccatgtcagcactgagaacactgtgctcacatctacagcccggagcctctgtctattcaccgggggtcttgttttggcccgacgcgagtgaagatggttacagaggtgattaacagtaatctccacctgtggcaaggtcaggtggaccttctctttagaaaacaagttgtccttttaccccgctatggctccctatttaatgagacttggtagctgcagaaaagtaccagggagcaaagcaaggctgttgccatgaattaattcagactcagtaaagggtaaggtgttcacaactttcatcacttcaactggcccctaataggtataagctgttactgctcttatcccagatgaaagacaatatccgtgatggggcagaaagcagcgggactagaaacggcctccagagcttgctttgtttcacaacagccagtctaatatggtcatgggtgtgatgaggatgaagacggcttctgtacctgtcactgcaggcatccacacgggtatgtgcgacaaatagctaaaaacaggatgacggcccagccttcattctgtaaatgttttatgttcaagtgattcatatttttagaaaattattcaaatattttgaaaatccagttgcaaataagggctgatgtaaatatcgtttccagagtaatttgaatttccagtgaaaatcgtagaatgatttcaccgtgtggctcctttctcccctcccttctaggtgggtttgcagctgctctgatgctctgagggcaaccgttacccttttctggggcaaaagacttgtatgtgaggaggcttagggctgagcaggaagatgaggcttgtgcttaaaaactaacaacccccccaatatcctcctgatatattgcgtgacatagatggaagggtaatgagtgtgtgttggaaatttaggggggtaagaaatcaccctgtaatcgggcagcccagaaaggctgtcaggacggggagctgcaggatgaaccataaatggtgttcggtggagaaagaggatcacttcctacatttaggaaaacaaaacatttaaaatcacaagactatttattttctataaaattatctctttccatagacccttccctttggcctatttttattaactattaaacattcacatgtcttttattttaaatcacttcaaatatttcctggaggcagatgggttaaatatcataaaaacaaaaaataaactggaaatatttatgtaggaaagaatatggcacatgtatattatagaagtcgagaaaaaatatagatcatttccttgtagtaaaagtttggggaagaggggaataaaataaaaaatgggaagtagttggggctgtatggtagatcagttggaggacaattttcttggtcagaaggacaagctgtgattcttgtgatgaagattaaagttcaattaagtaaaaatggaaagaggagatgacaataagcactttcattagaaaaaaaatgaacatttcgcatctttctgtggaactttgccattctgtatctatatggctttttcagggtgtttaaaacaaaatactaagtactaataatagctaagatttattgatctatgtggcagccagtgctgtaagaaacatacatgtctgaatctgtctaatcttcacaacaaccactgtgcagataaggagacaggagcatggaggccaccacggcaatgcagctctagagtcccttctctcagcagctccagcgcctctggaaaatgcccacatcaatgtcccatcacagtctcctgaggtgcagcccagcccccaggcctcccggagatcctgtagctgctgaatgagttgttcccctcccagggcctctgcttccttcatggattgatggagttcgactctaaatcccgaatccaggtctgatctgcagtcattgttgaagattttccccatgaacggcattaattgaatctcatataaaagtagattatttgcttacttatatgtgcattggacaaatatatgcaaactcttatgcaaaaccttatatgttgcaaatctgcaaaaggtaccatatactctttgggatacacacaatgcacagtgcagaattctgtgagtaacgccacggccacggtgcacaacattcctttcacacttatcacagggagccttcggttttagttatcttttatacatagtgtgctgggggtgcatatatgtgtgtctttatgtatattttggagcatttttcccaaactatgtaatcttttcatctaaaacatgttttaaataagcttaggatgaaagttaattcacagtctcgctgaaggcagaccttaggagagtggcagtggctggaatgattgtttccgggaaattccgacttgctctcctgccccgcttcctgtttccgacttgccctcctgccccgcttcctgtttccgacttgccctcctgccccgcttcctgtttccgacttgccctcctgccccgcttcctgtttccgacttgctctcctgccctgcttcttgtttcccacttgctctcctgccctgcttcctgcacatgaactgggagttttttctcctctcagctctcagcctccttggtgcatttctcttccgtgatcctgtgttttactttgcatgcccttcttggcactcgtttttacaaacacgttcccaatccttccttttaactgcatcccccttccccctatagagcattagaagtgaagacattatcagtcagtgactctgggccacgccattactgagatttcccgctgagcaatgctctgtgtggactattatccagaaatttcatatgctgactcagccaaaggtggaagagtagagaaagcgcctaacgctctcctcagcaccttcaaggcgaagtcactgtgtggaagccagcgagccctgttcccagagaagggaggctcctgcgaggggggcagcaaaagctgcagctggaatggagaccaggctggacagtggagcccgctccggctcacaggtgtcctggtgatcaatgatgtttccttctctttttttcttttttttttaaattctttttttctttttcaaaggtgccacaatagcaaaagccacattatttttatatgttcttctctttgattgactctaaaattttgcagaaaaacttgcctaagaccttaactgaaaataaaggctttcaagtgagggatagaaatttggtttatttttttaaaaaaaattttacttccttgactgtagatgtaaatgaggattcaggatacatgccctaaaaaggtgtcctgaaggagagaatgatcttgtttacaaagttataggccccagaatgttctagaaaaattcacataagggggaagaaagaggggaaggcattttagaagacatatagcaccccactgagcacacccagggatgcttttcgtgggggaggtgaggacagatgaagaagacgatggcctctttcctttagccttggagatgtggtctttggtggtggggacaggggagctttgcatgccgggccctccctgctgctgtcttcccccttcaacaccccgcccatctaccagcaacacacacctgtggtgttatagttgcttttatattcaagaatttagaaatctgttatagaattaaaataagaattctgctgtatgcaagagcagtttctgcactgatccctctgaggagccatccctgagtccctcctggattgcagaatggaggagccagcatccgtccctgcagctcaataggaagaacagcttgtggtgggcagtgtggactcatgcccagacacagaccagggctggagctgagatcccgagaggtttcctgggttcagaaagaggccatgggagggctgaatcttagcctggaacctgaagcatgggctggtattcagggggaattttaaagttaaaagggtagtcgggacaaacagaggtaagcagaggcaggacaggagagaggagcttgggtcagaccatttggacaccctccttgagaacgaagccaggaaagttggctgagacagggcagcagagagagcctgtcttctctccaccactggaacacttgagaggaggaatggagaattcggtaacaaggacagctgaattttagtttacattttcccctggccaaaatttaggtaacttcaggtaaatctcatttcatcttttatattttttagatgcctgctgtgttccccattgcctgccttgccttgccgttccctttttttcttttcttttcttctttctttctttctttttcttttctttctttcttttcgttcttctttctttctccttcccttcctcctccctcccttccttccttcctttttttttcttttcccatattgaacctggcccttattagatgctcaaatgatgctcttgtattagttgtgggtaaattttctttgagaataaggcatttttcaaaacagatatattagagctttcagatcctgtaatagatctattgtcattgcatcaactgtcaactagtagcttggaataacctagtgaaaactgaatttacctggtgttaataaacacagcacacttggtttgctggcttatgtacttcctcaatgtccaggtgcctactgggtgcattccttggaataatagcgcttcataaaaacagggtgtgagggtacaagtcagctggagtggggcaggaggtggggggtacagtcctgtcatgccaggtttctgcacctggaagcgtggcgtgggcggacagcattggtgatggcattcacgggcggaaaccctgaaagaactggtggagtgataccacttgcaagggcaggagagtgaagcctgggctgcagcggacgtatctccacgtctaggtcattatacagtagtttatcttgttatcttactaataataaaaggaatatgggctcattgtaagcaaattaaagaaagtaaagaaaattataagagaaaaataaatcacctctaatttcacaacatacctgtaaatgaggattgaggatatgtgccttaaaaatgtatcctgaaggacagaatgatctaattccacgatgagaggtaatagcttttatcatatacattaacatttaataagatttgatacttcaccttacattatgaacatttttcatgccattaaagttccaggtaaacattaagtcggcaaaatattttgtttgcagaactgatcataatctatttaacattttctaattttaaacattttttaattataaatcatgctataattaatttttttctttatatatttaaagagtaggatctttaaagagaataactagaatacattcaatggataaattatgctggctgaatttttctttttctcaatttcctttttagttcttgtgggtacatggtaggtatatatatttatgatgtacaagagatattttggtacaggcatgcaatgtgtaataatcaaatcatggagaattgggtatccatcccctcaagcattctttgtgttacaaacaatccaactatactcttttatttttatgtgtacaattaaattattattgactatagtctctttgttgtgctatcaaataactaggccttatttgtcctttttttttttttttgtaccctttcaccatccccacttccccgcctggccccttactactgtcccagcctctggtaacattccttctattttctatcttcatgagttcaattgttttgattcttagatctgacaaataagtgagaatatgtaatgtttgtctttctgtgcctggcttattgcttttaacataataatttccagttgcattttggtgcaaatggcagaatctcattttttatggctgaataatactccattgtgtatatgcaccacacttttttatccattcatctgttgatggacacttaggttgcttccaaacattggctgctgtgaacagagcttcagcaaacatgggagtgcagagatctcttcaattacctgatttcctttaagtgtataactagcaatgggagtgctgaattttatggtagctctatttttatttttttcagaaactttcaaactgttctctatagtggttgtactaatttacatttccactaagagtatataagggttcccttttctcaacattctatccagcatttgttattgcctgtcttttggatagaagccgttgtaactggggtgagatgatatctcattgtagctttgatttgcatttctctgataatcagtaatgttgaacaccttttcatatgcctgtttgatatttgtatgtcttttgagaaatgtctattcaaatcttttgcccattttttaatcaaattattagttttttttataaagttgtttgagctttatatatgttctggttattgatctcttgtcagatgggtagtttgcaaatattttctccctttctgtaggttgtctcttcactttgttgattgtttcctttgctgtgaagaagcttttttacttgatgtgattccatttgtccatttttgctttggttgcttgtgtttgtggggtattactcaagaaatctgcccagatcaatgtcctggagagtttatccaatgttttcctatagtgctttcatagtttgaggtcttacatttaagcctttaattcatttttatttgatttttttttctattttggtgaagaatgtcattgatattttaatagagattgcattgaatctgtagattgctttgggtagcatcaacattataacaatattgattcttccagttcatgaacattgaatgtctttttatttttttgtatcctcttcaatttatttcattgctatttcatggtcttcattatagagatatttcacttctttggtttggtttattcctaggtatttgtttttatttgtggctacagtgagtgggattacttttcttttttttcttttttggattgtttagcattgacatataaaaatgcaacttatttgtgtatgttaattttgtatcctgcaaaatttattttttaaatttattagttctaatcattttttggtgtaatctttagtttttttccaaatataagatcatatcatctgcaaacaagaattactttacttcttcctttccaatttgaatgccctttatttcttccctttgtctggttgctctggctgggactttcagtactatcttgaataacaacagtgacagtgggcatctttgtcatgttcagatctaagagaaaagtctttggcttttcactcagtatgatactagctgtgagtctgtcatacatggcttttcttatgttgaatatgttatttctatacccagttttttgagggattttatcataaagcgatgttgaactttatcacatgctttttcagcatcaattgaaatgattatatggtttttgtccttcattctatggatattgtgtatgacactgattgatttgtaaatgttgaaccatccttgcaatcctgggataaatttcgctgggtcataatgaatgatcttctaaatgtattgttgaattcagtgtgctaatattttttgaggatttttgcatcaatatttatcagacatattggcctgtatttttctttatttgatgtgtctttggtggtgttgtcagggtaatactggcctcatagaaggagtttggaagtattcccttttcctctattttttcaaacagttagagtaggattggttttggttcttctttaaatgcttggtagaattcagcagtgaagccattgggtcctgggcttttctttactagactttttactacggcttttatctcattacttgttatgggtctgtttaggttttttatttcttcatggttcaatcttggtaggttgcatgtgtctaggaatttatcaacttcttctagattttccaatttattggtatatagttgctcatagtagccattaatgatgctttgaatatatgtgatataagttgtaataactcctttttcattcctttttttttaaatttatttgagtcttctctcttttttgcttaatctggctaaaggttgtcagttttgtttacctttttaaaaaaacagtttcattgatcttttgtattgttttattcatttcaaattcatgtatttctgcttttatctttattatttattttcttctactaagttttgggttggtttgctgttgcttttttagttatttaagatgcattattggttatttatttgaagtttttcttctttttcgatgtaagcacttacagctataaatttccctcttagtactgctttcactgtattccataggtttcggtatgttgtgtttccattatcatttgtttcaagaaagtttccaattttcttctgaatttctttactgactcattggacattcaggaacatgctgtttaatttctatgtatttgtaaaattcatggaaattctaaaattattcatgttaataatttctagttttattccattgtgatcagagaagatgcttgatattatttcaattttttgaatgttttaagactcgttttttgacctaacatatgatctgtccttgagaatgatccatgtgctgaagaaaataatgtgtattctgtagccattcaatgttctttaaatatctattaggtccattttgttctataatacagattaaatcaaatgttgctttgttaattttcggcctgggagatctgtccaatgctgaaagtggggtgttgaagtctccagctattgttgcactgaggtctatctgtctctttcgctctaataatatttgctttatatatctggatactccagtgttgggagcatatatatatgcaattcttatatcatcttgctgaattgacccctttatcattacataatgatcttttttgtctcttacagtttttgtcttgaaatatattttgtcttacataagtatagctactcctgcttttttcatttccattgaatgaaatatcattttttatccctttattttcactccctatgtatctttataggtaaagtttcttgtagggaacagatcgttgggtcttgtttttccatccattcagccactctctatcttttgattggagagtttaatccatttccattcattgctattattaataagtaggaacttactcctgacagactgattttttccaaaggtcataccacccaattacattctcattatgaagtctacggaattgtccaagtcacaacagtgctcaccagtgagttcgacactcagcctccatgctctgtgggctacatgttaggcttctcaccccatgttcttaaaaagcattgaacatgttcataaacttgaggtgtaatttaattggcaaaagctaagatacttaggctcccaataagtgatcaataaaattaattagcactcatcttcagatgtaaatcaaggtttacaattttttgaagtccctgtagccttatcttacacagaatcacatgccttcttctggatgattttcacttaggcattgtgaattaccttgtatataaaaataacagcacaatcactcatacacagtaggcactcaataagcctctgttgcttcgatttagttaacaccagagctgtctgaaggcaggacaagaaaaggccccctcacaggtacagggacccctgtctcatgctgatgagctttctttcttcccttttggggtttataaaaggtctattcagtacccgtctcatggtgttccattgcggcacacacagctcatttcagccacactgtctccccatcctagccccaggtacctattaaaaaggtagcaggaaaaagtctgaagcataaatatgcaagatgaggaacttcttcaggtgaaaagcattgaagactcagaaataacctgactcttttgtggcaggcgaagctctccactcctgggggctgctagtgtatttcacagaacctactaaatgattgtcattgtcacctctctgctagctctctttcagtagtactccagttgcaggaaaacataccaggtgcctcaggtggaggaggctgaactagggcagtcagcgagcctgtattagtttcctattggcagttgcaacaaattcccacaaacacagtggttgaaagaatgcaaatttgttatcttacagttctctaggcagaagtttaaaatgggtctcactgtgctaaaatcaaagctggcagggctgcatttccttgggaggctccaggggagaatccctgtccttgccttacagcttctagaggccacccgtgtgcttcagctcctagccccagcctccatgttcacagccagcagcctagcatctccaaatccctctctgacttgaaaaatgagaaaagattggaagaatggatcagaattatggaggaggatgattaacagccttcagcaggctccactgcctatgtgaaagcatgcgctgggctgactgagagtggatggtgctgagccctgtagagtcctggagaaggaggtagaccgtcctcagctctagcctactccaagacatgagcttgggaactccttgagcctccattcctgggggctgctagtgtatttcacggaaactgctaagtgattgtcactgtcacctctctgctatcttgctttcttcttttgtcattacactttgaatgagttgtagaagtagcattaaaatataataccagctgctgaattcctggtttaaatgttgccaagcctcaaagcttgattaacttatctagtcttttcttctcctgaagaaagaaacacaaggctcaaggagttcccaagctcatgtcttggagtaggctagagctcgggatggtctacctccttctccaggactctacagggctcagcaccatccgctctcagtcggcccagcacatgctttgatgtaggtgttggagcctgccgaaggtcgttaatcatcctccaccataattccgacccatacttccaatcttttctctgtttttcaagattattttttcatcccctgtgcctattttaacaaatcactcttggtgcaatagttagccttgtttacataatctgtacactggggagctgttctcaaactgtaatacgagtatgctgtgttgttaatctgagcatgcaagtggggtgctagacaccaattgtccattcctgttgagtatgcttcatatcatttagaatgtacaacaggatacaatgttgcacatagcttctaaagggaaaatagcttttctccatatctttattctaataaggacctcaaaataatatggtagccatctcagctctcccaggtgatgtggctggctagagagctagaagaatctctagccgtcagtttgcagggagaacctggactgctggctggagcaggcaggctgcagggcagcccattcagtcaccctatggaggtatcgtgtcttgccaagggccacatcttatcaagtcagtctgtgtttctgccaccatttcccctcttctccacacctgccctctgagctggctctgttcctggagcctgcagtttgagcaggcctctcatttccgatagttcagcttatgctgagctggtgcaagcttctcttctcccaggggcttcaagcctcatcaccgatatctgaaacttgggatgttcaatcttcaagactcaacttcctcatttagaatatggggatattatgtgccctgtccactgtgcagaatgttgtgagactaaactaagataattggtcagaagtattttacataccataaagcactgtgggaggcacacttttatcattttttatttatgagattattatttttcccttctcataagtccatcaaccaagaatcttgcaaaagtttactgtttaattttgcaaatggacacaaacaaaaacccacattgagtggtctttgggaaaactacccttttccaacaaagaatagggagcaacaaagacctgggagcaacaaagaccggtcagcattttcccagattgtgacttttcataaaagcaggtgtgtgtagtttgatatgtaaaaatcttttgataagtttgagtattttcctatgggagtgaacatgcatgatcgaaatagaaacatatttggaatgatggtctccaggattgtgtgagtattttattatggaatctgtatttaattgccttttggatgtgtctggaatttagtcattcaaaaactttcctgtcagtgtgcgctgccaatcctgcatgtggtctttctgctggaatggctgctaacaaggttgccaattagggtgaacatttttcagtgatgtgagcctctttccactggaagctaacttcgagcctccttgttgcttcatatactgaaatgtgtcatctaacaatcagatgccaaaagtgactccactactttgctcgcagctcccaccagaatccaaaaacaaaagacaaaaatatgagacagacactcatttggattcctgcgtgtgctaccatatgagtcttatgtgtttctataaataaaagcagtgtggattgagtgcaacatgtggcttcccagctacttttctgcagggcccctggtgtttattaaggcctgccacatgcaaggtcaaaagtctactctattctacattatacacaactaggtaccatggaagtttgtgatttggcatgatacttcttcacaactagcttaaaaaattatgaagtcaattagtttgtgcccctgttttgttggggaaccttaaatcccactgtcccaattaagggagatgccaagtaaaggtatagtccgatgtaaataaaccttgagagataagtttgtatagaaggttatttattttacataaatcattttgttctctttgcaaaagaattcaccaagaatatctttgaatggtaaactttcttagggcttttaaaataggacatgcctgtccaaaccttgattttaacttgttgttgaggaaactgtaataaagtgtatttttacttaagacaatttcaattcctcaacttcaacacttctgatttctcctttggttttccaacttcagggcagcctctcccttggtacttctctccacctggggcccttccttcattctcccctgctcccattgacattgccccttggtcaacagatagccatccatcctcctattccatgggcaccttcctgaaccctgcacccttcctagagagctggtctctcttgtttctgtcctcttcattgctaaaacctattccacaggcaccttcctgaaccctgcatccttcctagagagctggtctgtcttgtttccatcttgtttgttgctaaaacttgggcacatcttgtgcagaggaatgtacttcatttcctcaggattttctgccataaattctccttagccatattcgacttcatattgtgatttaggtgtatgcccactcactagaccaaaaactatctgtggccctgataatgctccttgaaatgggctttcctcctgggtgacagctatcacatcttatgaggcatacacagtctcatgggattggggaccctgcctgcttctttctgaaatgcccacagtattccaagtgaccagtgcttgataaatggaagcttatggatgaatggaagactaatttatttttgcaatgtttgttgatagagcgtctcttatgtgccaggcactgtcttcatgagaccaaattctgagtaaaagatgaaggagaaaagactcagggcaggacattttcttctagctaaagcagcaagttcttttcgtaatatgtggtgaaaatttatagtttatactaagcccctggaatgcgctttacgtgttgttaaccatcactctgttaataatattggatcaagtcacatgtttgttttcctcatttttccatttgggagatatttactgggcctgcgctcctttgcagagattggcagagggaaaaagatggatctggtctctgtactcatggactcatttttaggaatgttttaccttttaagcttcctaataatgaactctgatcttccagttacttaagtgaagaaagctcgtacttctgacattttttccttttccttttcctctctgtttttcctccttcctgcctgccttcctcctccttctccttttctcttccttttcctcttttttccttcaatcaacctatcaatgtatattgagcacttcactaaatgcaaggtgggatatagtactatatatatgtgtgtgtgtgtgtctagacacacccatctctgggtcccagcattctgctttctgtctctgtgaatatgaccactagtcttacctcatgtgagtggcattgtacggtatctgttcttttgtgactgctctctttcacttagcgtaatgccctcaacatccagccatgtcgtagaatgggtcagaacatccttcctttctaaggctgaataatagtccactgtacatctgtcagtggacacgtgtgctgcctccacctttcagctactgtgaattatgctcctatacatatatcttgcttgcagctcccaccaaaatccaaaaacaaaaaacaaacaaaaatataagaaagaaacgcatttggattcctgtatctgctaccttatgagtcttatgtgttcctataaataaaagcaacgtggctggagtgcaacatgtggcctcccagctgagttttctgcagggccgcaatgagttcctggcctcataaagcagtgtgtggacaggcagctcagagcagtgccggagaactgaggagagaggagcgtttgccatgctggggtcatagaaacgagaaaggcaaattcacttcatggggcttccccattgtgttcctgttcttccctcttttctgattatttctgttttgtggtggatgtatcacacacacacacacacacaaaagatgtattttacaagaaaccaatatacatttaaaactcccttttaagagcacacatttttagtgcattggatatggcaggaagcgtgcggttatagcacctatgagcttgttactttattaacacgttcactaacacacaaaattcagaaattcaaaaaaaaattcttggtaccattacagcatccaatatcaagaataaataaaaggggctaacatattgcagcatgatacttttttgtctttatttttccctctgtctctctccaatacgtgaagtggcagctaccattcactcataagctaaaccccaaatcgcagggacacatctgtgaaagggaaatcagggcattattctgattgtggttctgaacaacatgacttttgacctacatatatctaagttgttaaaattggaaccctttttccaactccatgacagtggtaggaatagaaatatgctccttagcctctaactaaggccgctggcacgcggggctggcggggagagtgacaccgtgttttacctcagggctgcctctgtgtgaagaaagctatgatatatttggaaaatgtggacaccgctatgtcagcgacactaattgtcacgttcaaataatataattccagtccatatggaagtaagagctgcattatcgttttctcgtttgctttagggagacttagacaaaggattagaacgtatattttaatttgtgttactataaaaatagatgtaattatgtactatttcaaagtagcaataaacaaagagtagataatgatccaaattccctccatctaaaaatgaccactattgccatgttgttatccattgatcccatattttcttgatcatttacatttctttttttttaaaaatgagtctgtgttaccatactttttaaagtaaaggataaaatattttacttgggaaatatgtcacatagtaaatttaccatttatttatttatttatttagagacggagtttcgctctttttgcccaggctggagcacaatgctatgatctcagctccctgcaacctccgcctcctggttcaagtgattctcctctgcctctcaagtagctgggattagaggtctgtgccacgtgcctggctgattttttatgtttttagtagagatggggtttcaccatgttggccaggctggtctcaaactcctgacctcaggtgatctgcccacctcggcctccaaaagtgctgggattacaggcatgagtcgctgtgcctggcctaccttttatttgataaaagagtaagagacaaggagaaatagagacaaaggaggaaaaagaatggatgaaagaatggcacaaaaggaacacaaactcagagaaaaaagagatgagtgcaaggggacccgggggcagagagaagactcaagagctccccacagcagctctctgctctgtctgggagacttcacctctcagttccattcatgaaatatcaaattagcagattacccacctgccttttctgttgatgttgcctgttgtttatttttattggtttgctatagtttggagagccaaaccagcccactggggagaaagaggaaaatatttttggaatctatcagcagtgatgagagcaggttttggaaatggatataatcaagccagtcttaggttgacggcatggcatcacagagcctatcccccatgtaaaccccgaaggacgttgcccatcccgacttcagagtttgaagctattcctttcaaacaaactcatagctcacctataagtaaccagtaactgcttatatgtctctaatactttaactttccttgaatttgtttcactaattttcctgcatgtgaaattgaaagtgtgttacctgccacccatgtgcactgtgacaatagtgaagaatgtgaaggaagcattatcagtctgtaaaaacgttcatgaggcaacttatcatggactaattttaggtctcattgagagtcactttttccttcctttgcccccgtctgtctgtgcatgtgcacatatgcatacatttgacatgtttccagtgggcattctatgttatgttatggtggctgcaaaagccacagtgaggagctgggggtggctctaaactggaaatggtagtgtccattcatgtgctagtttcgaattgccattgcttttgtatatgcattatcaagtaagagactaagtgagaattatcgttatcttcatttttagagatcaggagccaggctcagtgtggccagtaggctgggtcagggtcccccaggagctggcatgtggagagctgacacttaaccagttctcactctttgtgcaggctcttggcaatgccccacccaccctggcacctgctactattccacatcacaagagaccaagataaacagatcagctacccagagactgggacgtgtacagctatgggggctgctaaggaaaagggcagcttttagtcaaagagggcttacttcctgcttatcgtggaacatgtagagatgtatttactacacttacaatcgttgcattgcacaaagcgtttttatcacaagttgatctctaagagtgctttagtagcagagctcctacacggagattgtaacgcaggatctctcagatatacactgcacacaggtttcacctctcagctgtgattctgctggtgggtgccgatcccttagcgttccctgttccccaaacaatgaagaacaactctcctcgggtgtcacccagcacaatggatctcaaacaagtgacgaacgacaatctccatacactttgtcaaaggaggaagtgtttctccaactgcatatttactgaagccttatttgcactacagatacatctgaaactgcacccagtgaccccacccttcctttgtggccacagaaatgaaccactctctgggaatccagtgggaacattattgatctagtcccaaatcttcattttctagattaaagagttgaggcccggacagcagggtaccttgcgcagagacacacagctcatgggtttcccagtaaggactgacttcctaacagcagataatgaccttgatttaccttccttacaataagttaatacagcaattcagatgccccaccaccccctgaccccatgttctctggttctgagaaaaatctaagcattcaatatcctgaaaaatattcaactaagaaaccttaaaacactttatcttctttgaacgtgtcatgatcttgtctttccattatggaggaatcataacgcgcctttctgtcagaaggatcttcaatgtggaaagtgaaagcctgtggtgtttgcacgtgtgccccgctctttaaacaacctgactttaccttatgcaagtaccaaggtgtggcgaggggagttgcaggtgaccgctgtcccaggttgcctctgtctgtggctttcacaggagaccccagctgcccaatgaggcagaacccaggtgcagatgccatctctgtcagtcacagacatgcagcccacgtgaccctgagcaatgacttaagctgcctggccccctctttggaggcaggacattcccaatccaggggcttagggacttaagtggtttatgtaaaggggcctggcacccactgagtgctccaggcgaggcatccctggcattctgaagggaggcttcctctcactgaggttctgtgggattttggataaagaggccatgagaggaaagtctattcaattatgcattttaagcaacttaaaacacttacaaaaactgctttttgttaggaaagagaatgatgtctggcacttcaggatacaaaatcacatccctcatactgccattctctatccaaaccaccagcacagtgatgcgaggagacattagtgctccctgtgaaggaacgggccttttctcctgccctggtttcaacttggcttgtgcaaggtaaagatgtttcacattcatgctcctcacaggttgctgtggttgtgtgaaaagtgctggttatcagttagttgtgggtagttgaaatcttcagacggaatgaggtgggaagggaagggagctaggaagggaggaggaggaacaaagagggatccagaaaggaaagagtgagatgggaaagtatgagcatgtccttcaaaaacatcttcctgatttaaagaaaggacaaccaggttgggcgtggtggctcacacttataatcccagcactttgggaggctgagatgaatggatcacctgaggtcgggagttcgagaccaacctgaccaacatggagaaaccccatctctactaatagtacataaattagctgggtgtggtggcacatgcctgtaatcccagctacttgggagactgcggcacgagaattacttgaacctggaaggcagaggttacagtgagccgagatcacgccattgcattccagcctgggcaacaagagcgaaactccatcaaaaaaaaaaaaaaaaaagaagaagaagaagaagaagaagaagaagaagaagaagaagaagaagaagaagaagaaaggacaaccaatgagtcttcaccagtttttgaggcaggctgaaggaatattggaatgtgccgtgtgatgtactgggttgggttgggatgtgctgggttgggttgggatgtgctgggttgggttgggatgtgctgggctgggttgggatgtgctgggttgggttgggatgtgctgggctgggttgtgacatactgggttgggttgggatgtgctgggctgggttgggatgtgctgggttgggttgggatgtgctgggttgggttcggatgtgctgggttgggttgggatgtactgggttgggttgggatgtactggtctgggttgggttgtactgggctgggttgggatgtactgggttaggttgggatgtactggggtgggttgggatgtactggggtgggttgggatgtactgggttgggttggcatgtactgggttgggttgggatgtactgggctgggttgggatatgctgggctgggttgggatgtactgggttgggttgggatgtactgggttgggttgggatgtgctgggctgggttgggatgtgctgggttgggttgggatgtgctgggttgggttgggatgtgctgggttaggatgggatgtactgggttgggttgggatgtactgggttgggttgggatgtactgggttgggttgtgacatactgggttgggttgggatgtaatgggttgggttgtgatgtactgggttgtttcgtaatctgttcattcttgggctcctttgggaatatgaagggtaatgatacgctattatctatgtgtctcaaaaattcagatgcaatgcaaatgaaactattggattttcaataaaaatatattagctgctcctcagcctactagtagtaaaagccattcacaaccacattttcttgatgctagagaaatattttaattagaaatgaagagtacatgagggaggggcgtaccttataaaaatatagaagtaaaacactatgaattcacaatttcaccatggaaatcagccagtcagccggagttagtacatgaccaaggcagtgatgtatttcagtgtacagtgtgtggaactgaggaggggctgcgtgttcactcttgccaaatggaatatggcagaagggtgagaaatcaaactcatgcaatgtgagggccagaggaaccaagaaatacaacctctgtgggaaacacaggtccagagttagtgccaataaacacagggctggaggtaagagacccaggagcaagggagacaccagccagctaacagggaccccactaagggatgctgtgagggtgacactaaccagctaacacatacccctctaaggggaagctgtgaggaagatgccaaccagctaaccagctacacacacccctctacacacacccctctaaggggaagctctgaggaacacgctaaccagctaaccagctacacacacacctctacacacacccctctaaggggaagctctgaggaagacgctaaccagctaaccagctacacacagccctctatacacacgcctctaaggggaagctctgaggaagacaccaaccagctaaccagctaacacacacccctctaagggaggatgtgagggagatgctaaccagctaacagacacccctctaagaagaacctgtggttgccacaacaaatctagcttggaagagaagagaaattggtgggttatgacaaatgcattggcaggcagacaagagacaatggaagaggcagaaagaaagggaaagtgaaaaaggggaggtccagggtgaggagccagcagagagggaaaggaccgcaggccaaggggagctggaggctgggtttggaaagatgaccagaggcgtgagcatcgggggagtgcagtgaggcctgagcactcatctatttcaacatatgaacacagtgcaatcagagcctgtttaaataatagcctatgttattttgcttgagttctccaagctcccaacttaccaagctcagtgagtagaacttcatattctcatgctgagatttgaaccagagaattactcagtaattcaagtcaggatattctataacccttttaatgcactgcctcttaaagattgccatggggaaggactacagttttaggtgaagtaggccctctgggaggcactgttgactttgtaggcaaggcaaagcagcgttgccaacttgagctgcaggggttccacgccacactgctttgtctttgtctgtaaccttcttggctcaagcattaataaacagcaaaggtatatattatgtatccaaagataatctctcaaactttgcaagatctatccttgatttaaatgcattgtttgaagcacttttgtacaatcgcagaaacttctgaattccgcaccctacaaatgtgtgcgtctgtcttcactgtctttattctgcagactataatcagggcctttcttttttatgatcttcagagcaggaaagccaagacaagtgtgaaattataagctcatctaacactattcttttaaattgaaatgatttagaaaagggcaacatgtatgaattttattctgattccctatttcatgcttaattccaatttttaaggagtagaataatgagtgtacattaaagagacaaatagactgtgcgtttcacaaatgtcacttcttgacctgataaatgtgagttgccatttaaaatgcactgaatagactttcatagtagattgatttcacattttattatacaaaacaagcatggacttatctaagagctacaagcctggttataagatcagtgccaggtatacccgcaatcctgccatggccttatgaagaaaaacacaaaaacaaactccccataagaaaatagacccttgagcagtggctgtttctcctgtatttcagactgtggctggacatagttaaaggccacgagcttggcaggccagtacagggtgagaatctggactcccttgcagcccacaggggctgccttggttcaacatgatagctactaaaatggattgctgaccctcccaggcagcagcccaccttgggttcatttcctgtctgacaatggtgccgatatggctggttccgctctcttgttacaaccacactcacaggtgactctgagtcatgattcccagttctcattgtatcatgtgcactggatggccacttcctcttcttccttctgtgccagggacacacgagtgtcctgagacaccagaggccgccccatcccaccccagggtctgtgagatgtgtagacccctcaggagccagagcaggcggcctccaagacacaggcgaggtccgcaggggcactgggtacatcagctctttagcatcacagcgcaaccctagggctcccgcagcccgttggtctccaggactgagatgagacgtggcaggccacacccccgcatctcagccctgacatcccggcgccccgtgctctgcttcctttttggatcctgtcgtcctggcaccccttgctctgttttctctttggaccctcctggccctgtcactcgctgatcatctgaccttggaaagctcaggtctgtaaaatagcttctccaagatttccaagatgtgaaatgtgcgacttaaaaaatgtgtatattattcattcattcactcagaaaatatacgttgagcacctgctaccttcagggaatgcctatgtgatgttgaggagtgcttaatgcaggctgggccctgagtcaggggcttcctgaacgtttttacatccaatcggcccagtgatttttcaagctaaattctatggctgtcctctgttcacagagacctctgaaggtccagagtgataagaaatacaacttaggtggaaatatcaacccagaggcagtacaatcagagagaagggagccatgaggacgcagggcctgagggcaggtcacagcgcagtcagcagccaaagaactgaagtccacctcttcttgcctgccctgtctgtagtcacttcatcattgctccacactgccttcctgtttcaaatgtatatcatcatccttaaacttaaataagtgtccaaccatccctaaagcctatcgtagctcccaggaagagtcctttgtccgaggagtcgtgtgaagaaatgaatgagttttccttcctcatatggatgggacggtgccactctgggcacaggaataacatccaacattcacatattgtccatagttcaaaaactcatagaagccttgagaagtaattgtcatacccatgctacagaggcacctacttgggccgagagaaattaatgaagtgggtagaagagcagacttcaagtccagtgccttttccaccatggaatgctgacttacaaagtaaagcccatagctggcagctgccccaggagaacctgcctatgcaggaagttggcacacttgagttcttgttgtgtttgtcacagtaactgcaggtgacccaagcctcccggctggagggcagagctgcttgttgcaatcaaaccccacctctccttttctgccttttcttcctgtggatgctgactgtcccctcttcaccaaacctacctgttatgcactcagccatctgcaccactgaatgcatcctttcttcactctttcatgaaggaattcagtaatcagcaagttacatcttcttgcctatttctcattgtgttctctgtcgcagggatatttgcaaaagaagcctttgcataattgtggaatgaaactttcctttattgttaagtggttttgcagtatcaatttttaggtattttgagttcagacagaacttgtgcatctctctgagaagaaccacaataatccgttgcttgttctgatgacttttaagatcaaaccaaaccagaatctaaagaacaaaacaaatgagcaaagactaaatataagactagaggagttatctgggaggagttatcgtggaaatccaattgttagagtccttaagttgtcattgttccatgctttttttatatatataaaaaattggtttttggctaggcaaggtgtcccacgcctgtaaatgcctatactttgggaggctgaggcgggtggattgctcgagctcaggagttcaagaccagcctgagcaacatggcaagacaccatctttacaaaaaatacaaaaattatctgggcatggtgttgcatgcctgtagtgccagctactcgggaggctgaggtgggaggattgcttgagcctgggaggtggaagttgcaggaagttacagtgagctgtgtttgtgccactgcactctagcctgggcaacaaagccagaccctatctcaaaaaaataaaaaattaaaaaaataaacaaaaccatttttgcctaacgagccttgaaaatcttaggcagtaacgcagtcaacctacaaatgtttgttaattagtaatagacagactgcaatcaacctacaaatctttgttaattagcaaatgacagacagacagacggaaaatgaatgggtgaatatgggtagggcagaataactagtatctcccttctgtcatcctacagtggggcttacttctctcatgctttaatattcagctgttaatatttttcccaatccagctcaatagtctgggaaccagtgaaataaaaagcaggaaatgaaagctgtgtttgcagttgaaaaggactggaaagggtaataacttggataatgttgattcctattttgaagtatttgcgaagcacctttgctatgccctgagtctgggggtgggggctgggtaagttccctgatggtcgtgtggtctgtctgcctgggccagtggtgtggcctgaacagccgtctcacagtagtgctccatggaacctgactcctgtccaggctcagggcacctcattttccaccatagaaatgtaaagacagaaagatcttggaggtatttgaacaggtgcttttttctccacctaagcttataaaaatatgcaaatagctgaggatcaaaggtaagactgggaaaatggcttggagtggaatctttcagcgtggtgtgcagcccgcttgagacagagcccccggcaacatcagtgctgtcagctttggtgccggtggagcccgctgacagcccagatgctgctgctagaagtggattttccacagcgtggcgtctgggtagggagcgggctgacactgtcacatgtcaccttgcaggcatgcagcttgccagtggcgatggcagagctcagggagttggccagggctaccatcctaactcagcaagacccataatagtcaccgaacaagaattctgtgttctaagtacattggcgattcataatcctgaattgagctggtcaataaactcacagggaacaggcgtcacatattacttagcatacatcctaatgaattactttcagaaattcgagcttgaagttgcatcccagcaaaaggaaactgtaccttggaagtgctaaggaaacagacgctgcagctgagggatgagttcaccgagcactttgtaggttgttttctcccacaggctgaacccagcagctgcctgccttttccttatcctttctataaatatgttgttctattataaaacaaattcaactggctgatgttttcctgttgagagatcactgttcaccgtataaaagggttgtcaaatgcatcttaaggctccctctactgacaagtcactggagaatctgaaatgtaatttacatgaaggaaaagaggaattgttttgaagtcaaatctatgttaggcgagtaaacagttaaaaataaaggtaaaggagatttcaagtaaaattctctgcttaataatgcaaggaatttaaaacaaatggtttttcaccggaaggatttataaataataaaattgtaaatgtggttttctgtttcggtggagaggacaaagacttgggaggcagatgcacactggttcagatggcagctccagccctcactagctgtgcagttttacacacaccatgggagcagctatgttgtgtgcctgcttgcgttggcataaggtttagagataatatatgcatatacatacatatacatagaattctgaacacagtgccttgcctatagtgggtgcacgctggagcccaggagttcaagaccagcctggccaacacagtgaggccccatctgtgcaaaaaactgaaaaaaaaagaaatctccacctgtgttcccagctactcaggaggctgaggtgggaggatcacttgaacccaggaggttgaggcttcagtgagccatgatcacaccactgcacttcagcctgcgcagcagagtgagactgtatccacacacaaaaaaaaaagaaagaaagaaatcctatgagactatctttataagtgttcaagaatatgtggctagggatgctcattgtgctagccagctttgtaataataaaatcatggaaaccaccaaaatttcaaatgtaggagaaagaatgagtaaatatttatttttatatatagggatcctgtgcttttttaaaaaaagaatgaagcagatctagaaaagttaataaagatatcatttttgtatatgaagaactcatttcaaatgtatggaataatgtgattctatttgtatagagaagatagttatgttaaatatgtaattagatatgtaaaatgcctaatataaacataaacacatctctgtatatttatgtatgtatgtgtatacacagagtgatacatttgtaaaggcatagaaaatacctggctgagttctcaaccggctgtttgctgctgagaaatcggagccaggagctcagctggatacgttggaagacccccgtgtttcacttcatatccttctctactgcttgtgtttcttcttattaacttgcccttgtcctgtattttttaaaaagattgttaatatgtgctaatattgagcacaaatttattgtattggctgggcaaataatcaatacttccctgttaccttgaaaagaagcaacctaaataacatagtttttcataagttttcaggtgtttgggggaacatgaaatagtgtatttatagctcttctctgtaatattaaggttgaaacctttttatacctgctaagttatataaatggttctattttaatgttttatagacaaagtgggtttctagactgcaatttatattattagcttaaaatttttgcttttaatctttcaactcaagaatttatataaatactttttctataaaatcaaaaagattggcaaaaaaattctaaactttcttccagttctaaagttcaatttgtcttgctgatttcagcaaaaatcttaactatttaattagataacagtattaaaaaatgtttgcttttggataagacattcattcactacagtattcaaaatctaacacaatggtaagtaaccatgtggctagctaaattattattataatcctgttgcacaggtttttaatattatcacctttgccaatttgaaagtcatatgatggacttttgcatctttgtgctcttaaggtaattatgaagctaaatgactttatcagatattcaaacctgatacaaaatgtatattacagaatcacccccttgccctgtcttttatgtaggtaatgattatactgatgatagtgatgatgattatattatctgtaatccttgcatagagatatacatggtctgaacatcaacaaacttatattcaaccctaggcatttactagccgttatgagctacttgacattgggcaatttagttaatgtctgtgagtatctattttctcaactgcaagatggagttaatagtatctgcctttcagaatatctgaagaattgaacaagctaatatgtaaatcacagagcacaacttctgacaaatgctagaaggtcatgttaattccttttgaattatttttctggataatataaatcagggcaaaatattggttaaactacggctgtttttgataattcagtgaaaaaggcctttctaaaaagtacatgatgcaggggttttaacttcatgggtatcatcatgaacattaattcgcctagctctaaaacaatggtagtgaacatatttgaaccactatccccaaaaagaaagagttttttgctaattcagataacaagaaaaggacagaagaccaggagcttcttaacagatagtgcggtcagctttccatgtgagtctgtgcccaggacaggagcagtgcagggctgggtgtgacgagctgggaagagatgaggtccttatgggttccacctggaagcctcatcctgggctccatcctgtggtccctcgatgcactcctcacagtcaaacacctttctggtttggcagctggtctaagggttttgagcttatgggaaacacacagaattccactgtggacggggaagcttgagatgccaattagatatctcagtcgagatgtcaagtgggtcattgaatctatgaggctgaggttcagaggtgagtctcagtctagaaatacgctttgggagtcatccatgtagagatgatatttaatcccatgggaccagatgatatcaacaaagaatgaacagacagaaaagtcaaggtctaaggtctgaggcctgcaacactctgtggtcagagccaaagggaaaaggggaaaagcaggccgggacagcgcatccccagggtggaagggatccaggagagtggtgtcctggaaatcagaagcacacatttcaaggagaaatgaaggatctgctgagttgagttctgctcacaggaaaagtaagaattccctattgttcaaaagtcatcattctaaagcaaagcatagtctaaataagagaataagggtattgctggcatacttgttaatatggaagggagacacattagaaagagcttatctacttagtgctatctggacagaagcccagggttgaagaaggaccatgaagtccaccctggcctagaaatgctgttgggaaagtcattccagaaaatgagacccaattacaggcagatggtgggagaggaggcaccgcagctgaggaacactgagtgttgctctgggctgggtctcagggcaggtccgagaacgcagcagcagatgagcctggatgagttgatagaggtcatgtggtcggaggtttggaagcccaaccttggaggctgcactttgccctgccactgagttggagaggtcacaggcagaatggtctgggtgtgtgctggctttgggagaacagacagatggcaggtgaaacatgccaaagagagaaggagaaaagcagcctgggacagcacatccccagggtggacgggatccaggagagcggtgtccacggccatgactctggatgttctgaaactcataagacaaacacttcaatgaaggtggattttatggtgtgagaattatattccatccatctaattttatattaacctgttttattatagaacaaatatgcttcattcctcctcaattatgatgttggaaggcacaggctgatacgatgttgaaaagcccccgctatgttcctagttttcacaagtgatcagcaaacaccctggcaggccgcacaactaggactcaatgttgctgtgaagagttttggggtgcagcaagcctgaacagtgggttctggcctttgctttctggctcttcctgcattgccgcctctagatactggctcatggatgcatctataagaaagaaaaggtgccagaaaggcaaagttgttcatccccacccctctggtggtgccatgacttaacatggtgcttaggagttagcgtctggagccaaggcagcctgcatccatgtccccattccaccctcactctctgacctggggcaagcttcttatactcgtggcagttttctcatctgtaaagtgcagctaggaaagttcctacttcatagcagaatggggcaacacggaagggacctttgtttgattgtcactcagccctcctcagattgctattgtggggtattttccccttaagtttctccatgatatttttttttacatttgtatacctagctacccactctaattaagcagttgtaccagattctacttcacctgcccccacccccgccccggctcatggaggagcaggaggaggcaagcaggggtggggagttgcctgctggagaggctggtgtgggacagcccaggagagaccacggtgtagtaaatctgtgctggaattatggaacatgaactgaggaaagtaaaggtcgagtcaatgagaccagcctcacggtttttagaccactcccaaccagcaatgtccatgtcccagactggggtcacctgggtggaatttagcccgagacgagactggagagtggacggggaggtggtttgcaactggggtgtacgtaggtaggtgctgccttgggagctttcaaaagctgaagatgtcccatccccattcctgccaatgacctgggcactgaaggggacagcgggaggccaactacaaccccctgccctggttggtaacccctgaatttgcagtgttgcagagactggaagaggcctggggttggttagttgaggggagtgaggagaggattaaggcaggaacagagtgctgtgtgttggggctgtggccactcacagctggggcagatctgatttgaggcaaggagactgagaaaaaaaaaaaacctttaaacagtgtccaaagggtgccatctctaaaggtggatgtcttagacaggactggtcacacaatgtgtgggacccagtacaaaataaaaacccacggcctgtttttcaagcatattaaagtttccaagacggtgacagaacctcaaacccagcgtggagcccagcaaacaagcatgaggctcaaacccagcgtatgactgcccagcacacaagcataaggctagccctggttaagacctttctcaaggatttgaaacatttattttcctttttttttttttcttttgagacggagtcttgctctgttgcccaggctggagtgcagtggctcaatctcagctccctgcaagctccgcctcccgggttcatgtcattctcctgtctcagcttcccaagtagctgggactacaggtgcccgccaccacacctggctaattttttgtatttttagtagagaaagggtttcaccttgttagccaggatggtctcaatctcttgacctcgtgatccgcccgtcttgacctcccaaagtgttgagattacaggcttcagccaccgtgcccagcctgaaacatttattttcttaatgggaaaaatagttatggcatggggtgcgatgaggctgaacctaatctaattccttttcttctcactggcaaacgtttgcaattagaaagagcagcatggctgtcacctcgccagctctccggtctttttggggatgttagttttgagggacactgagcccatggaccttcttcctttgctgtctgctggaaggtctcgccacgcctcctttctgggtgccatctgttgctgtcacaccctgctattttaaatgagggagtgcacaatgggctctcagatgggcaaggaggggccaactcgtcacagaattcttccctataagaaaggcagaagatcctgttcacatacaaattgaccaaaggctcactggaagtggggttatgccctcagacaggcttgtcctccttagataactccccaccaattcattattttgtctttcagatgcttagatgagccttgcatttagatggacaccttaaagttacctcacacaacatacacactccacctgtcaactcagtcaaagcaacacaaagggcccaccgacctcagcagcagtttgaatttgcgtttccttcatctcccttcgctgacccacctggaggaggcttggtggtggagtgcctccagctgaggtccattttcacaggaaagcctcctgtgtttgcatagcttttgcttaaaacttcttagttacttttagaagaaaaagtttaaaacattccaaaatgaaaatggaaacataaaatatgctgggtagatatttttcctgtctgaatgctaatgatgaaatagacttgggcattcaacttctagttatctttttgaatccaatcttgtaaagacaaaaattggcctataaagtcttgtaaaaaaatatgagggcaaatggtcaaatatatggagaaaattattcaaaaattaaatttccctgcaatgtgacaaatcagctattttcggaagtgcctaataccacgtcagtacagaaccaatcaagaattacattttagctttaaaacaacaaaatgttggacagtttttataaaaaagaaagattaagaagtctataaatctgacttcatttttgaccagttcaattctagaataaatcaatgcacttcagttactttttcaaatactctttaatagagaagcttcatctatgatgagcctagcaaagatactctctctttagtgtgaaaaaatattaagggacaaactagttggtcttgttcaatttttttatattctaatattttcatacatttttatatttgtcttgtcttgattcagaaaggagttaaccaggtctgatttgattttcagacatgactcacatttcgaggcaggatgtctgtggtcaacagtctagctcagttgtcattcaaggctcgaatctcagctctgcagttcacttgctgttagaagctgagtaggaggcagtgcctaggaagttcattgcttagtatgtggggcttagaaggacattcaaacagtgcttgttattatatgtatttgtggcatcattcagaagatagtaagaatgtcgattcttggagttaatgaaaattattctaagttttgggtttcattatggtagctactgatgcatattttataataattttcaatatcattttaaggaggtagttgtaagagtttattttttatttgatgttttactttttcttgccacttcatcacattaatactttgttatgacaaacttgtatttttattttaaaatacaagtagatatcctacagtttaggattccttctcctcaagaaggcaagagaatattttaaagttttgagtctgtgtgtagtctagtctggagtccatcttacatcttagccctctttaggattgtgataatatggccaaaaaaggaaccaggcaacatcataatttttatttacaaacatatatttaaaaacacttaactcctatatatgttcaaaatcattcacaatttaattaaaatataaaataccaaaaaaaaattttttttttttgagacaaagtctcactctgtcacccatgctggagtgcagtggcacaatcttgtctcactgcaacctctgcctccctcccaggttcaagtgattctcctgcctcagcctcccaagtagctgggatcacgggtgccctccaccacacctggctaattgtatttttagtagagacagggtttctccatgttggccaggctggtctccaactcctgacctcaggtgatccacccacctcagccttccagagtgtgggattacagacaggcctgagccacatgcccagccccaaaatatttctaaaaggatattgaactccttttcactgagtttcaatcctttaaaatatatattatatttttcagagctctaacatccaatagtccttgaagtacaaaagaaaaaatagttctacctatgaaagtgtagaaaaatggatttaccaattaactgccatcaagtgagagaagacaacccatggtgtttacctagctgacagaggcaggtgtgagcctgagtgatgccagccaccactgtcccattgtcctggcctttctgtgggaaaacaggaaggcggcttcagcagaaagtgctgcgaagcttcacagaggggctagtgactggacctaataatttgtctgtagatctctgctccttcgaaaattaaaagcttttctatctttaaaagttctcttccaaaatgcagttactctaaggttgttcatacttttaggttggtttgttgttttcatcagacaagaccttactgaagtttagagcaaaagagaacaggctagacaggctgcaacttggacttcaaaagcccagttcctgccacggggtaatggacctgagggagcctgggcggcgtctcccgctgtgcaaggaatcagcggtcattttctgttcccttcacccttctttctcttgctctctctcctattcagtaattctgttttgttttattttttcctacttggttacttttttttctcttaaattcagactacagtgtggccacccaaggattgctttgagatatcccagtccccaaactggggcctcagatgcattctgtgcccattgcaagctctgagcagacttcacctccaccaggaccagatttctgtttacctagcaaaggccagcagactcagactaataatccaagaggtgcacagactcaatccatgccagcggttcccagtccgccctccaagaggtgcccagactaaatctatgccagcggctcccagtctgccctcctcagggagcaagaaggctcagcccccaagttcttcaggaagcgttccaaagtaactctgtactcttaggatccaaacctttcaaagcccccatgaaaaacatcattattggaaagaagcacaatttaggagaagaaaagtgggtacagcaagaagcttaccaaaaacaagtattccaaggtgcacaagttttttccattgttgaccctgctaataggagttttatccagtcacttcttgtttttatcattattttcttctttaaactcacttctttttctttctctctctcttttaaaccatcaccataattgttcaaatcatcaccatcaataacgtacaattctgggtattggaagtgaggactaagccttgatttttttatcttgcccacattcctatctaaggggtctggggactcatgtcctacaaaccataaattctcatcagatggattttatttaaccatatatatatatatcgtgacttgctttccaaactgactctggcataacatgatgagacaaggaagaaaatcaaaatattttacccaaaacatgcttctttgccataccttgaaatggccctgcaaaggtgtcctttgtgggggaaaatgtgcccctgtaaagaatctctattaacataacaagatctttttcttccaggccctcccaatcctgaagaggttaagagtctagcacctttttaaaggtctgaataggaaacaatttgtcatctgttgtctctaagggcagccactatgagacttcaaaagaaccttagcctccacaatcttttatcttaacctgaacatttcccttctattgatcccaggtcttcagacaaactcagccacttgtcaatcagaaaatggttaaatttacctgtaccctggaaggacccccaccaaacccccttggagttgtcccgcctttctgaaccatatcaatgtttttcttaaatgtatttgattgatgtctcatgtcttcctaaaatgtataaaaccaagctgtgccccgaccaccttgggcacatgttctcaggaccctctgagggctgtgtcacgtgccatggtcactcatatttggctcagaataaatctcttcaaatatttcacagagttagactcttttcgtggacagaaatttcaccctttcctttccacttttccatcctcccctcttctccactcactgtgcaaatgcgcttttcccctgtcctgtgtcccttcttgactgacctggagtggtgttgttagctcaaaactctgcaagggaaagatggctgtgttagaaatgattattccttcgtgacataaagaaatagcacttgaacataaatttaatttcctcagcaaggccgtttttactttctgcagaaagggtacactcaccagcagttctgccataagagtacaccgaaaaaaggagacagggtcatttataacctgatgcatccacctcactactgtgtccagtttccattggctggaacaggacctcacattccgtatttgtcctgactggctagcaacttggaactttttaaaagaggcaaaggcagaggagaacaagggaaggaggaagtaacttgtggaatgctgagaaaggtaaaaacaccttcaaataaggaagaggaacaagctatgacctaatgcttgcttggaccagtataagcatgccagggcaaatatttaggctaaattgtgggagctaagaacataaaatacattgatctctttattacagctagcagatatttaagaatgttagtacacgtctttgaataaattttgcttctaagagaagttactatttattcctaattagatggggaggaaagtctttgaagaagaacctctactttttacagctggaggcagtgtctcaccttaacttatgcagaaagccaattctaaaccctctcagtctgcagttgtgagtctttttcccatatcctgggccctacactaagcggctgtaggattagccgttgactaaatggagcgcttctgctcagcacttctctatagcacccaaaaaacaaaaagatgcaaagaaacatggcaaaactgtaaaatcattttccactgtcctcaaactctccttctaccagccactcttagcaatgtgacggcgagacaacatcctcttgactcaaaattcctcccttccactaaagtagaaaacattcttattttagccaaacttagccatgccaatgtatccctcagctattcaaatctttatgcttcttatttcaaatgatggaatgaaaggctctgtcttttggtctcaaaagttatttggcatttcagagccagcagtgttggtaacatgaggaatgctgggaacccatcccacatgcccagtctctgccctcaccttagactcctgcttctttcacgtcttcgaaaggaaaagagggtagaatctggacaagaaatgagggtgtggctggcagtttcctctgcttcaccaaaccctctcatttatgctgttttaacagctctactgaatgacaattgacatgacataaatatatttaaagtatacaactctgtaagttgtgatgtgtgtagatccccatgcatcaccacagtcaagtggtaaacttcatgccaaggtttccccatgctcctttgtagcctctccctccagttcctctctgagctccatccccacacaaccatggaactgctttctctcactacagatgagtttgcatttttcaggatttggtatgaattgtgtggcatagtatgtagtttttcctgtattcttgcactcaacataggtattttgagattcacccatcttgctgtgtgtatcaatagtgcactcctttctattgtcaattagtattccactgcctgtatattacacaatttgtttatcaatcaactgttgatggatatttgtatcatttccaatttatggctttttcaaattaagttgctatgaaattttaatgtaaacgtttctgtatggacatatgctctcatttctttggggtaaatatctagcagtgaaatgacaagttcatagagcaggagtaagcttacttttataacaaactgccaaactttctccaaagtctaccattttacattcccacctgcagtatatgagctctcttattcctccaacttcttcaccaagactttatgtggttggtctttttattattagcattctaacagttagtaggacatcgtgttgtggttttagttggcatttccctaatgtctactgatgctaagcatcttttcatgtgtttatttcctatccatacatcttcttcaataaaaggtctgttcagatcttttgctcattttaaaaaatgtggtgctgatcttgttatcattaagtttcgagagctctttttgtattctagattcaagctctttatgtgatttacaaatcagaaatggatgttggatagtgttaaatgatttttcagagtctattaatgtggattttctttctttctttcttttctttttccttctttctttttttttttttgttgttgttgttgttgttgttgttgttgttgttgttgagatggagttttgttctgtcccccaggctggagtgcaatggtgtgatctcagctcactcccaagttcaagcaattctcctgccttcagcctctcaagtagctgggattatgggtggctgccagcatgcctggctaatttttgtatttttagtagagatggggtttcaccatgttggccaggctggccttcaatttctgacctcaagtgatctgtctgcctctgcctcccaaagtgctgggattacaggcatgagccaccgtgcctggctggattttctttctttttaatttatttgtcacaagttacattggttgactttcaaattctaaattaaccttgattaagctccactgggtcatgatgcactgtacttcttatacgctgttggattcactgttaaaattttgtttagaattttttcatctatgttcattatggatatttgtctgtgactttcttatcttgtggtatctttgatttagttatctgagaaatggtggcaccatagaatgagttgacaagtatttctttcttttaaattttctgaaagaatttgtattattcatttattgaatgtttgatgcaattcatacctgaagtatcgagacctgaagttttgtttgtggaaaagttgttaactacaatttgcatttctttggtagatagaagcctttccaagatacctatttcttattgagtgagcttggtactttgtgtctttcaaatcaaatttttctatttcccctaagttattgaatttattcattaaagtggctcataatttttgttcattatctttttagtaagtgtaggctcactattgacattttctctcttactcctgacattggtaattgtgttctctctctctctctctctttctctctcctgaccagcctgaccagggatttcccactctgattgaccttcttaaagaacaaacatatgactttgttgatttttctctattgttttctgttttttatttcacagatttttgtgctgatctttataatttattttcttctatttactttgggtttaatttgcttttctctttctagttgcttaaggcggaagctgaagtcattgatacttgttcttttctgatatacgcatttaatgttgcaaattaaatgcccagaacaatgcttcaccaacctcccgcaaattgatacctggtggaacttctttttcattttcatccagttgaaaatactttcaaatttctcttcatattcctcctttgacccatgggttatttagaaatgtgttatttaatttccaaatatttgggggtaattttctaaaaactttcattattatcttcttatctaactccactgtggtcgaaacatgtacttgtatgagttaaatccttttaaatttattgagacttgtgttacaccccagaagataatctaccttggtgtattaggctgttcttgcattctataaagaaatacctgagactgggtaatttataaagaaaagaggtttaattggctcacagttctgcaggctgtacaggaatcatggcaccagcatctgcttctggggaggtctcaggaagcttaaatgataggaggtggaacgtggaactgagagagagagagagagagagacagacagacagacacaaaagagagagagaaagaggagagaaggttgggggagagggtgccacacatttttaaatgaccagatctcaggagaattcactaacatgaagacagtaccgtgccatgagggatccacccctatgacccgaacaccttccaccaggttccacctccaacactggggaatgcaattcaacatgagatttggggagggaccacctccaacactgggggatgcaattcaacgtgagatttgggcagggacaaatatccaaactatatcacttggtaaatgttcactgtggacttgaaaataatatgaattatcttgttgttggaggcagtgttttgtaaacatcagttaggtttagttggttgatagtgttcaaacctcttatatccttactgatttcctgtctacttgttctatcaattatcaggataggagggttaaaatctcttgactataattgtagatttgtctatttatccttgtagtgctttcagtttttgcttcatgtcctttaaactcagttattacatgcatatttaagattgtcattttcttttgattaatttattgttttaaatgaccttctttaccctggtagtatgctttgctttgaaagcttccttgtctgttattaacagagccactctagctttcttttgactagtgcaagcatgatgtatcttttttcatctttttatgtttaacctacttttgtctttaaatatgtgtttctgtaggcgatagagttagatcttacattgtatctaattcaacaacttctgcatttttattactgtgtttagataacttacatgtaatgtatgaatatagttaattctaagtcgaccatctttctatatttatcccatctgttctttatttcctttttcttgtttttgccttgctttagattatttgtctatgattctgttatttctttcataggtttattatgcataatgcttataattgctattatcttagtcatcgctttggatgtgtaaaatacatctttaattttttaccattaagttgtattataccacttcacatgtagtataagaatcttacaatgttgttcttccattttttccctcttagcatttgtgctattatcatacattttatttttatatatgttacaaatgacacactacattattatttttaaactattgcttaattttaaagagatttagctactaagaaaagtatatgatgcatttatccatacagttactacctctgatattctttgttaccgtgtgactatcccaattcggtcctatgttccttctgtgtggagacttcatttcatatttctgtaaggcccagtctgctggtgacacatattctttcagcttctctatatctgaagaagtctttgtcttacttcgcttttgaatgacatttttgtggacaaagaactttagggtaaggggatttcttttcctcttaagtactttaaagatggtgttctatctttctatttgcatttctttttctgatgatatgtgttatatttattatctttgatccttcacacctttttttccctattatctgcctttaagctttcctgtttgtcgctggtttcgagaaatttgattattttgagctgtatgtaattttctatgtgttcttgtgtttgggttttgttcattattttagatccgtgggtttgatgttttcattaaatctggagattgttctgccagcaacttcaaacatagatagatagatagatagatagatagatagatagatagatagataatttgtctcatgtttcttttttttttaggttattctgattacatgtatatgagaccactagaagttgtcccatgactcactgatattttgttcatttataattctttttttctctctgtttcatttagataatttcaattgttatgtcttcaaattcactcgtatttctttctgcaaggtctaatatgtcattaatcatgtacagtgcattttcatctcagatattagagctttcatttgttagaatttgatttaattttttaaaatatctcctgtcttcacttaactctttgaatatataaaatacaattataataattatttgtattgtccttataattctaacagtggtgtcagttctgcaatggttagattgattgatttttctcctcactgtggattttatttttctgcttcttttcatgcctggaaaattttaatgtaatcccagacattgtaaattttaccttctgggtgctggatatgtttgcatttctagaaatatttttgagctttcctcttggaagcagttaagttacttggaaatagtatgatatggtctagctttttacatttgctaggcagtagctgagtaatattcagcctattactaattattctctgctattaagttgaggccttctgagtgctctgctgaaggcactgtgaatataaggtttagcacctggctgacgagaacaggcttcatcccctgccctgggtcagcactgcacactcctcctgcaaggattttcaggtggtttttcggctggcctcaggcagtctcctcatagacttgtgctggtcaatattatgttggatactgttgggggaccctctgtgcacccccaggattatctctctgcagctcccttctctgcagtgctctgtcctgaagcctctagctatattggtctccctggacactaagctctgtctcctcaactcactgagttcactggctctccctgggtttcccctcctggcaacacattccagaaactcaaggcaataaaccaggacaagcattttgttttctatctctcagggatcactctccattatcttgtgtctggtgtcttgaaacaattgttttgtatttgtccgtttgcatttttgcttggttggttgttctggtgagaagctaagtttagtagctgtccctgcatcctggtgggatgcagaagtcctattttcgttagttcctctgtttcagttcttccatcccaaagtctctggttgatgagaataaagtccactctgtgcctctcccctctacttatttgccttcttcctctcttcccctcatgaaagacagatggccagcttgctgtggccctcagagaagatggacactggggaccaggccttgggcacagggcactccgttgctgtgtcaaggttgagaattgagctaggtggaatgacaaacttgggagaataaagtaacaccagttctttggtggcctaattcaagatatttgttttaaaatgtgttgttctgtgcatgacaatgactacaaccatgagaacaaactacacgatactagagaaatgttaacaattaaggctaatgatagatgatggggaagtaaaaagtgaggaggaaacagataaacatctaatttagtcatgaaacaatattactaattagtactaatcccgtctatacaacttaaataccatttatacttactatacagcagagcatttatgggaattaaaatcaaaatgtgtttgtatgtgtactaaattaacaaaaatatgtattattagagtaataaattatgaatattgtgttacatatataacatttgttgttataaaatagtatgtatttgttaatttagttattcatgctttttattaacaaatttaaaagcactgggatttacaaattatgtctgagcctcagctaggcaccacccaatcttcctaaaatttcgcctgctcctttattatcgggtaactcatcctgggggagtttgaatatcgatgtgggactctaagatattggtgttcaaagttaaatgcccatatttcaggggattcaaaggtatcaggttataagaaaaatacaaatctatttgtattaaagttaataaatgtgttgtttccaagtataaagcttatatacgcatatagacaccgccattttcccagcatcagtcatgtgtctagatggggacttgcagaccatggacagtctgaaatgcagaggcttgacattggaaccctgactcttccactggcatttggcattctgctctgtattgcagtttatgagggcctcagtgaatagatttatgagagttatattataatattttataatactttgtaatgaaatgggatgactgtgaaaatcatttgtaccacaaagagttctgcttgttataatgttctagaagcattgtcagttttttttttgtttggttttttttttttttttttgacatggagtctctctctgtccccaggctggagtgcaatggtgcgattttggctcactgcaacctctgccttctgggttcaagcgattctcctgcctcagcctcctgagtagctgggactagaggcgcccgccaccacgcccagctaatttttgtatttttagtagagacaggtttcaccatgttggctaggctgttctcgaactcctgacctcatgatctgcccgcctcggcctcctaaagtgcagggattacaggcatgagccactgcacctggccagagttgtcagtcttaaagatgagttatttttctcttgtaataaagacatgtgcttcaaatttgctattagtggatgacagtggctaaaggagtactaacagaatttttttaaaaaaaacgatacatgaagatcatgcttcaaagcaaaattaatgttaaaacaattagtaagaaagaattactttaaaaagaaccttgtcctatggaaagaacattttgaaaatggatgtttaaaaacgtggtcattgttatgtgattttcaaaattttggctataagggatgtttaaactcttaaaaactttcagatttaaaaactttcaaatttctaatcaaacatgcataagcaattatacctatttgcagatgatatgattttatatttggaaaaatctaaagacttcaccaaaaaactattagaactgataaattcagtaaaattgtgggatacaaaatcaaaatacaaatcagtagcatttccatatgtcaacactgaacaatgtgaaaaagaaatcaaaagagcaatcctatttataatagccacacataaaattaaatacataggaagtaacttaaccaaagaagtaaaatatctttacaacaaaaactataaaacactgattttaaaaaaaattgaagaaacaaaaaaatggaaaggtattccatgttcatggattggaagaatcaatattgttaaaacgtccatactacccaaagaaatctacagatttaatgcaattcctatcaagataccaatggcatttttcacataaatagaaaaaatatcctaaaattaatatgtaaccacaaaagacctagaatagcctaaattttgtgaagcaaaaagaacaaaactggaggaatcacattacctgacttcagagtatactacagaactatacagaatcaaaacagcatggaactggcataaaaacagacacatggatgcatggaacagaataaagaatccagaagcaaatccttatacctacagtgaactcatttttgacaaaggagccaaggatagacactgggaaaagacagtctcttcaacaaatggtgctgggaaaactggacaaacttgacccttatctcttgctttatacaaaaatcaaattaaagtgaattaaaaacttaaatttaaacatctcaaactatgaaatagctacaagaaagcattggggaaatgctctaggatattggtctgggcaaagtttcttgagtaataccccataagcacaggcaaccaaagcagaaatcgacaaatgggatcatatcaagttaaaaaagcctctgcgcagcaaaggaaaaagtcaacctatctgacaagggatcaataatcagactatagaaggagatcagacaaatctatagaaaataatctaaaatgtcaattaaaaatggacaaaagatctgaatggacgtctctcaaaagaagaagacacacaaatggcaagcaggattatgaaaatgtgttcaacatcactgaacatcagagaaatgcaaatcaaacctgcagggagatctcatcttaccccacttaaaatggcttatatccaaaaggaaggcaataacaaatgctggagagaatgtggagaaacagaagactattggtgggagtgtaaattagtacaaccactatggagaacaggttggagattcctcaaaaaactactaaacatagaactagcatatgatccagcaatctcacagctgagtatatacccaaaagaaaggaaatgagcatatcaaagagatatctgctctcccgtgttcactgaaggactattcacaagagccaacatttggaagcatcaatagtgtccatcaacagatgagtggattaaaaaaatgtggcatacatatgcatacatatattttttaattaaaaatttaaaaatatatgtatgcacacaatggagtactattctgccataaaaaagaatgagattctgtcttttacaagaacatggttagaactggaggttattatgttaagttaaacaagccaggcacgaaaagacaagcttcacatgttctcacatacttgtggaaactaaaagtcaaaacaattgaactcacggagatagagtagaaggatggttaccagaggctgggaagggtggtggggcagggggtaggggagttggaaggttaatggttacaaaaatagaaagaatgaataagacttagtatttgatagcacaacaaggggactatagtcaataataatttaactgcacacttaaaaatagctaaaagagtatgattggattttttttgtaacacaaaggataaatgcttgaggcgatggagaccccatgtaccatgctgtgattattatgcactgcatttctgtataaaaatgtctcatgtaatccataaatgtgtacacctactatgtgcccacaaaaattaaaaacacaaaatgttttaaaaagcataggcaattttaaaaactggcagaatgagtcatttcagtggctttgaatctatttggggtgtgtgtgtgtgtgtgtgtgtgtgtaaatgcctccctgtttaatttcaaaagcaacctatgacatttgaaaaatgatggaaagtgattagctaaattttgataaaaatttgggatagcccatagataataaagaaaaataagtatcatgatctagttatagtaaccaatgtataggtttactgtttttctattttaggtaaatgtgcctttctgaggtatcatttctactatgatagagcctaaaagcaagtatcaagataaattaaacttaaaaatagagattaaaattgctgtaacataaaatgtcaggcaaaaatttaaaaactaatgtcatatttaaagatatatctctcacttttaaaacattcttcatacctttcagaagaaaaaaggttatttataaattaaagttttttaaagtttttaattgttattgttgtgtatgattcagttattacagtatgtcagtatatgagaatacaagcctacatacatatatgcaaaggaggctcagtccctttttttactgaaggaatgcccaaactgtacctgcttggatggcactgcacctgcttgcacatgagggtgggactctgacaatttggatgtcctgccgaactgctggctgtgacaggtgctctgcctgcgttatgtcatgtagtggttgcaacaggtctacaaaccagacacgtttaccgccacatttcatggcgaactttttaaaaagtgacttttaaaacagagtatcacaagcctgagcccacattcactgggagtggataactcgaattcaatcaaacccagtgtccttttgcagcagggctcatgctctgtaaccctagttcttccccagtgaatgaatggtgggcttcccctgagacggctggagagacacttgcttggattgttgatacttccagtatctacaccctcaggttagtgcacctgagtcactgcagtgtacatggacaatgaaacttgttaaatcctaatgaacaggagggtttgccactgagtggggcatggagtggattgaacccaacctaccagagtggacaatagggggccccagtagaagggagttacagagagagacgtgcttcggggtgggcagggctggaatacaccgcacatcatgcccaggttcctggtgtaggtgcttcgatggcatcagtcctagggtttcttaatctgagttaataatcacccaaccatacatgagtgtgtttcaaggatttataatcctttagaagatttgtgtaaatgtgtgagtttctgcatttgtgtattttctggaagagagagcccacagcctgcatcagatcctgagagaatctgtgatgcaaaacttgtctcactgtagggcctctagaataattgtcaacagttagttatcagtttgatttttcagtgttccaggcttagtggtgaaccaaatagacagccttgccccattctgtcttccagaaggtacagcgtttgatgaattcaacttgtttagtgatgatgcacttaaaacagatgtcacgacattgttcttgacggtgtattgtactacgtaagctcaacacagggtgaggctggcctgggttcaggctgccaattcctcagggcgtttctggacgcttctgtcttttacaaaggacaatgatggggaaaggaagcataaaggcagcttctaatcagtgtgttgggtttcaagcaggaaagtgcgcattatatgtgtgttttatatgtgtagtgtagatatagaatatataatacaatcaatttttgttattcatagtaatcatgctttccaaagtggctctgtacacttaacaaattagaatgaataaatcctaaaccattgtacctgggggaaagagaaggttgggttcttgtgaacctctggccacaatattttcaacaactgatcaatacattatcttgttttatgtgtgtttctgtttaaagacaccttatgtaaaccatattgttgattcattaacactgaactcaccaccaacagcaccataactcattcctgaaggaagcttctctagcaggaatgctttctccatagggaatgaagtcttcccactggactcctacaatgcagccttcttgcatgtagggacactagatagcccttcagtaccgtgcttggcggctattttaaacagaagaagaaggacataaatgaaaaacgtggctctaaataggctatggaaaagacactggtctatagtaggagagtaagtaggcaaatgggcaactacagaatctgctaacaggaggatgaactgtggattcgctttgggggtttatggaggatgactttcacagtggcaatgtagcatctaacctaactggattttgtctgtattaaaggacagactaagaaatgctcctcttttctcttatgcatttccatgttttaatttcatttttgagattctgagttattccagagattgcatgaggtaatgaggaaagaaagatctgtaaggctcagttttacccccaacctagttgcttattgaccaggtggggagacagacataaccaaattcagtacaatatagaagtgtggacaaagtaacacccaagttttctttctaatatcatggacgttttatcaaaaggatttccaagtgggctggtttttaaaggataactaagacttcattaggtaaacagcaataaaagaaaaaggtgaatggtacaaatagatgttcaaagacatgaaagtatggtacagcttggccgggcacggtggctcgtgcctataatcccagcactttgggaggcagaggccagtggatcatctgagatcgggagttcgaaaccagcctggccaacaaggtgaaaccccatctctactaaaaaaaattagctgggcgtggtggtgtgcacctgtaatcccagttgcttaggaggctgaggcaggagaattgcttgaacctgggaggtggaggctgcagtgggccaaaatcatgccactgcactccagcctgggtgacaaagtgagaccctgtttcaaaaaaaaaaaagaaagaaaagaaaagaaaagaaattatgggacagcttagtgcataggaaaattgtgacgactttgatattgccataatgtaaaacgttatgtgagaacaaaggagctgatactggaaagattgttgagaaccacattgaaagggccttggttgaccacgtaaggattttggactttaacccatatgtgaagagaagggggatggaaacatcactagaaatgtaccctaggtggatatcaaccctgtagcattgctctaggtggatatcaaccctggtagcattgaggagagtggttacctagatgaaggcatttgcaagttctagacaccagaaaaatggctcttgacattgttcaagtgagactggcagcagtggagagagggagagacaatttagaaatagataaagcctaaagaaaagggcatgggaatctaggaatgagtatgattgagtttggatgttcccctgactacattatatgcattattacatttataattcagtcttccttttttgtttctttcaaatcaaaaacataaatgattgaatttagggaacattacttacatcctactagaatcaaaaggaccagtgggcattttaagaattgtttaaggttcacatagtaaaaaatgaataaaggaccatttaaaaacaagaaaaactattatataattactgttttctttttttgtatattatagtttttttaattttattattatactttacgttttagggtacatgtgcacaacgtgcaggtttgttacatatgtatacatgtaccatgttggtgtgctgcacccattaactcgtcatttagcattaggtatatctcctaatgctatccctcccccctccccccaccccaccccacaacaggcccctgtatgtgatgttccccttcctgtgtccatgtgttctcattgttcaattcccacctgtgagtgagaacatgcagtgtttggttttttgtccttgcgctagtttgctgagaatgatggtttccagcttcatccatgtccctacaaaggacatgaactcatcattttttatggctgcatagtattccatggtgtatatgtgccacattttcttaatccagtctatcattgttggacatttgggttgattccaagtcttagctattgtgaatagtgctgcaataaacatatgtgtgcatgtgtctttatagcagcatgatttataatcctttgggtatatacccagtaatgggatggctgggtcaaatggtatttctagttctagatccctgaggaatcgccacactgacttccacagtggttgaactagttgacagtcccaccaacagtgtaaaagtgttcctatttctccacatcctctccagcacctgttgtttccttactttttaatgattgccattctaactggtgggagatggtatctcattgtggttttgatttgcatttctctgatggccagtgatggtgagcattttttcatgtgttttttggctgcataaatgtcttcttttgagaagtgtctgttcatatccttcgcccactttttgatggggttgtttgtttttttcttgtaaatttgtttgagttcattgtagattctggatattagccctttgtcagatgagtaggttgcaaaaattttctcccattctgtaggttgcctgttcactctgatggtagtttcttttgctgtgcagaagctctttagtttaattagatcccatttgtcaattgtggcttttgttaccattgcttttggtgttttagacatgaagtccttgcccatgcctatgtcctgaatgatattgcctaggttttcttctagggtttttatggttttaggtctaacatgtaagtatttaatccatcttgaattaatttttgcataaggtgtaaggaagcgatccactttcagctttctacatatggctagccagttttcccagcaccatttattaaatagggaatgccttccccatttcttgtttttgttaggtttgtcaaagatcagatagttgtagatatgtgtcattatttctgagggctctgttctcttccattggtctatatctctgttttggtaccagtaccatgctgttttggtgactgtagccttgtagtatagtttgaagtcaggtagtgtgatgcctccagctttgttcttttggcttaggattgacttggcaatgtgggctcttttttggttccatgtgaactttaaagtagttttttccaattctgcaaagaaagtcattggtatcttgatggggatggcattgaatctataaattaccttgggcagtatggtcattttcacaatattgattcttcctatccatgagcatggaatgttcttccatttgtttgtgtcctcttttatttcattgagcagtggtttgtagttctccttgaagaggtccttcacatcccttctaagtttgattcctaggtattttattctctttgaagcaactgtgaatgggagttcactcatgatttggctctgtttgtctcttattgatgtagaggaatgcttgtgatttttgcacattgattttttatcctgagatttgctgaagttgcttatcagcttaaggagctgagacgatggggttttctaaatatgcagtaatgtcatctgcaaacacggacaatttgacttcctttttcctaattgaataccctttatttctttctcctgcctgattgccctggccagaacttccaacactatgttgaataggagtggtgagagagggcatccctgtcttgtgccagttttcaaagggaatgcttccagtttttgcccattcagttgatattggctgtgggtttgtcataaatagctcttattattttgagatacgtcccatcaatacctagtttattgagagtttttagcatgaactgctgttgaattttgtcaaaggccttttctgcatctattgagataatcatgtggtttttgtctttggttctgtttatatgatggattacatttgttgatttgtgtatgttgaaccagccttgcatcccagggatgaagcccacttgatcatagtggataagctttttgatgtgctgctggattcggtttgccagtattttattgaggatttttgcatcaatgttcatcaaggatattggtctaaaattctctttttttgttgtgtctctgccaggctttggtatcaggatgatgttggcctcataaaatgagttagggaggattccctctttttctattgattggaatagtttcagaaggaatggtaccagctcctccttgtacctctggtagaattcggctgtgaatccatctggtcctgaacattttttggttggtaagctattaattattgcctcaatttcagagcctgttattggtctattcagagattcaacttcttcctggtttagtcttgggagggtgtgtgtgttgatgaatttatccatttcttctaggttttctagtttatttgtgtacaggtgtttatagtattttctgatggtagtttgtatttctgtaggatcggtggtgatgtcccctttatcattttctattgcatctatttggttcttctctcttttcttctttattagtcttgctagtggtctatcaattttgttgatcttttcaaaaaaccagctcctggattcattgattttttgaaggtttttttgtgtctctatttccttcagtcctgctctgatcttagttatttcttgccttctgctagcttttgaatgtgtttgctcttgcttctctagttcttttaattgtgatgttagggtgtcaattttagatctttcctgctttctcttgtgggcatttagtgctataaatttccctctacacactgctttgaatgtgtcccagagattctggtatgttgtgtctttgttctcattggtttcaaagaacatctttatttctgcctttatttcgttatgtacccagtagtcattcaggagcaggttgttcagtttccatgtaattgagtggttttgagtgagtttcttaatcctgagttctatacttcatttatagtaatgcttatttttcttcattagctcccaataaaagtctgtatttcttgctgctcaagtaatgattaagtgtcgttaaatataaggcttggaaatattgtttagaaaagttttagtgttttgaaaacccagaagttaatatatcattgttagtaaactacagattagagagtttagctgaaaataccacttgaaaggttaaactttaaaacacttacgatttttttttttttttgaggcagagtctcactctgttgcccaggctggagtgcagtggtgcaatctcaactccctgcagcttccgcctcctgggttcaagtgattctcctgcctcagcctcctgagtagctgggattacaggtacctgccaccacgcccagctaatttgtgtattttcagtagagacagggtttcactgtgtttgccaggctggtctcaaactcttgacctcgtgatccgcctgccttggtctcccaaagtgatgagattacaagcatgagccaccgcacccggccaacacttatgatttttaaagaacctaaccattaatgacaaaaatagaaggttattgaacaattgataagatcattttcaaattggaacaactggctggaccatgaggagtgcagatttaagctaagtacattctggagcagttgtgtaagccaggtcaccaggtcctgaaaacagtctccagtaattgactttggacaccattgtcaaaatgcagctgatataactgcttagttcacatcccagttctgaacagacacacttttttgtctgtttcaatgttaggtcttttcagagttaggatttattttttccactcagtagttggcatggcaatgtattaggcctggtgtagaatgcaactctagttctctcacagtgagttagggcacttgtgcatcatacacaattcatcatatcttactgagtaaagattaatgtgctttgttaacttctccaaaagctcatttacttgaagtggatcatatacttgtaggaatctaatctgcatgtctcaggaaggaggctgagcaccatggcactcccaggcgcatttgcttaccatgctgggtgattttcccttatggctccagcgtgagagctcttcagcaacacaccggagccgaacagccatgagcgcaaccccctgggctttctcagccattgctggcattcgagaaactcccttttcagaagagtagaaaaatgtggccttggaaggctcagactttcctcctcaactctctctctctctctatgggtgtggtaggcagagtgctgtcacccatggcccatgtccaccttcctggaaccggtgaatatgtcatcttacaggacacagggattttgcagaggggattaagttcaggagagtaagatagaaaggttattctggatcagggacaggcccaagggcatcacagcagtcgtgtaggaggagacgtggtcatggagacagatgttcaggtgatgtgtggaaggggtcggaagccacagaatgccggtggcctccagaagcagaaaaacgcatggacacagaggttccttggagcctccacaaggaaggcagttcgctgacaccttgatttctttatttttgccctccaacctagtaattgtgtgccattttcaatcattaagctaatttgttgtaggaataacgttgcattaatttcctagtacaatggcaaatcatgacctcttgagcagcccccaccaagtacctaaatttatttgtcatgaaacctgcaaatcatggacctctcgagcagcctacaccaaaaattcacttgtcacgaaacctgcctcagcttcctatagtgccacggtgggaagcatgtgacgtatttatagacatgcattttgtaaaccgtaaggcccagcgtgtgtatgagggcacagcctaacgaggcttacctggaggaaggaatggcactgcacgctgcttccttggctcaatctgagtgctgtgtgttcaaatcctggatgaaatgttggagcactctgagctgcattttattttcagaagttcctccccagaggtgtccgtgctgcctgcctccgtgaggggtactgtgtgtagtgggaagcaggtttgtgtgtctgcatgaggactgggcaggcaggtgacactgctgttgaacagtcccttggaggaaagaggaagaagtgcttcagagagaagaaggtagctgggccagagaattcagctccatcagtaagacccaaggtgaggaggagccaactctaaagacagaggagactaactgcagaacacacagccttataaagtcggtggcttctcacattaacactgtgtccctcactcaagtcctgtgagccatcaaatgcgaggacggggttctgccccacagctgtcctggtcctgagaccctcacccttttctcctgtggctcctccctctcccattgactcgggggaaggagagtgtgacgggggatcacgctataccccgcagatagtcatgggtatctgcatttcacgcagtctacaccatcccttatggcagggaaggccatcaaattgtggccggcaagaaggcagtgcccaagtgtgcagtctgtcccgcacaatttttttgtaagcatagtttttctgaaaacgttggttaactttagaaattggcatttcaaaagatctcctatcaaaaagaatgtttgtttttcaaagcaaaggatgaactttttatgaagaagcagtcccacactttactttgttattaaggacaatgtttgtaaagatctcattgtgatgttcttctcccacttctgaacctttccaaagcctactcatttttttaaaataatctaactaaaaagcctctgattctttgaagacaaaacttagtcctgtctctgaaattgacctttcactcctttggtctatggtgtttttattagttaatttttatttataattgacacgtggtaattgtacatgcttatggaatatggtgtgatgtttcaatgcatatatacacagtatcatgaaattggtctttcactcttttggtctatggtatttttattagttaattttaattttattttttttgagacagagtctcgctctgtcgcccaggctggagtgcagtgctcactgcaacctctgcctcctgggttcaagcgattctcctgcctcagcctcctgagtagctgggattacaggcacacaccacaacgcctggctaatttttgtattttttagtagagatggggtttcaccatgttggtcaagctgatctcaagctcctgaccttatgatccactcgcctaggcctcccaaagtgctgggattacaggcatgagccaccccgccctgcctaattttcatttctaattgacacgtggtaattgtacatgtttatggaatacagtgtgatgtgtcaatgcgtatatacatagtatcatgatggaattgaggaagttaccatgtccatcattttaaacttttaccatttatcttggtggtaataatattctaaatcttctcttctggctatcttgaaatacgcaataccttgttatttgctctggttatcctactgtgtaatagaataccagagctcggtcctcttgcctaactgtaacttggtactggttggccaaccactcctggggcccatacccctgccccttcctagtctctggtaaccactgttctattctttgctctctatgaaatcaactgttttagcctctatgtatgaatgaaatcatgcagtgtttgtctttctgtgtctggcttatttcacttaacattatgacctccaggttcatccatgttgccacaaataacagaatttccttctttttttattgctgggtagtgttccattgtgtacgtgtgtgtgtatatattatatatataatatatacacatattcattgtgtatgtgtgtgcatgtatatatatgtatgttatttatacctatacatattcattgtatgcatgtgtgtgtgcatgtgtatatatgtgtgtatgttatatacatctgtacacattcgttgtgtgtgtgtgcatgtgtatatatgtgtgtatgttaggtacatctctacacattcgttgtgtgcgtgtgtgtgtgcatgtgtgtatatatgtgtgtatatgttatatacatctctacacattcattgtgtgtgtgtgtgcatgtgtgtatatatgtgtgtgttatatacatctctacacattcgttgtgtgtgtgtgcatgtatgtatacatgtgtttatattatatacatctctacacattcgttgtatgcgtgtgtgtgtgcatgtgtgtatatacgtgtgtatatgttacatatatctgcaccttcgttgtgtgcatgtgtgtgtgcatgtatgtatgtatatatgggtgtatatgttatatacatctctacacattcgttgtatgcatgtgtgtgtgcatgtgtgtatatacacctgcagatagatagatataccatgtttttatgcgctcatctgtggttgggcacagtcaatagtattttattctgtcccttgggtaaggccttttccttttctgtcttgttttggagatacttctgcatatgtacataaattttaaaattataaatcaaggaaacccacctcatttattattatctcatagtagatgttccttaaacattgaataaataatgactgaaaggactgtggtaaatcactttcttttctgacctgtttcctctaaaacaaacaattcagactagatatctatttctcagccatatttgttcatcagaaattaccagaaacagttgtaataatacagttgcctgttccctaaccaacattcaaaaattcataatagccaatgatgggcctacacatcaatatttttaaaaatttataataattttccttaacattcgcactgtaatatatttcttctttttttatcttcaacctttttgtgtccttacatttcagatctgactcttgaaagcagcatttagttgggttcaatttttaatctggtgtgataatctttgactattgatggtcctgtgtactactttcacatctcaatgtaattattaatgggttgcattctccagtttactattttctaattttcctccttttttatgactttcttcttaatcttatttgcatttagtattttatattattcctttattctgtctataactttgatagtgatagattttttactaggttttattgactttctaaaatttaatatcaagggtagttttaccattttacaaaaacacaatgaaattaccaatgctttaactccaactacttccccctatttgtgtgttactgtaggtgaggttttataaatattaaatatgttatatgttatataatataaaccacatattataatgtgatatatggatatatatattgaatgtaatttttattataaatacactaaattataagatattattgttattttatacagtcaatgattatttcattttacccacatacttacagtatttgttgttcatgtctacatgtatctctggattacaagcagataattttacttctgactaaataattttttagcatttcacttaatgcagatctgctgattacaagtgcttctatttttaatgtatctaaaatcctttaccttcatttttaaggatttttttttcacccacataggcaatcactttatttaagcatttttagtatagaatcccattgtcatctgaataccatcattttttgctgagaaatgagctgtcagtaactgctggcatttaaaaaattttttcctgatatttgatttccagaagttttactatgatatgcccagatgtgatttgctttgtatttatccccccttgaaatttctattgcttgttgaacttgtaggctaatgcctttcatcatgtttgaaaaattcttacattttatctttttaaatactgcttttgctcctcttgcctctccttatgggactcctgttttgcatgtgatagggttttatactgtgtcttatatatatcttatattcttttatgtattttctaccattttatcactatatattaatattggtagtttctcctagcccattttccagttcactaattctctctttggcctgtcatattctgttgttaatctcatcaactgagatcctaacttcaattattatagtttttaattctaaaatttccacttggtttttaagataagttttatttatctcttgaaatttaacttcttgttaaatgtgttagcattttcatcataatgagtttaaatttctgtgagtctcaatgtatttgtttctattggttgttattttctcctgaggtttggtcaaatctatcatgtcatactccttgtttcattttgcttgaatttcagacattgtagatgaaagattgtagccttactctcagcctctgtattatattatcttcttacagaaaagatttgctgcttctaggcatctaaatcacagaaaaacacctcaatccaatcatgaattgatgattcaaagccatggtttattacctgtgagagctgagctattttcagtttatccttcttcctagcatgtaatcctatgggatcccaactggaagcctatggtgtttaccaaggagcttccctctcaggaggccatgaatcttaagcttatgccccgcatgatgcaattttgacaaaccttctgttcagatattcagatcatcatgaaactctttggtatcaataaatgctgtaagcaggaaagatgtgctacacctaggtcttactctctggatttctctctgcatgcaatgttgactgtgcacatcatgactgattcccactgccttcaaatgggttgtgtagagtcttacatttctaattattatcagcagggggattattctgaaacaagattgtttgtctttgcaaaagcagagccacttctttctctaatccacaagtgactacatcaggtagttaagtttgaagatcattcactggagtagatgttgtctaagactctttatagcatttatccttagcattccatattagcaaagtgacaataataacttcatttgacagtatacatttatccaatttttaagctatcaacttggttcttggcttaaagttggtctttagagttgttcttaaagttgttcttgaaggttcttggctttagagttgttggtgcagggttaatgaaaggatctgatgaggggggaaggtctcacagccagctgggaaacttcttgagcagccagacaagtgtcagtttcctggagtgacagacactctactgcttctgaaaaaaggagcaggacaagtctccccactggcctctcaaagtgggcatgtacacacagcccaaagcttccaaacggcagcaaggtggtcccagcagaggaatgtcgcacctttctccccatcctgtatgtaacacttctaaaggaatatagctatacattttatatctcaatatcatacaaaagctcttggtattaacaagtttctgtcgtgttctaaagggagataaaatatgaataactacaggccaggtgcagtggctcactcttataatcccagcattttgggaggttgcttgagcccaggagctcaagaccagcctgggcaacatagcaagacctcatctttacaaataacttaaaacttggtcagaaaaaggggcttgtgcctgtggtcccagctacttaggaggctaaggtgggaagatcacttgagccccaggagtcaaggctgcagcgagccatgaccacaccactgcacttcagcctgggggacagagtgagaacccatctcaaaaatatatatatatatgaataatagctataaaataaccatcaggtgaataatcttacagatcattgaggaaacattaataaataaaatatcaaaaaaatttaaatcactataatgatttagagaacaaaaacataatttttattaaaaataattttatatacagatgttgttcaagtattttattttaaatcctaactacaaaatgaagccttggactgtttcatattcaagaaatttctccagctctaaaataatacagaaggagctgattcacccctaggtgtctaaaacgtccctcataaaacccagcgttcactgtttcctgatccaagtagtaatctgctcagtcctgcctagctatccaaatctgatcaaaatcacagaactatgtaatgaggcagcagacgactgctcagttattttcaattctcactcttttgtcttttcttagaatttgccagatataagtggcataccaaagatgagattatagattgtatggttgaagttccagacccaaaatggatcaataacatattccacagctttacagatgggactgtggagaacaaaccctacacatttgcctcatttactgaagccaaaaagcccaaatcctggggagacaactgaccgtgtgcagccgcaggaggacattctgactccagggcacatgactttgctgtgttttcaagcacttaagcatttctgtgattcataactagcaaatctttttgacaaaagtgttgttttcattttcaaagtccagaaagacaacatgattttctaatccagacactgactttatatctggagtctccgggcatggtgtctcatgcctgtaatcctggcactttgggaggccaaggtgggtggatcacctgaggtcaggagattgagaccagcctggccaacatggtgaaaccccgtctctactaaaaatataaaaaatagccaggcgtggtggtgggcacctataatcccagctacttgggaggctgaggcaggagaatcactgaggcaggagaatcactgaggcaggaggcagaggttgcagtgagttgaaattgcgccactgcactccagtctgggtgacagagtgagactctgtcttaagaaaaaaaacaaaacctgaagagccagggagtatacattccttagtatggaactggtagttctgcctttgaaaagcagaatccccaacttgttagggttaacagacaggtcctcaagccttgactcgttggctagattcccaagccaactgcaccctcctcccctaaaggaggggccattctgtggtgaatcccagcctctgctcccatcaccgtcccccaattgcagtcctcccagccccagagggtagctcctccttcacaatgagggactgtggagacacttggatgaggctttgtgctctgctaggatcaattcaaatttgggtgagacagaaagaagagatgaacagccagacatttgagaagaaagaaaacagagccagccactgaatgacaattaagtatgtgacgatatccacccactgccaggaccaacagacgctctccgtattgtacgcactgggaagtttaagatattctgctgcatgttttcataatgagacttcttttcagagagggaagctagaaagcatcatcctatatgaaaaaaaaaaaaaaatgaaactaacatgaaacactgaataaaaggataaagaaaaaagaagcaaagctgtagctgcgcatttgagtcattatcctagaaactttacgtgttaccttactgtcccttacaactgctctgtaacgtgtggagggaggagtggaattctagatggtgttccgccagactgcactccgagtgcatcagcaccgcatgttttatctgaactatatttacagtgtataagatgattcaggtcagccttctatttcagaaattcacaatctatgggaaagttctggcaaagtacacaccagaactagatttaaagacaaatattccagctcccagcccaggatgtgccccaacacagagaggcctctagaaagagactgatttctgccaggttccagtaggactaattggctcttactttcctccagacaaggatgccgtctgcagtctgtcatctcatctgtatggataacgtagggtctgctacagagtacaactttgaaaaatatttaggaaaaaattaacaaactatgctggaggttgtgcagcaacgctgaattcataaaacctgggctaatctatgtcctgaagattcttcctctaggccatcttctgcttaaaaggatgagaaatggtaaatgggatttaggaaaaatttgagttggaaataaatcgattcccacacaggctgtatatttgcatctacatattcaaagggtcttgattctgctgtggtttactgacacgtagctggctttaatacatatttactgaagccctaccacctgcagacgtcctgacccaactgtccacatgcacaccagtcccaggctcatggcattagtgcactttcccagcatttcttcccctggggatgtgaaaggattctgcttcctgtaggatgctgaggtccctgctgtagagcagtgaggatgggcggcttcgggttggcaccctgtgtgtttactccgagtcagatttttaaaaatgcatcccagagtgctctcacatgttcttcataatggatatggttctgacattttccctgagtctctaatcctgatgaaaagcagatggtatttacttgcaaaactccaatctgacctgccagtgttatcctctcctgcgacctggctctttgccattggccctaagagggatcctagcaggcacagccttctcagactcaaccattcccatccctccttcatcctgtgctgggaagggagccattccatccatgcctaggggtggcttctggaagttccctctgcctgacacataaccagtgcaccctgccgtcttcaagcaagacctcacttaaaacaacctggacagccaggcgcggtggcccacgcctgtaatcccagcactttgggaggttgaggcgggaggatcacctgaggttgggagtttgagacctgcctgaccaacatggagaaaccctgtctctactaaaaatacaaaattacctgggtgtggtggtgcatgcctgtaatcccacctacttgggaggctgaggcaggagaatcacttgaacctgggaggtggaggttgtggtgagccaagattgtgccactgcactccagcctgggaaacaagagtgaaactctgtcttaaaaacaccaccctggacacataagaacctgccatacgcttgatcatggcagaagagtcagaacatttattacaatcacctattctgagtatgaacaggttatctcattcattcatccattcacttatttatgagatgtttaaaaagtgccccatgcagtagacactgtggtgatactgaaggaatccaggacacaagtactttcttctgtgagctttcttcttcttttttttttttttttttttttaacaggtcttgctctgtggcccagcaggctggagctcagaaatattaacatctgcctgagacagatccccaggaagtctaaaggctgggaaaaaaaaaataggcatacagacagtttggtttccttctcattacaccatctggtgtgatctcggctccctgcaacctcgacctcccaggctcaagtgatcctcctgcctcagcctcccgagtagctgggactacaggcgtgtgccactgcctggctaatttctgtattttttgtagagacagggtttcaccatgttaccctggctggtctcaaatccctgagctcaagtgatctgcctgcctcatcctcccagagtgctgggactacaggcatgagccactgtgcccgtccttcttccaataagaggaaaagtaaataaataattaagaaaatattaaaaatcagggccctaaacatgggaaaacagcagggccaatacagaaagcgaaggatgagccctatgggagagaggagaaacactgaggtgttacctgggcttcctctcagaaaaaccagctgtgcagtggccctgaggaagggagagctcggtgtgtgcacacaaagaaggaactgtgtggtcccgagaaggcgcttctccccgtgcgtcctgagaacgctccttctccccgtgcggtcctgagaacgagcttctccccgtgcggtcctgagaacgctgcttctccccgtgccgtcctgagaaccctgcttctccccgtgcggtcctgagaacgagcttctccccgtgcggtcctgagaatgcgcttctcaccgtgaggtcctgagaacgctgcttctcaccaggttcagttacaagggctcttcataggcttaatagtctgaagccctcgcagagattttgttcatgaaagttatagctaccacattaacaattaaaactaagatattttaaaacattatttgctttttagttattaaaaatatttttaaaacccagtacctgttaatataagtgattatatatttatgaaaaataatattttccataaaaaagacatttattgaaagagcgtcattgtttcacatttagcaaatgtctttcatgcgtgtcttaatagagcagctgaattctcatctgcctctgcacttaacatattgcataagttgttttggctgaagcatttgaagataatccaaccccacagatgatgtagttgcatgagggaagacccccgaaaggccatgaaagggtggagggcacccccacaggctcacgaaccccattttgggaactgctccaggagaacattgtgagcaacacaggagtcaggagggatgaggaggagccgcctcttacgctgcggtggcggcatggccaggagttcaggttttggaagccccaaacgcaatcagaagctcttatatagtatgatgcaatttcatttttagaacgatggtcctgctgctgtgtggagaatgcactggaggggaagcaatggattggagaggctggttaggaggctatgttcttggctacgctggggaggaaggcggcagcagctcaaattaatttcctctccctgtagtctcgcagagtaaacacgctcacttgaagcatgtgtgagaggagaagcttcccaggtcttcagcaaccatctatcctagggaaatcagactgtggcaggacaaagcttttgtattttaattttgccttggaagtggatttcaaaactcacatcactcaaaactctgacccacctgcatttggccagcttgtcagcaagatgacagcttcttctctctgattttcttaaactcctaccacttcccataagcaataagcttggaaaacatgagcatctgcccgagacagatccccaggaagtctaaagcctgggcaaaaaagggagaggaagggaatacacagaacattggatttcctattagggctgcaccctggctttcattatgccgtctgtctgactcttaatagacctagcccaggcacacagatcaggacttattttctaggccattttaaatagattaggaaatgtaaaggtcccttaaatgacataatttggcattaagcactgcacacgcttgtgcacggctcctatcggcgtgagcgtgtgcctgctggtaagttcgtgcatccatcaaagctcagcttgggggattggcagtgtgtgttcccccagcttgaaaggagatgcacctcttaattccacatccaggtgcatagcaccccaccaaatagcagaatcgtttttagaattctaaacaaaacagttccgaattcatgttgttttgggtttgtcaatattaccattaactttcggtaatactgagtaatatgcctttttgtgttaggttcatacacaaatataggtgttttgccatgggaaggaagtgtatgtgtgtgtgcatgcatttgtgtgtgtaatttttagtagtaaatgaaccatttatttttactgtagaggctttattcaaagatgttagagcttgccattaagtgttattatgccaatctctaaaaaatattttgcactgaacatttgttattttaaggtagacagaggcaaatatgcatatatatttaatataagagaatataaatgataaatgcatacatgtttattatatatatggagagagagggataatctgagaactttttttcagaatgttcttaaattgcttaaaaagaattggggataagaacaaagaatgtactcataggtgtattgagacttgtgggagcctttgggaaatgctgtgagcagagaataacagcttcaagaacttatccagtaagatatattggccaactaaacagcccaggctgaagtaggtatacctgtgttgaattcagccatgaatgcaatgggcctctggaaacgtatttttagccagcgtttaggtaccaggtccctccctcccttctaaaattattttttaattccctggagtgtgcccccttctgccactcatctgcttgtttggtgcctgttcctttccacgggggcgaggctggcttcctccctctgccgctcatcaatactgagctgatttggaactaagctgggtaataacatgcctttcagcagccagccccgcacgcgccgtgtaattaaggcctgatggttgtgttgacggcgaatgaaagaaaatggctttgttctccttccccgggcttgattgtgggttctcgctctcacctgaattcgacccactctgcattgtgcccgtgattgctggagtgccagtaattgctgtcctggcagatgacatttccatgaagcactttctgtgcagctccagagggaacggacagagctgatggctgggggaagctcatcaaaggcagatttaggaaaggcctcggtggaagagggagcccacgaccaaatataagagcatctcctctgacatttgcttgtctgtcactcactgtgcctgcaacctgcttaccctaggcctgcaatccataaagactggattgtgtgaggatgaattgctgtttaagttcattaaggccaagtttcgatcataccttttttagaaaaaaattctttattttgttttccaaaaggaggatcagagcaaatagaaataaatgaaaggaacttatcttcagaagatgatattgcacacagatctttttaaatcagtgccaataaagaccaaggtgaagattaggttacattataaattgatcttaaccttgctacagacactcatgttaatttataatgcaaagtttacaatattttcgaattggaatttaagagtttattcgttgtagaattttataacaatctgttaattatagatttttgattctgcgatgcttatgcaaaaattgggtcaagagttagtaagtgtaggcatccagaaaaacccaaggatccttatttactagagggagtggcgggacatgggatggttgacgggtctgcagaacgtgacttcttggggagacatggagactttacaaatgcctctcgcagaagctgcttccctccaatggtagtgatgggggcaaagctaaaaacgtaattccaggatgggtgcatgagattctccctattatctgttcatcgaggtccatatttcttttgcggtgagcacgctatcttggcttcaaaaaacgaaaaacattaacagtgcgggactacagttaaccagtaaggaccgcaggactcgggaaggcccggctgcgtccccctcacataatgaccgcggaactcggggaggcccggctacgtccccctcacgaaaggaacgcgggactcgggaaggcccggaaggcctggctgcgtccccctcacgtaaggaacgcgggactcgggaaggcccggaaggcctggctgcgtccccctcacgtaaggaacgcgggcgtctgggaggcccggctgcgtccccctcacggaaggaacgcgggactccggaaggcccggaaggcctggctgcgtccccctcacggaaggaacgcgggcgtctgggaggcccggctgcgtccgcctcacggaaggaacgcgggactcgggaaggcccggaaggcctggctgcgtccccctcaaggaaggaacgcggacgtctgggaggcccggctgcgtccgcctcacagaaggaacgcgggacttgggaaggcccggaaggcccggctgcgtccccctcacgtaaggaacgcgggcgtctgggaggcccggctgcgtccccctcacagaaggaacgcgggactcgggaaggcccggaaggcccggaaggcccggctgcgtccccctcacgtaaggaacgcgggcgtctgggaggcccggctgcgtccgcctcacgtaaggaacgcgggactcgggaaggcccggaaggcccggctgcgtccccctcacgtaaggaacgcgggcgtctgggaggcccggctgcgtccgcctcacagaaggaacgcgggactcgggaaggcccggaaggcctggctgcgtccccctcacggaaggaacgcgggactcgaggaggcccggctgcgtccgcctcacagaaggaacgcgggactcgggaaggcccggaaggcctggctgcgtccccctcacagaaggaacgcgggactcgaggaggcccggctgcgtccccctcacgtgtggaggccaatcaggtgaatatattagtttgcacgccacacaatttgtggtgagttactcatatttgaacagagctattaaaatacaaggaagtaacaaaaaccacacagtactgaatgactagttacattttaattaaatagcacaaatatgttatataagctttgtgtgttgaaagtgccctcattcccatttaccttcaatgtgtttgctattattattatttttaagtctaggccttttataaggaggcttgtatataagagtggaatgcttattaggtgcagaacagagagttattggatggatatggaagagttgctggctggtgactggaaggtttgcagcatgagggcattttctaaatgcaggagctgtgctgtctcagtggatcctctgacaagccttctaaagtagacgcaattactatttgcatttcagagatgacaaaagtaaaggccagagaggtggcgaagcttacccgaagcaatgcaactactcatggggtggagctttgcacagttgccagctaaagtgccgagctgcggcctctcttggcgggtccctttctgggtagctggaaacctcaagccaaccccaaccaccgatttaggcaggagtctctcctacaactgaagctgacggatgaggagaggcttatatcatcacaggaagagaacagagctttcctcccacagctggggaaatctgccggctctgctggagaggccgccagcccattggtgggcgtgcggtgcggggaggcttaggcgggaagaggaggtcttgctcagatgagtgttattcctttgtttggacagaggaggttgggcaaattggagtgtaggatatttttgcctggagatttttacttgatgaaatcatcccatgaaaaaaatccccaatttttaaaagcatgctactttgacacattaaactcatcattttaacattgatagaaagtatttaaaatgggcctttgcctgaaaataaacgtcagtggattggaagcactgagggccttcgtccgttctgtcccaacctttatgggcgctgcacattttcactgtggaatctacagggacgaactctgtcttgtgtttactttctacttgtttctcttgaacacacacatgcattaacactgtaatgtatttattactttgtatgtcattaataagaatatatttagataatattgaaacagtatgatttattagtgattccttctaggtagatatcagctgtgttttttagacgtttaaaattgtgaacagcctcagcatgacctacattattcaagccatctacctccttcccttcttttctttccctccctccctctctctgtttctctctccccttttttctttctttctttttctttttctctctttctgtctttctttctctctttctctttctccctccccctttctctctctctttctttctcttcttccctccctccctttcttccttccttccttttttcttccttcctctctctccttccttccttccttttttcttcctttgtctctctccttccttccttcctttttccttccctcctctccttccttccttccttttttcttcctttgtctctctccttccttccttttttcttccctcctctccttccttccttcctctccctccttccctccctcccttccttccttcttttagttatatctccaaagtattttttctagtatatagtttgcaagaaactacatgtgggattctgaattgtcatatgctgataacttttacagagagctgcaactatgaagaatatgtgctaaaatatggatctctacctcatcacactgagaacctcatcattaccttacagggccatcaagtacagcatgatttcaaacattcataatattactctcttgcaagctttgtgcactggaaggatgtttcttttatactgcttctagagtcatggaaacaaagcaagctttaggaaacaggatggcttggttccaggctccttctctcttcctaccgcctggccccaccctttctctcctcccctcccgtgggaacttattctccctgcacagaggtgagcagcctctctgtgaccaggcttcaccccagcagctctctcgtggtctacttcccccaggttcgttcctctctgtctcttcccctcctctctgttctaaaacagcaacctggctcttcactactctaggggaggccaggaggttcgctgggtcctgagggatacaattcaggctcccccaggacttaccatccaaacacacccttccctccaactgctccatgctttttgtgttactgttttctgtccaggagatctccctctgtgactcaccatccatagcctgatgacatgaccttctcaaagctcagctgctgctcctcggaaaacctccccacctctgtggcagagtccgctcacctctgcgtaaccctgagcactgtgggcatccctgttgcagccttccttacttagaggagaagcgatgacctccctccttctctcccctgcaactctgtcctgcctggaggcccaggctgtgcgagtctttatctactgtgatgtttatccatctcagtccctgccattgtgggccgcgctgggactgcactgctctttggtggtgtttggtaggaagccagcaattcccaaaccactgctccttccccaaaacccaaagggagacatccacaacaaacagtggccaaatgaaaaagagagcatgcctttctggttagctgcaaagcgcatgctgtgctttgaaaaaccgacgcaatgcctgcttctaagcctccagccctccctaaatcctccatccaaatccaggcaattgctactgtctggctttcttccttgtgaaatacagactgaaaatgagagagaaagagtgtggggggtacatgggtgtgagagagggacagagaatgaggatagatgctggccatactattgcaaacatcttccttgttccatgaaaaattaatatctttttaatcaatagtgactcaaaatatcagctagcccagaatcatttgcacttataaaggtaaattcttttaaaaaagtgttcaagtaactggatttccaatggaagggtttcagcgattggcatgggtactgttctaacaatctggaggacaggcccttcctaagccactgaaatcagatcctgcagagaggaggtcacctctccatggccacagttccaagacacagtgcggtcagagtggggcgtgctgtccgtggccacagttccaagacacagtgcggtcagagtggggcgtgctgtccgtggccatggttccaagacacagtgtagtcagagtggggcatgccattcatttttgctctgaaagcttgttacatatgggagttgggaggtgactgccagggtggacacttgtcaatgtccagcctggaaacctgggtccccatcccagctctgtgacctcaggcaagctacctttctgaacctcagtttctctctgaaaatagagctaataatatctcggttgcctattctcagggttgttctgaggatcaaatgaaataatgagcatggaagtgctggaacgtggaaagtcctttttctctcacttggaagcagttagttggaggatgtatttatgcagatgaatctcacttctcggcatgcaccctcctgtggttgctgtgtgaaggaaaaggctgcaggtttagagagcaggggagcacccccagtccttggcactgcatccgggaagacaaagcgcttccacgtggtcaactctgtcacagatgaagggccttaagtacactcatgcccctaccattaggattttctagttgaaatgtgtggctgtgctttaagttaaactcatagcacatttaaatcacactctgcatccacagcctctgacagacggtaatttctatatattttaagagcggggcttactgctagaattctgattttcttcccaaggactctctgaaaattgaggagagttcagctagcaatcagtaacatgatttcattcatgaagtttctgtgtgtcagagacaacagagagccaggtagactctcatgttttcagtctcacttcacagacacataggtacacacacaggtgcacgcacacgggtacacacaggtacagatacatgtgcacacacagatatacacaggtacacacacaggcacaaacacaggtacacggcacacatagatcataggtacagatacatgtgcacacacaggtacatactcaggcacagacacaggtacacaggcacacaggtacagatacatgttcacacacaggtacacaggtacatacacaagcacacacacaggtacggttacaggtgcacacacaggcacatgcaggtacagatacaggtgcacacacaggtacatacacaagcacacacaggtacacacacaggtacggttacaggtgcacacacaggcacatgcaggtacagatacaggtgcacacacaggtacatacacaagcacagaggtacacacacaggtacggatacaggtgcacacacaggcatacacaggtacagatataggtgcacacacaggtacacacaggtatggatacaggtgcacacacaggcacacacaggtacaaatacaggtacaggtacatgcacaagcacacacacaggcacacatgcaggcacacaggtacagatacaggtgcacatacaggtacatacaaaaacacacaggtgcacacacaggcatacacaggtacagatacaggtgcacacacagctacacacaggtacataagcacacacacaggtacacacataggcgcacacacaggtacacacacgggcccacacaggtacagatacaggtgcacacacaggtacacacacaggttcgcatacaccttcaggcacagtttccacacacccacatcgagttgtctctctgccacttgcactcactcctaaggtagcaccactgattcaaatgatcacttgctctctcgtcttctttcctgatacaggttgttgttttttttttttttaagagcttatgtttttccatttgattagtaattatttgagagtacatattatgtgctaaggactatgctaaacaaatgaagaattcaccaagtaataaacatcttctgtactctcaaggagccatgagttccttggggggcttggaaggagggtgaagtgaactctattatcattattgttattcaattcattcatttaatggattctctctcctctggcccctggtaatacaaaaatgaacaggtgcaatccccatcttcaagcaccctagtttctttgataacaacagtggcattagcagaagtgggcaaacagtggaatcactggctggctgtgtgaaacagtgtgtgaaggtatgaacggatcagcgagaggatgacctcattgatcattcagaggaacagcctcctcctgagggccagaatgatctaaaagtctttgagtagagaaatgatgggatttgatgtgaaggctggtaaatctttgagatgtgcataaagagaggcatggtgtgaaccaaagtgaggaagtatagtttatatttgaggaacatggagaggacaaagcagcttaaactaaaggtcacataaggtggtggtaagtcttaggaattgagaaataacatgtcaccaagcttcgggagacctaggaaccaggctacagtgcgtgcttttagttccagctccgattcctactgttcctcactcactaaagcaatgcttgtggaacttgggattcctcatctgtaaaacaggcataattctacctcctttacgtgtttgtgtgtgaaataacttttaactttaaattggaatacacgtgtaaggtgttgtcatgataacgataataatacaaatcatggtcactatgtggacttattcttggtcagaggcatccacaacagaggcatgttcttagagattccactctcagcgtgaagggaggaggaacaggtttcggggtctggtagggagggtgaagtgaactcatctaagctaactcagaactcagtatctgagcctaggggcttcccaggaaagaaaggaaggcagggctatgcctgagtcctctgactgggatttatctgggcatttgcctcttgggaagctttggattcaatgagatgcagaaccactgggttctccaaaattcagaaggcacctgcaagccttgaaagctctgtggatggatgagccacttccttggccatgtcctacagctgctggccagggatgtgtgtgggggcattgggtgttcgttcgcagtaccccaggttcctatgctcaagggctcccagagcaggtattgcctgtaagatgtgaatggcagaacccagttactgctctttggttaatgctattcctcactttttctaagccccatggaaacgtcttctcccgtgtgccctgaagactaaagcttgttattaataaaattcactgcaattaaatcttagatttccttaaactacttttcactttgttggagaaaggagtgatggggactgcatacctgtcaccctgtcctgggccttctgctcacttctcttttgaccctgtacaggttcgttagggtttctggacttcaatgaccaaatctaaaaatgaagaggcaggctgcactatccttacgattgctttcactgctgatattcaacaatgccaaaagccattctaccaagtgtgtttcttgctgggtctgccttggtgataagtcctcactatccatgagtgggctgcaggcaaacagcagaccctgaggggacagagagagccccaaaggcccacctcaccaacaccttcctgcagaaggaaggagggcgagggtaccagacaaccttctgtgttctgacacggcaccaatccgcctttgttctaattgcctctatttttctttgctcttctatatcattttgcttaacatggaagaaggttttttaatgagctagaatgatctaatcagccacaaatgtgatgtccttgccacattgtttattggtttgtagacagccagtgcatcccagggcctgtcttcaactatattgtaaagcagcaaatggcttgggggtctggggagtgcaagttgcttacaagtattacgtgactttgggagtgtaaatttctaacctaaatttattagtcattttttataataattgacacatatcttttgaaaatactaatagataaatcattaaatttttcagtttattttgttacataaatgttacatggattttctttggcaatcaagtaaattattacagtctgtttatataaaataaatattttatctatttataaataaacagtatatatatgaaataaacaattagaagtatttgcagtaaaaagtgaaagtttttcttagttgtcacaaccctactcctgtctccaaagatcatctcagctatccactgggtctgtgtccacactggcatcttcctctgtattcacacacatgcacatgtaaatataagacatgcccctattatatgattaggctctgtgtccccacccaaatcttatcttgaattggaagccccaggggttggggaggaacctggtgggaggtgattggatcgtgggggtggtttacccctaccccatgctgttctcatgatagtgagtgagttctcataagatctgatggttttataaggcagttttccctggattctctcaaattctctctttcacctgccaccatgtaccatgtgcctgcttcacctctgccatgattgtaagtttcctgaggccttcccagccatgtggagctgtgagtcatttaaacctctttcctttgtaaactgccgagtctcaggcagttctttctagcagtgtgagaacagacgaatacaccctaggttctaggttgtcgtatgtgaacaggttacactgtgtatgcttccctgtaccatcctctagtcactttgctacacatcttaaggattctgccttgtcagtgcttataggtcagtcttagattgcctatttaccacaaataatctaaccattctatcactgaagagttttgattatacacaatattgcattgaaacattttatgcaggtatctatgcatatgtgtgactaaatatatatttggtagataccaggaactggaattgtcaggctagcatatgcacattgaaaattttcattcacactgccaaattcccgacacaacaaggttgttccatttacatccacgcaaacctgtgtgacagtcctgttgacgacatcgtccccgctacacagcagacggggaaggctctcatccccttcctcagcagtgggagtgctaccggccctctctgagccacagtgggaaacaaacctgtttccacttcagtgttagttttgtgaaacaatgcaattgtggctttaggtacatgtctaagaatagctagtaaactagaggatagattattcatgtgatgtctttatctatacatacttccaggttacaaattgcatttgctggtgtccttttatgtggttagttgacatgttggaatcagtggtgtcttacttagaagttgaaattaaggttatattctaggccaggcatggtgattcatgcctgtaatcccagcactttgggaggccgaggcaggcagatcacttaaggtcaggagtttgagaccagcctggccaacatggtgaaaccccgtctctactaaaactataaaaattagctgggtgtctgggtgagcacctgtaatctcagctactagggaggttgaagcaggagaatcacttgaacacaggaggtggagcttgcagtgagccaagatcgtgccactgcactccagcctgggtgacgagcaaaactccacctcaaaaaaaaaaaaaaaaagttatgtcctaaatattgatattgcacaggtgatctacggcaaaaactgagatgggaatgtccgtgtatgggaggtagacccgaacctttttaattgccaaaaatactttccaatgttccaaataattgaagccatcccacaaatatgtaactgacctagacttaaagcaaagggtacatgagtgtttaaaaacgagaagggtgattttaaaactggctgtacattcttttcctgatttcctactttttcttattaagatgtccctatttatttaattatttgattatatatttccttttcattgtctatatggtcattattatcttctgaaaatgaccatttctttcttttctctgaaaaactgaaagtggacatatcctaaatctcatctccaactagaagctgagtgactgtctcatgagcacagcctaatgcaaaggctgtgagcaacgcagtgagctaactgaaatccgtttaacttggtacaaaggaaacaagctccttattcagccaggaaaggctaatggagaacctgctatgtactccatagtacaggcagcttattcatctcaacccagcccccgagcaaggagctcctacggctgttagtcagtagagatgagctacagaaacaggcggaagagctggagatgcacctgccaatcacaatggggacaggcggccaggactgccctccagccctgctgctgtgatgtgctgtcctctccagccattatggatcccaaatttgattgctgaaggacacagaaaaccttaaagcagttttcctgttcagacagtatcgaggcaagggtccaggaaagtatgtaaaaccaggctcgggcatccttgccttgcagaggctcctctgaaactcagttcacagaggatggtttcgccttctccttacggtggtgtctgaggtgggcttttgtcaggcatttgtctggttcttgctgttcagtgttatacgtctgagaaagaagcactatcaacgtgtagctctcatcttttaaccaatctcacacggagcttttagggtgaaaaacaaagagcgtgacccatttccactagtagctaatcctacaggtgtgattcaggttaccagacaggcacaggcactgccgtttcagcaacacttagctaaacaaaaggtcttcttgacaagaaatcttagaaaagcaatgatagcaggaaagaatatgtgcacctcagatgctgatacctccaggaaaagtcaccaggagctggcttctttccatctgtgtcccacaggggtggtgggcaccgccctggcaagagagggtggaggaagacaggcttggttcttccttccttcagcagtgccccacggtggaggcccttctcagagaggacatttgcatgataattcccgaaaccactgagccaagactcaaagctacgaattcacactcaacatacaacacacatagaaaggaggtctgagtgagcctcacaaggagagcaccacacttctctactcatggctcacttgctgcctggggattcatatcaggtgccacagcagtgggattcttacttaaagcatttggtgctaaaaaacagatttaaacttttagcctagccctgctgttgtcagatacagaacctgaacttcagagagatttattcactcaacaaatgttcacaccaagattggctgagatgggtcttgctaacccagcagtaatgacagtccatacaatcaataacatttgatgaatagttatatttttaaatcataatattatgtcagtatcaataatgtcaagtttatatgctagttgccttagtataatctgattgaggaagtagggacccagttaaaaaggtcaaaataaaagaggccacctcacagtgagtacccactaagcgcacattcatcctcatcaaactgcgttgtctgggagggagtctccacatgcgctgtcacgtctgtctctgtctcacaaggacgtgggtctgaattgtgagcattaatggtcagagtgcaaacctaggtaaaagaagccattgtttgtccagggtgaatgctcctgaatctttgtagatgatttcaaggtggtatgtctgatgcaaaaatgtttcaggggcatttgcctgaggaagaaactgcaagaattccttgcatttatactatgtgggtgttgagaaaaagccataaaacacaccattgttatcagagattttccagtgtagatagctgtgcactgctataaataaaaccccaaattataatttgtattaaaagctaagtgtatatttttaaatgttacaaaataactccaaactgatatctgtagactttgcaacaaaacgaatacgctaactctcattcaaattttgaaccttgatttttcagggtaattttaaaacctctctagctccatgtatctattttggcattattttgttctttatgtgtttgttttagtaaattcttattaggggaaataataataattgttatggttgcattttattggctgcctttgtgtttcctaggaaatcttgtgttatcttatttcaagttccacttgctaagcactctggctatcatcttattacaggcgggaagtacagtatctgttagaggatttatggtaatgctgctgcatctagctgctcataaacagcatggggagcccctcagggtctcttcgttctcctgacacacttcactgaggcccattaacacttgtctgttattgccatagacgcactttaataagcctcttggaattaggaggtttgcaccagaaacaatggcttccctaactgaggcatcaccctctcactttctgattttctagctcatcattttgtttaacaaaataaattctctctttgatagtagactttgaaataatatggatatttcttcttcaaattaaaacagtcaatggtttctaatactgagataacattgcagaaaaacatgatagaaagttaataatttctacatttccattaatgaaggtaatttcttttgttgttgtgatagtaagataaagttgagctgacatttggaagtggccttgtcatcagcaaactatattttcttatgaatgaaattctattatttccaaaaaataaacatgcaaaatatttctcccctattaaattgttttctaattacatcaaagcgttaaagaagcaatcatctgagaaatgggccagtaatggctcaacctaaatattaagtgcatatggttttaccttcaaacctaggacatgtatttaaaactcctcaatatcttaggtttcaaagtaaattaactaaatgtgtaaaaagtacttctagttagccattattagagtttatataacaaggtttctgagtaaaattatttacacatcttctcaaggtgcagttacctatcttgaaatgtagctgttgtgagtgtcacagcacaggggaacaaaccctccttatgccctcctcccttctcttacttaaggtattttgtgttgtcgctctatcctttagaaaatgaactcagaggagaattggtgaattcctatccagtgggcatcttcaaaccctggtcgacggcggaagaatatcaggtcctgagatcacccacccggcgcggcaacagtgcaggtacctctgcccagcacggggctcctggtgacagagtgcaggtgcccctgcccagcacggggcttctggccacagtgcaggtacccctgcccagcaaggggctcctggcgacagagcacaggtatccctgcccagcaaggggctcctggtgacagtgcaggtacccctgcccagcacggggctcctggcgacagagtacaggtacccctgcccagcacggggctcctggccacagagtgcaggtactcctgcccagcacggggctcccaggattgctgcaggcagcccctcctctggtgcttgtcccatttgctgctttgagtaaatactttcatcttagctgcctggtgcttcatggcttccgggaggcagttaaaagttgcattgcgcatcctctccaaagagacaattcatgccaaaaagagtcctttgcagttaaattagatgaggcatcactgctgaagttctatagggcaggaatgatgtgagcctccttgtgggtgctgagaggatgcctcggggtggccagtggggagggaatggtgcccatgaccctcacgtggaaatggctcatgtagaatcactgcacacagaatctacacttgcagcagaaggaactggttagtaaagcatgtggggtctgatttggaggattggggagggaagagattggcgcatacctagtggctgctgcctggcagcacatatttttagggctggaggtcgacaagactgaaatatggcccaaatctcagatcctgtaaagtcgttggttctgaacgagtgaatggaatgggaactctggtattatcttctcaatactcacatttagaagtacttttatatatgttactctgatgaatagcagaagaaaattctggtaaaaatggcaatttctcagcatgctctataaggaaagctgtggtgtgcattttaaggttcactgtgcaattgtgatttatttgtctgccgaccgccccatttgcctgtctgataatagaactacttaccactgcacagaaattagaggctgggattgtcttccatatgctgcaagcttgtgggtgctgcaggctttgagagctttatgaactgctgtaataggtcacagttgttctaattattttctcatctataccctattcattttccctgaagaaactcactgcactcattggttccgtttggggaaggcattatgtttaatcgtacatttccccgaggttaaaacaacaacaacaacaacgacgacgacaaaaagaaaaaaacaaaagaagctattcacattgagtgttcatgcatacttggcttcagaagcagttaaagtttctgaactgtaggtgtttcatacatccaagctatcttgtttatctcatctcattgaattttagtaataagttaaggacgtttagtgaaatattttataagggtgtaatgtttacatgtggctttgttgaactggcattctggcattgagttagatgttcacatttaaataaggatgctcaatgtagtttgagataaagcattcaaatacaaatctcacccagaattaaatgaaaccacaaggagaaagagtaagctggttttgcaagcaacatccatgtttatacttggctttcagtagggttctcagctgaggcatcacctttgattttgagagatgtccattttcagggtgggagagcaagttggacttggttaggggaaaaaagagatctcgaggttctagcagctgaaatcctgtcctgctttgccctggagactgccatcctcagtggagtgtccgccgggacccctccagccaggccccgggtgagcagacccttctgggtgtaagacaagcttgtcacccaaaggtctccaggggcctccagatccaattagataataataagagcaagacgcacaaccagtgcttgcatttcacgtcgatctttccactcagtcctcactctcttcattcagtcctcatcagtcctcaccaatcatttctcactttcggggctatggtaacaatgcataaaggtcaccatgacagccacacactgtgaagggcgcagacatagagcctctgatttctgggatttgttatccatgttctcattttttaaagattagtgtttgactctcaggggatggtcaatatctattttctctatgtatgtcataagtactttagtaaatgggtgatagaatgaaatatatgtaaaacagtacatagaaataaatagatttagcattatagaatgggaatacattgctatgttaatgaaaatacatcttcacataataagctataaaatggcaatttgtaaatcatcgtgttacatagacctggtgggccaacatttttttgtagaaccagagatgattttagactttgtggagggagtggtctccgtgcaactgctcatcactgccaccgctgtctgaaatgagccacaggcaacagcgagcaaatggcatggccacctgacaataaaactttatttacagcatcagtagagaacagatttggcccgtgggcctaagtttgtcaacccttatttacagcgtcggtagagaacagatttggcctgtgggcttgagtttgtcaacccatggtgaagacttaagttcccagttctgaaatagccacagtcagttttggaagagagatgttccctgactcctccctgggtgagcagatccttgcaaactcgcatgacagtctaaagctactgtccacagatgtgctactcccaggcaagccctttgctgatacgtgagcgtggtacccagggtggagctagcagaagcttccacaaagtctgaaagaaggatgaagagagcaaggttgccacctctgtggaaatcagagcagaattcaagagactcaaaagatttcaagaggagaaaatgtttctagtgcgtttatgcctgtatcaccctgtctgactagaaatatcatcctgaaaactgtgtgggatgtgaaaccaaactaaatccaactggaaggggtgtttccacgcctggatacagagggagttctgtccataaaaccgcgcataagccaaaagaaaacatcttcccggaagggtgagggatgccggtcagcagtccgtggggcagagccgggcgtgaccacttgacaggaccaggccacacaaccgggtggggtgggattccattcggcctgttttcccacatcctctgcaactacaaaacaaaaatgtaaacatgtgaatttaaaaaaaaaccatagcaaacatggagaataaaataccaaacacaaaagagaacgatttccggttgcaggggactgtatgccaccagctcgataaaaaggttaatgctgaaaaagatgttaacgatgccgtagatgtttttaaagcctccttatgtttgcctcggactttaaaaaatcttatttggcatgtgaatctgtatcatatgtgatttagccaaaacacagagtattagttgacattttccactgagatgacttggtagaatctgtgtatctttaaggtagtattgtacatggtaatacattattacagaaaaagccaaaagaggtgattgagagagcggaaacacaacctgcagagtgtgctcctaccacactgcccaaggagcttagagagaaaaggtctgctgttcctgtaagtagttcagtgtccagcagatatttcctagaaagttataggatgtcagactggagaacaaatcctaattctaccccatcatctgcagagaagttgcttgtctccttgaacctgagtttcagtttccccatcagtaaaatggacataataattgcttcttaatagaactgttacaaggattacatgttataagtgtctaaatcactaaatttagtccttgaaacacagaagatgttttagaatttcccagaactgtattgtttttaaaataagaagtggacagaggtaccaggttccccttcagatagcagctccccagtgaagaccaccaactgcatcacctggctctagggcctcgggactgagcattagaaagttttgagttgggtctggcctccattatttcttggaagtaaaaactcttggaaaaaggagaattgctctcaggtagcagaagcacaaacaaccgagaacactgattctggatttggagtaaaacacgctcagggctgaccactctccatgtcagcatcttttatccaaagcacttcagggtcatctgaagcatttggagagcttggggcactgaaggtggagagtggcttatttgtgtacccagctctcagcacattgtttgctatgtctattgtgtagagacacccaaaaaatatcagtctcagcaatggatgagtgcgttaccttactgtgtaaagccttgttttcatttgctcacaatttagaaacagctgatgtgcaaggacctgcagtaagtgtatgaagtgtgaaagtaagatccagaactttccatatgcaccccaacacacctaacaagtgcttttaactgaaggtcaaaagtagcagaaagaattactttttatgttcggctatgacttgtcacttggcttcctagcatgcacacgtagtactcttttaaatgaaacacaatgcacaccctcatcacacaaacttccgtcttttttactgcacatccctctgacctggagcctctgggatgcctgtgcttcctcctcctgttgagcccacaccgttctgcagagttactcatagatctacatgtgcctcataggtctacacacactgatcccaccgatgtgaagtcacctgtttttttgagtttctcatttgtggttgtttgtaggtgcaagtgaagggataaaattttaacacatatctaaatgaagtaaatgcctatttttttttaaaataaaatgcattgttaagtgaattatttgaaatgccccatccatacacacaacctatgcatttatataacgtatgtttgagtcaactactacatgccagatgttatatagaaatggaatcagagaattctgcagaaaagctgttcttgttgagccatttaataagggtgagagtataacaacaaccacaacaagagaacacctggagaaggagctgcaaagtcaggaggatgaagccaccccaaaggggagaatctgagtgttcctggagaaggcgtggagggctggagagttacctcccaggctggctccaaggatgtcttctgacttagacaagcacagttcagatgtggtaacagcatcaggaaaggccagaggtttgggagcgggaagcgggagggaaggcagggtgggcgtggtgagtttaggttgagctctgtagatggtgagagaccatgggtgagtttaagcaaagaggagacagggtttgatttcccagtgtgaagtgtggattggaggagctaacgccagtgcctggaggacagggagctgttgacagagtccaggagaagttgttcagggtctccaggaagacagaggtatttggtttgaagaaggtgaaggtgtgtgtggtgggcttacagtgcagcaacgctgtgcagatccaggtgggattcagacatcattgcgtccaacagaggagaagagcaaaaaggcttcacagtacagctttgaaaacatatacaaattctacactcacccctcaaaacctgggggtttcatatgtaaaacagtgagtgtttcccacgtcacagggtcattgagggttacacacactaatgcctgtaaaacctgcagcgcagcggctggcaagaagcaccagccctttaaaccctggttaccctcattattattcataaagaacccaagacacacttgcctcgccataaaagacggaggcggaagtgacctgatttacatctgtgttatgctttatgctattcaatcaaagtgccttcacttactatgcagctatgtggaaaatgacgcactctgaacccatgcagaaagattttaagaacattttgttaaagaaaaaagcaggatgcagaagagaagcaaaactatgacttcgcacaaacatatgtatttgcttgtatttgcataaaaaatataggatagacaaactaaaaaaatgtttttatgtgggggttactaaagggaaaggcaggttgaggggaaatgttttcattgttcttgttcattcatttcttaatttgtttctttatttttgaatgatgtaaatgtatctcatattcaaaaaacaaaatttaaaagaaacgtgaaagagtactttcccataaccaatctaatgtatcctcactggccctttgttttaggtagaaagggattattcatgcagttttacaaataaggagactgaggatccatagcttaaatgacttgaccaaggtcgcagccagagaataacagctctggatttcaattctgactctgaaacccatgcattgccaccccttctcccctcattataatacacagttatgcatgtagagtcttattcaatatttattgctaacatagagatgtatcaatctaaataggatcagagctaagtgacaggagtagataaacaaaatggcagtgatggtggtggaggctgggagggaggccataggagagtgtttgaagagggcttcctgtttaatgaggacttatctgagtgacctgtagacaaaacagcctcgctggttcatgagtttataacggtgggagagagaggagggaaggaagaaaacagggaggcaggctagataattaagaaaggaaataaggagacgaggaaggaaataaatataagaagagggagaaattctcctatcggattttctagttaacaacgtctgcctaataaacacaattaccttttaatgactttagttttccccatagctctcataatatttcatgcatgctcttctttctaaaattctgtactttaaaactttacaaagtagaaaaataaaagattttatttttttacaaagtagaaaaataaaagattttatttttttacaaagtagaaaaataaaagattttattatttacaaagtagaaaaataaaagatttacacagtagaaaaataaaaatttacaaagtagaaaaataaaagattttattattacttatttacttcttcaataataaagatcagaatctcaaaattatttctaaaaagtatttttgaatacaacattcaagaaacagctatgagatgacaacgtgagaaaacagcagcaattgtggaagaaattctttagaataataaaggaaaactttattttccttttatatatcctagttatgttttatacattaaaacagctataaaggacatatggacagttggggaaatgtgaatattcccaatattctgtatattttatgatttaaataatattaacttccttttctgttgaaattacgcattggtgatgtgagagaatgtgttttcttcttagaagataaatgttgacatatttaggtgtgagcttgccacaatgtctgtgaggttcaggaaaatgtgtgtggcatgtggatgtctgtggtcacctgtgtgcacgtgtgtgtgtgtgtgtatgtgcatgtgtatgtgtgtatgtgtgcacgtgtgtgtgtgtgtgtgtgattggtttgtgtaccccacccgtacttggtgtctaatatggacaaagttgcaaagtaaccttactgcatccatttccttacagacatactttaaactgtcagaggtagatcatagaacttgaaatctcctttccaacttaaggaaatactaattgtctttggctggggaggcccgtgagctccacttctggtgcccctggagagctggcgcaggccccccttccagcagagactcatccaggaaagcagctggcaggccttgactgccccttacctacaggttaggaggaaagagccccgccaaacagttttctaagccaaagtgtttattggtgaagctgcaggtgaactttgagtgcccttctttccttctgtcacagtgcattgatgtgttccatgtccaattcatgaaaataaactgttctagcaggacactgtgtttggaaacttgtgtacatggaatgcagtcctaaaggcaagggctaaaggcaagctctgtctttgagcaacggcgtgtatgtgcttctgaaaaccatgtctatcgtctgttgacagcacgtgtctttctttcatatgccctgaaagcacgttgcagaatgtcacaagtttatgcagatggtatttcttctcattcattcccacacagaaaataaaaaggatagttggtcaactgacaatctggggtggctaccctatgtgaggcattgtgctaagtcttggaaagtaaccaaaaaatgagagccagtgttgacaccctcagtggctcagaagtcaggtgtttaggaaactcggacagctcggacccacactgatgaagcagcaaagagatgtcatgatccccacgtgttttgttcatagtcgtgcaagccaccctcatccaaacaggatgcataaaacaggtgttagataaaaacaaaatgaaacacaaatggcagcaggaaatgataagttccaagggaatacttaaaagacctaaaaaagtaaaaccacaggaaggaagaaatgaagaaagggaaagaggaagagggttcagaagacaaataatatggacataactataagaaaaaaacacaatgaaaaacaaaaaacaaacgcctattcacatatatggccttaaacactccaacagctttactgcatcaccacaatcaaatcatctgaattagccaagttcattaaaaagagctaaattacgtacactatttctgtttaatatccataagaaattaaatttatataaattatatgtattcttttataaaaatatgtgtattgctgtaggggatgatattgaggtcatttttcactacaagaaacatgcatgaataagaattatgaggaaaaaaattatttctctcaatgaaaaagagaagcaagaactttgctcacagacataaaatttacacctggtcccatttcctctttgtcatggaccactaacaatttcctgggcatgttgaggcaaagaatccattcagatcttatgacagcacaggaggtcgaagtctttttgtttgtgttgttttgtttctttcttttttttttttttctgagacggagtctcactctttcacccaggctggagtgcagtggcgctatctcagtatcggctcactgcaagccccgcctcctgggttcatgcctttctcctgcctcagcctcccgagtagctgggactacaggcgcccgccaccgcaccccgctaatttttttttttttgtatttttattagagatggggtttcaccgtgttagccaggatggtctcgatctcctgacctcatgatccacccgcctcggcctcccaaagtgctgggattacaggtgtgagccactgcgcccggcctgttttgtttcttacttaattgcaactactgtcaggcaacataaattgtatttcagtgataagtcttcaaaatgccttgtcacagatttgcaactgatgatttgctcttacagaaaatatgaataagtataactgaggcaggtagggtaagagatagcatcttagccagcagggtggtgatgaaggcccccacctcgggtctcgaacagagatcagagccccatgtagaaagaaaaacaaggttgggggttctaatggaggtggtcccagaaccgttctttaaacaatgctcatttagggtcaggtggtcctgctggtagtttcagaagcaggtgtactaggtggagtttattctgcagatagacccacttagccaagatcttatttctacattctacctggagctctgatctccattgaagacctaatggggtggtaatgaaggcctccacttctacttttatcagtgcgggcagtaaatttatttgccacctttccaaggtcacggggttacagatcaagaggtcacagggtggcaagtcaagttactgcgagcactgataaaagtagaagtcaaacagccacctgagagcaagagaacatttccgacgcctgtaaatgtggccaggatccgaatgagttggaatagactaggctgtttaaaacatgaattcagaaatgaactcagaaagcagaacccagataaaagtttattccttgctcatgtcacaacttaatgccagctgggcagccccttcagtgtgtggccctgccctgcggaatctgagtcttccagaaattagcagggccatgaaaaccgtgcagcacgctttgggccaggccacagtgttcccttagtcagagtcagatccagaccccaatccactgccctggaaactgggaggtgcaggcatcctgtgtgcccaggaagaggggtgacctggatatgagcagagcctcagccctgctgccctctgaggggtgagtcagcaagggctcagctgctgtggaccacgagcaccacctgcattcctgcccgacctccttctctgtggaccgcgggcactgtctgtattactacccgatcccttttctctgtggaccctagacaccacctgcattcccacctgacccctttctccgtggaccccaggcaccacctgcattcccacctgaccttctctgtggaccgcaggcactgtctgcattccctacctacccaccccacttcccgtgttctaacttggttctgttgctaatatcatctggcgccccatggaggtctgccttcagggaggactctggtgagcttgctggtctgagctgagtttggagtccaaattcatttgtgtttcctgcagagatgcacagactgacttctggccggaaacactggtctgtgaaattggacattggctaagcgagtctatcctgaacgtaaacgccaccaagtgtgcctgcttccgaaactaccaggaagatcacctggccctaaaccagtattcaaagaacggttctcggaccacttccgttagaaccccaactttgcttttcattctccttggagctccattcgagtcctaaggtatcagaatttctagtatagggcctggatataaaaaattttaataagtaccccacaaattcatatgcacattaatgcagagttcctgcccagagtgacagcacattcactgagctgatgcatccacctctgaggctgctgggagctggcgtccccagcaccatcttgctctattgccgcatacccagggagctgggttctttgtctttgtttcttcatttaattttgtcaactgagacctgggaaatgtaatgacacatccttctcatttcaagttctttatgttatgtaaaatgataaaaacattttacaatagaaggattcaacataggcacaagtggggctgagccccaaatatacatcttcaggctcccagagtggcctcacttgtttcattgatacccgaccattcttcctcgtgcaggcacgggtcactctgaagcaaatccaagtgagcatgtaattttagctagaaataatttagcataaattcctaaaaataatagttctttttacaaaaacataaccacccatcaaacattacaaaaagttcttgttatcaaatatccaagcaggatacacatttcccatatggtctcacaaatatattaatacagtttggtttttgttttgttttgttttgtttgagatggagtctctctccattgcccaggctggagtgcagtggtgcaatctcggctcactgcaacctctgcctcccgggttcaagcaattctcagcctcccgagtagctgggactacagaacgcaccaccatgcctggctagtttttgtatttttttttagtagagatggggtttcaccacgttgggcaggatggtctcaaactcctgacctcaagtgatccgcccgccttggcctcccaaagtgctgggattacaggtgtgagccactgtgcctggcccagtttgtttttgaattggaatctaaataagatccacagtggcatcttactgacatgtgttttgaatcctcttctttggtctacatggcctttccttccttctcctccctgctttatgtcttgtgacttatttcttgaataagctgggcagagggtaccccagtctgtgttttcctgaggtcacttctttggtgccatttaacatgttcctctgacctctgagtttcctgcaaactggtggttaatgcagagacctaagccaccgcagctttgatcttgtggcatcttcttgagaagatggcgtgcaatgtctggttgcctcccattctgtagccttacagttggcagcacagggacgcatgttgcccaggttgtcagcctgaccaaactattaggaagtctcccctcaaccctctcacctcatggctttagcagccagtgatgcccatggcctacatccagcatttatccaaggttacagatgatactctatcattcttaatttattattcagaggacttctctacagaaaacgttccttcatcaaccatttggtttctattatataaaaatcaaagtaaatgcttttcttgctttaccactttttcaaataatagtattttttctcttccaatgagaaataccaacactaaaaatgtgaacagacatgtactgaagcaaacatttggtatctcctgaggttttgtttttgtttgcaaagcctacatcgtctttcttgtgcacatgctactcacgatgatgaaagtcagaactaacatgcaatgagtgtggaagatcgtcatgtgctatgtgagaggcacatgtattacctcgttaaacttctccacaccccatgaggttgatactatgatcatcctcatctgcagacgaggaaactgagacacagagagacatgggttgccgctcacccatggccacacagctgttacgtgacagacctgggtgctatcgcagggtgtccagcctggagctcctgcccagcacctgagcactttgggcttttgaattcactcacagcctgctgagtgtttatgagggtaaggagagaaagaagaaaaagtagcaaacagaagagccccccagaggaaatgcaaatgatcaacaatttaatgcaaaggtactaggcaaggtaatagcacagggcttttcaaggtcatctgcttggttatctgggccgaaggctgcgagggctttaatggccagaagttgctaatggcctttctgtcctttgaagagatattcaattctccaggggcatccagggggatccacgccccctcgctaaggcagctcccaggctggcatcggccacctcctagtcggcaatctcaacacaggcctgtgggtgaagagggtgctggtctgaacacagcccgcgctcagcagcgaggtgctccccagcgtctggggatggggcaggaaagccaggcgagatcccacaccacacctggtgtgtgttaattaagggagtttccggagcttttggtttgagcgcctctcacctccatttaaagcacatctgtgcacctaattaaaacacgcatttgcagtggagaggagggtgtgttcagtgccgacacctaagagttttgaggaccccgaagagaccatgaatactggacccttgaccccatttccaagttagcgattcccatgtggactcaataaggattgcctagtatgctgcctcccttcctttttagcacaggctgaaaagcaggtctgtcaccgtcaccccgacagccccctgcttcaccaagtattttcctgggagtctcaggagctcttcacatgtccccgtgccggctgattgctacagcaacctgcggattgtggaagtgagatgtgggcaggtggaaacttgtcatgatgcactgagtgttttagatgttaggttagacttcttctcctacaagtgctgcatatgtgctgtaacaccgatcctgagacaaggtacacaacaaaatgccctataggtaagcgtgcaaatggcacgaggccctggagcccttcagcaggaaataccagcattcaccccaccccatcaccccttccctggagcagaggctctgggtctgcctgcgctgtctgcctgtcggtgaaagacacgtgtcatcatagaccattgctttctgcttgcctaatcctccatgttgatattaaggtctttatatccaatttcaagtgtgtgtgtgtgtgtgtgtgtgtgtacttgaatgtttgtgcatctgtatgtgcagtgtgtgcacccgtgtccacctacgcgtgtgtgtgtgtgtgtgtgtgtgtgtgtgtttatgccatgggaggagagagaggagcagaactgtgactgaataaagagccatgtgccgatatgaattgcattttgattcaggacagtgaccaaccccagctcaaggtttctgcttttagtcacttaagtgcaaagaagaaaggagcgatctcatggtgcgcatttgtgataggcccctgcaggccttgtcaggcgcagcccaggaatgacagcctggaacatgcaaattactgctgaggtgactgcatgccaaacacactgtttcacagctccccgggagtctgccaaacctttccttgcagatttttttctaggaaacaatggcagggaatcagaagtgggttttttttccttcttcttcttttaaaataaaatctgcctagcaagggccagggcatatataaagttagtctaactgatattgcttcagaacccacttgctacactgtgtggtctcggtgtgtctgcacatggttcctgtcttgcaaggctgtgtgattgtggacaaaggcagatgaaatgaggcttcaacccatatggaaggtaaactgagtctccagaaggaatgttgctgaagaaaatattggaaagggcaagagacctaggaatggagaaaggagccaggagagaagctccctgcagagctgaagcctgacctagatatgaggtctctctggtgcgaggcctccacagagtctggctctgtggatccgttgtctgctatgaaaatttagggacataagactggatctaccctttgagagatgctgactgctgcaccaaaaagcccaaagacctgctggtgtgatgcagtctcagtgtggaaaaatatttctatgacaacagacattttcttttaaaattaaatgagagcaaagcaaaccatgcatatcctataaaagaagcagatgaatgcataggaagggaaacaatggcagttttgctccagtggaaggcccaggaggcgtgtctcaatgtttcatctcctgcctttcctcatatgctcagcacatgtatcatctgactttctcactggcctctgacattgccaagaatgaagataaaaagatactacaagtcactgcactttgtgaaaattgtaatgaaattaaaatattaaccattgaacctgaactaatggcagctccctcccacctctgcttttcccctaaaagtgacaaaaaatctccagaataataaagaaattattattaaatggttattttacaaaagtctagtccatggacatattaagtttgtttaagtacttggtaaaattatgaagtgcctgatatgtcattgttaaactaatgaagcaaagttatgaataataataatgccttatatctatatataccatttttacagtgctttcacatagattatatgatttcattatattttacaggctgagataaaacttaaaacgtaattattcttacaattttagacagtaggttcactgatctgcttgattgttttattttataaaaatgtactctgtgcttctaaatgagtaataagccattcagactgtgacgtcatcagcatttcagcaggacacttattttgccgaacccattgtaacatggtcaaaactctgttgtgcctaaacgggcttgaatgaaatcttgagattttcccccaaacggatggaaacaaatggaaaacaaaaacagctttgttttctaaagaaaccttgacaaggtcccattaaaacatgtatatttttcctcagtctccctcgagacctccccgatgatcctgctgtctcagcagggctctccaacagccgctttgctctgttcccaagatgacagctcttgctcagcactgggagggaccctcttgtgatgtcaggtgtccctggggccccggaggccattgccccaatagtgtagtctgaggttcagcagagagtgctacctccttccttccttcacctctgccaacgtaagcgtagatataaaaaagcagaaagccagccttcgtctcctctggtaagggcaaaaacactttaatggcaccaatgaattgagcacaataaacttctaatctacattaaatttttaaactggacttttttcaaatttgcttatgagaaaggaataagctgagatttagtaaacatattttacataatttggccagtcagtgccttgtgctctcttgctatgcgaggatacagctggcagctacgttgactttaagactgcacactcagttctctcccctgttgggggctgcaacctgtgttattgtttaatatagtcacagcttctagaagaacataactcctcagcagccttgccttcaggttggaactaaaagtgtaagaagtcactggaatatcaataggtttctgataaacaagtaaatgtccctgagtctatgagctctaattcagcctcctcctagcacagcttcccagccgggatattccaaattttaggttatttttacaagattaataggttttaatatatattttacaagctcactttacactaaggaagaacacatttaaggtaataatacctttttaaaatttatttatccacctacatacctgtctattctgcagccgagagtgcttagtgattttttgtcactatgggtcactatagggtcactatgaagaccctagaattagatcccatctccttttcatatgtgacagagtggggcttagcgaggtgaatcacagggttggagttgcacacacagcaaatcatggaacatggttttgaacctccagatgcctggaaccaactctcatgacaggagtaaggagtgatgttgatggctccgtggtgaaagatgatgtgaacatttaaaaagttggtattagtggctccatacagctccatgaggacgtccagcatccccccgacacagtgggcatagcaattccttgagtcatcagcagaaagtaaccttgtgtctggggcatcccatttagcatgcaataaagcttgtaaattgaaggcaacatattgcaatggggagattgagggttttaaatttagcaagacctgggttcaaatcttgactccaggacacactggtttgaacaagtttgacttcatgaataaacgaaggattgtgctgagaatagatgagatgacatacatcatagttctggtttggtgtctgacacataatagaccaccaggaaattataggtgttaatagacagaaaaatattttcatcttacatggcttatattaaaaaacaagatttcaagaagatggttggctcctgtcttaatgttcagaaaggcagaggctttgctctcgtttccctgagtcccatctgtgctatccaggagccactttggatactttagatatttggtgatcacaacacagaagtttttaaatttaccaattataacaattcagtccaacacttttaagagaaaaatttttctgtggtaacttctatgaatttaactctggcattgattgattgattgattgattgattgagatggagtttcactcttgttgcccaggctgcagtgcaatggcacgatcttggctcactgcaacctctgcctcccaggttcaagagattctcctgcctcagcctcccgagtagctgggattacaggcatgcaccaccatgcctggctaatttttgtatttttagtagagataaggtctctccatgttggtcaggctggtcttgaactcccaacctcaggtgatttgcctgcctcagcctcccaaagtgttgggattataggcatgagccactgcacccggccgcatttattttcttaacttttaatttcaggggtacatgtgcaggtttgttccataggtaaactcgtgtcacaggggtttgttgtacagattatttcatcacccaggcattaggtctagcaccttagttatttttcctgctcctctccctcctatcactctctaccctcaagaaggcctcagtgtcttttgttcctctctatgtgttcatgtattctcttcattcaagtcccacttataagtgagaacatgcggtatttggttttctgctcctgcattagtttgctaggataatggcctccagctccatccatgtttctgcaaagaacgtgatctcattctttttatagctgcatagtattccatggtgtatatgtaccacattttctttatccagtctactattgataggcatttaggttgattccatgtctttgctattgtgaatagtgctgcaatgaatagactctagtatctattctttattccttagttttagatgtcaccacgggttttaagtttcctagctattgagttaataaatcttcattaacctaggtatcattcaggtaaagtagctcacccaacagatggtgagtgggtttcaaatcctgggactaagaaacctatgagttaggagggtttcttcttcctccccagcgtcattgggcatcagccctcccagtgcaaacaggagtagagaacagggacgtaaacctcaggcggaagtgtcaccaatcttcaaaacgcccgctgagccccttaggaggacaaaacatttacagtggactaaggctccagagccagcccctcgggcagcacctcctgccatccggtccagaggccctctcccatctcttcttcacttgcctgcctgtctggccttgtccctctccggcactagtccaccagcagcctcatcagcacacttctcagtacctctcacacgctgcacccgggggttcctccgtgttcgttctgctgttccctccctcagcccttgctgccaacctcttcagatgccacccgacaccagctgctggcgagcccaccatcctctctcatggaaacccactcagagagtcttcctttcctctattcaggccggcctccagtcagctggcttgctggaatacaaactcagtataaactgaactcactagcatcactagttgagtttctaatttccaaatccaatagacattttaaaattacttttgatggtcttccaagccacacctgacaccatcgatcccttagtaaagattttcctcttcctcactttccagcccacccccagcctctgccttcctcctcttcccgcatcagcccctgcgcccccacatgagccctcccatgattctcatccagtctcacgtctaaacaaccacctgtgtgtgtgcagagggactctggcccagcacctccagctctgactgcttgggcaaagccccaggtggtatctgtttcccaggatcttaacactgatattcctgagacatctcaaatgcagcacctgagcttggccatcacctttcttctgatggctgcccttcttgcattctttgtttttgtttgttttttgaggcagggtctcgttcatagctgcagcctccttcccctggtcacaagccatcctcccatctcagcttcctgagcagctgggactataggcacccaccaccacatctggctaattgtttaaatctttagtacagacagggactcactattttgtccaggctggtcctgaacacctggcctcaagcaaccctcccaccttagtctcccaaagtgctgagattacaggcacaagccatgatgcctggacctcttatattttttagctcagtggcatcaatatctgtactgctataaaagccaggctcacaggagtatctattccccttgttcagtagatggccgtgtgcttctgaaatcatttcccaaaaacttccacccctacccctcaccagccctgacattcacaccctcatccctggcatggacccctccaaggaactcctaactaagatagcttgtttaataatctacataaatcttaacttatccaggccacgcctctgcttaaactcttccactgccttctcatcaccagtagaattgaattatttaacatgtccaagggctatgattatcaggcccctctctgctgcagcttgacaccatgcacggggctcatctactcgggacgcctctgattgccaggcccctgcacctgttttctgtcctctgcacagaatgacattgttccattcactctgtcgttaaccatgtaatcgtctcctgcagccctcaccatctctgcgtctgaccctgcccctccctcagactgagtttggggatcagcgtaactggtctggaacctacggtattctcccctagtttctggttcctttctgaggtttcaactactcaccacagtcaaccccagtttgagaatgccaaatggaaaattccagaaataattcataagttttaaattgcactccattctgagtagcctgataaagtctcacaccttctcgctccatcctgctctggaccagaattgttcccttgcccagcgtgtgcacgccctgtgggctacccagcagttcgtccctagtggctgcccaggtgatcaggtcaacggtcacagtgtcgcagcacttgtgttcaaatcatccttatttgactttataatggccccgaagcacaagaatggtgatgctagcatgttattatagttgtgctatttttatttcttttattgattgattgattgattgagatggagtcttgctctgtcacccaggctggagtgtggtggcgcgatctcggctcactgcaacctctgcctcccgggttcaagtgattctcctgcctcagcctccccagtagctgggattacaggcacctgccaccacacctggctaattttttgcgtttttagtagagaccgggtttcattatgttggccaggctggtctcaaattcctgacctcaggtgatcacccaccttggcctcccaaagtgctgggattacaggcatgagccactgcccccggcctatagttgtgctgtttttattagctactttttttgttagttactgttgttaatcttttactgtgcctaatttataaattaaactttatcctaggtatgtatatataggaaaaacagcatagacatggtgtggtactatccgagattttatgcatccactaggggtcttggaacatatcccccatgaacaagaggagctaatggatttcaaatgtcatattgcacttcctatagtattttcactggctatttttcaatgctggactcagcttcttagggtgtggaatgaatcttctgtttggctttggcccctaacgtctgtgaacatgccacatggtcagtactcagtagtcctgaaagtactctcggtgtggacattgggagggagtacatccctccccagctgtttttcttctaagtaagctgcatgtacttactgactgactatagattttgttttcctcctcctgtcctactcaagagaggagtccaatattcataaaagcaatggtctcttctcacagtattctatagcaccacagaaaaatcttaatgttttttaagctgcagtgttttaggcactgagtttttactaagagactctaaagctggtcgagttataactccttccttttaacatatccaaagagtgatttctaccagttttcttggcacagactcaaagtttttactgtcattttacttacttcaagagtgtaaagaggtgcttagtatagcattttcttctctcctaaactttgacatcctaactgacagttttcctcagagccagccttgaaatttgtcacattgtctttttccattcttttgtcttccctccatctccctccctccctccgtctccctccctccctccttcccttccttccttccttccctcccttcttccctccttcccttcccttcttttcccttcccttcctttcctcttcactccctctctttctcttttccttctttcctcccctactttcttctttaagaatatgctcttcacatcaaaagcctagttgtacatttcgaatctttgtagaaaaataggacctaaagcgttgagccatcaggatgataaggtagagaatctaaggtgtaagaaagagtagatgatccttttaggttagagatcaaaataaattattatcatgatctgtgctgtaatttctaaaaaaaattgtaatttagtcaaaactggtagcaattggtcttagttggaaagagaccagcacagccaggatgaagagagagactgctttaaccctggtgttcaaactgtactttgcaagttaaacactgacttatttttttcaagttatgtaacttactgcagtagatggaaaactgaaatctacatggaattttcttactaatattagtaatgattgtctttgtttagttttaaactatctcaaaaaatcaagatgaaacatatattgcccatacatgtgaagacatggtgttattttagtgctttttttatcttcttgaaggtagagaataagcaagtcccagagcaagttcaccttagagagccttacggtatcttgcattcacttggcttcaaaggccgtcttccccaagacagatcagtgccaggcaccacggcttcctctccctccattcaaagcatctgggcttctggaggctgactctaagacaacctgtcccaccggtgtaaagggaggtggaagatggcagagcccaaagagagaggcgaggtgagagaggaaaagcactttttaggtggatactgggatgtgaatttggatgtgatcactatgttgacaatatggtgactgggtcagggcatggagagtggaggtaggaagctgtggtccagatgagagacaggacttcaggatcccacacatgcagttggagagggaaaaggcagttgagttttggaaatgcagacctgggatggcagcctaatttgagaccaacttgtctgcagcctgaaatgcagacctgggatggcagcctaatttgagaccaacttgtctgcagcctaataatgcactctcgggaacttctgttccttcttctgcaaatgagggtaacaatgcgttctcagcagaatgcttgcaatgccagaatgaaacagccctggaaagaaccctgtatggcctgacaggtagtgtggccactgaaccagacatgactgaattctcctccttcagctgtgacagactttgagtaagggaacagaaacttggtaaacccagctctgcatatggttctgagaacaatgaggttgagctcagagttgaaataatgaattagccacttggccgaggtggctttgggcaagtcagtccccattgctttcctcatttgtgcctcatgcaattgttgataatctccatgcagtgcctaacacagcacacatatgcagtgcatgttagctggccttgggattgccttcccacttggtgtttatatatgcagcactagttactgaattcattattcttttccgctggttttaaagacacttttccattaaagtcccttattgcttacaggaatctctaaggataattttacatgatttttatatgttattgaacttgctctgctgaagaacataattgagaaaccaagggagagaaaaaagaacaaaagagaggaaggaaggaagaaaataaggaaggagggaaagaaagagaagggagaataaacctgcatagagcaaactaagagcaatattgtctatgggatttttccctcttggtgacagccgcctccagaacatatcatggaataagagcaaggcttgtaacagcctgatgtgaatcttactggagcagggggaggcagggctccttacaggactgtgagttcacaagaaggacacagcattttattcttgagcaacctatatgccacataagaagaattccataataaaataatccgggtgcatcaaagacaatatctgccttttggaggctcatgctgtgcactaacttactaaaagtgttaagaatcccatagtggagaaacctgttcatgttgtttaccccaagcttccaatcttaatggactctatttctgtgagatgtctgttcatacctcgtgctctgaagaatacagacaggaacgccatgccctggagacaaccgtattctctaatcccaggtgcccctcaagcccttggcacctttctgtggtttgacttaggatctaaagggaacacctattatactcatctctttcctttatgccaggtgtcccctgtccccaaaccacagaccactacctatccgtggcctgttaggaacccagcctcacagcaggaggtgagtggcaggccagtggcattgcagcctgagctccgccccccatcagatcagcaggtggcatcagattctcatgggaattcgaacactattgtgaactgagcataggagggatctaggttgtgtgctgtatatgagaatctaatgcctgatggaacagtttcatcccgaaaccatccatctccaccccgtcactgtccatggaaaaatgatcttccaagaaactggtccttggtgccaaaaaggttggggagcactgctttatgcctttagtaaagagatcattgctagatatctctgccagtctccttgatatccagataagtcatgcgggcaccagggaaatggaactggtgagccctggaggatgagaggtgtgatcctgcatcctgcttaaattagaggtgcaggctctcctcaggcggcctctcgccaatctcctccaacagcattctctatctggctcctagaactacagattcagatgcagtttaaagtctgaggtgtctgtggctctttcttgagcaggaaagtgaaagacaaagtgtattaaaattcaaaattggaaatcctggtaaccaggagacacggtaccagatggacctgtgtctttaagtgacagtgatctgccgtctgctgcggggctcccaggtggacgggctgcttgctatgtgccccagctgtcctcgtctgggacgcagacaccctgccttcttgtgcctttggctgccatttcagctctcgtgagcaggttggcagcttgtcacacgctgtcagcctctgagccacccacccgccccccgtcctgcgggtgcagaggactcaggctcctttggagtcacttgtgaggccgtgagctgaagtgttggtggcagaatatgtggcttctgccttgtgcctgaacagacagtcagctgtgggttctcgtgcctcatttacccttggagttcctcaaggacaaaccacgcttgggacatagccgaatggcatctgatggagggaacggtccttcctggagtcctgcctgagtgctaactccaacagaacgcctctgcccaggggcttggagcccacatcgccaacaggcagtgtgcctgctgtgtgctcgcaccctctcagccatgcagagtggcatatttatggatgcatcctgagtccttccaggttttgtttgacaccaacgctctgacacagacttgcaagcatccaggctgaggaggctgtctgattgtggtgctgttcattatcattagatgtgaggtttacatggggaggatgatttggtcatggagtgctagtctccaaatgcctgtctgagagatttgcaaggcactgggtcttttcaagcctgctagcagctggagttcagctgcagctttgcatggcttttgaatgctaataactgcagcagcccaattgtcactgagtcttgttgctgagaaatgccatcatgaggcaactcctaagctaagagatgatctcagatgagagtaacaaatactccagacccctttcctttctgctctgtggaacaaatggacaaaaagccttatatttagtgctgatggctgtgaaggatgttcaaggtcacacaagacattgcctggagttttgctgcagaagcaccaaaggagatgcattgtaaagtgactgcatatctaaggtggcccctatttaatagggtgtcagctcattgattaatctacgaaaattgcaccaagaaaattaggagtaagcatggaaacaataggaaattgttcactgtgtagatgcacttgttaattctgaagttatttgttattcatggatctcaacaatagctcctgaacaagccggccctcctttggacacaggggacagcagcttggcattttaggttgcatctttttgctcatttagatctaggggtcgtatctgtctccaggggtgggctgagaagcagacagcagcactgagcccaggaagggaggcaggacccctgcagatgctccatcctccgcagccctcaccttaggaggatggtgcttaccacccacactcacttctatcgtcccaggtgctctgcccggccacactctccaggcccttgtgccacactcactcctatcgtctcaggcgtctctgcccagacacatgctcctggcctttgtgtggtctccatgacagaacagttatttcattgtaatgccaacaaatccatatacctgttttcttcatttttaaaagaaaaagatgcatttataactaagtcaaattgcataatattaatattttgtaaacattatttgaaaaaatataaaactctatcctgatgtgcttagttactgttacagatttatgtacttctgtgcaacttgcataatggccattggaatcagccttgggcaccacacagtccttagacaatggtactaataattccctttgttaagatgggaaaatgcactcacagtgttccagatcgtcagcattggcatgagatcggggggaacacttctgtttcctcacattctaagcagaaaggatagaagtcctctgaacattacatcatttttttgaaacaatcattttataaaatgcttgcatgggcattttctgcctgtttgaccttttctaaattgctttcagttttaagccaaattaatttatataattaacatatatttgtcaaaacattatattaaactctatacatttataacaaagtttttaatttttttaaaagtctgctgtaagccaccattacaggtatctttttctggcagtgtgtgtgtgtatatgtgtctttgtgtgtgtgtgtgtgtgtgtgtgtcttgtgtgtgtgtattttttttccagtggatactgaaaggtgttcttcccttctttcccacaccatcttctaccctttttactttagaatgagctctccttcctaactttccaatttaaatctggccttgtggacaccctttgtatcccaccatgatatcatggtgtggcaagtttagaaacaccaggaaggaagacatggagacaggactatttttatgacacatcttttatctgtagtgccacttaggtctctgtctcagacacaggttagagcgctggacggcgtgttcaggaagcgctggagaagatgcattgctgattccatttcacaaattcagcggcacttctatgccccagacggccatggaggcatctcctttgctttctccagaatctcctccccacgggccatttgctcaggtcgtacacagacaatgaggccacaccttcagagccatgtgtatgccagttccatgaagtcacctgccaggagcttcctaaggcgtgggctccttcaatggccctgaaagacgtctcacaggttcttgcccttgtaagagatgtgtgtatgtttttgtgcattcacgcacacacaaacacacatacttttcaacaaagcaaatattaagatagtcttcatgatcagagatatttttacaagtaaaattacattttatattcagcccattttatttttttccagagaagatttataagaataatgatataattaaaggtataattcactgcaatattctttgaggtttgcagagcaagagaaaggtggtgaggtgtggacgttgtaaacgggattttacatgatgagagccgcagaaagatgctggctagcctgtgaaagtctattaaaaataacatttaaagcacattgtaaacgttctagctcctttaatcctttacaaacgattccattacatgtaagtgtatctacccagggcatgtccgatgaccacatagctggactttcatggttcactggaaccaggggctggaagatgcaaaggagctttcctttggatccagcacctaaagtgtctgccgtttcccacactagtccataaggttttactttccacttcactcacagcttagaaaaaccatagtattagagattcaggggcagggattctgcacagactatggatttgattatacaaggaacaataagttactgtgaacaattccatttatgcctagttttccagcacacaatatggaggaatttaacctgtgagccatacagatggccaagcccagcaggtggaaacgtgagatgaggccgctgactggtgacctccatcagcagcttctccctcctgaaggtggcccaggcgtgggggtggctggggagccatgactgtgagtggccttagtcctgggaagctgagggcagagcaggagggagggggacaaaacctcccccacccccacctgacggcctaacctcccaggtgcaggtgcaaccaacgcacattggtttttctgtttttaggattttgtaaaccataacttcaacttttattttagattttagggggtacatgtgcaggctttttagctgggtgtattgtatgatgctgaggtttggggtacggttgatccaggtactgagcataggacccaatagttttcaacccttgcgcccctccctccctccccctctaatagtccccagcgtctattgctcccatctttatgccgacgagtatccggtgtttcattcccacttataagtgagaacacatggcatttggttttctgttcctgtgttagttcacttaggataatggcctccagctgcatccatgttgctgcaaaggacacgatttcgttcttttgatggctgcatagtattccatgtcaacatgcattttaaatcagaccaagtttgtgtagagtaagctcctcttttctttagctgtgcccatcccctgggtacaaatgccaccccatgtctcagccttctgtcccctctaacacctgggcctcccaaatgacccacctctgcccctcacatcattcttagcacctaacacagacatcaggagaagaataatctcttaaacaaaggctcagtggtacgtgagtaagtgaggctcctaccccctgagaggacttgagagtctaagataaacgttggcttccaagggaatccctgaccaatagaattgcaggaagtgtggccatgtggggtgaaggcaggctgtgcacatagagtgaccgaccacctcggccccaggcacagcctcctccgtcagttcctgtttttctagggcattcctctctttgtttttaaacttcagaatctacaacttttttttttttttttttttgagacggagtctcgctctgtcgcccaggctggaatgcagtggcacaatctcggctcactgcaagctctgcaccccaagttcacgccattctcctgcctcagcctcccgagtagctgggactacaggcgcctgccactgcgcccggctaattttttgtatttttagtagggacggggtttcaccatgttagccaggatggtctcaatctcctgacctcatgatctgcccgcctcggcctcccaaagtgctgggattacaggctcgagccaccgcgcccagcctacaactttttaaaaaagttatggccgggcatggtggctcacacctgtaagcctagcaatttgggaggccgaggcaggcagatcacctgaggtcaggagtttgagaccaccctggccaacatggcaagatcctgtctctactaaaaatccaaacattagccaggcatggtggtgcgtgcctgtaatcccagctacttgggagtctgaggcaggagaatcacttgaacccaggaggcagaggttgcagtgagccgagatcatgccattgcactccagcctgggcaacagagcaagactccttctcaaaaaaaacaaaaatagttatcagagtttgggtttgcttgtctatatacatcagctcacaaggcagtgggaacagaatctctaaccctttgttaatgttcactgcacacaaatgtacctctgaacggttactgtgcatggatgtggagctccctctccagatgggaacatgtacaacacagcccagggagttgacgcttcacgcctggtgagttggtcttatgcagagatcctggtggtattcgcataacaacaaactcacaaactcagtcaccactgtttgagcaaaagttctattaaaatatctgtaaagttgataagatgcataggacatgtgggatattgaaataatgagaaaattaatgtaaaggatggtaggaggaagaatgctatgacaattcgcggcactgtcttctaaacatccactgcgtccttaagcgtttggaaaggtcacttctctggtccttgagagtagatgattgcaactcgtaacacaagatgtttgctgagtctaggaaaggattcacgtgcatcctgaacaaggctcaaacaggcgagaaagggggacaacagccgtgtaattttgtgtcatatgagagaaagcatgaacttgatatgaatttgatctttcaagaaaaggtagacagaagtaattatttttaaaggaaagctgatattttcttatattgactaaaaagaaaacattaagctttcccgtgtgggagaaggagaatctcaaaataacagatgaggacgtgcttgggtttttaattatcattttttaaatttccaaaattcattgactgagtcggtctccctacatagaagtttctcaatgtttaaagtttctctgcaaccttcaaaggaggctcctggactaaggttttactccagctctctggcgtttggctgagtcttgttcttcgttctagcacccaactttctctacagcttattcatctgtcctggccccatgacgtagggttacttgtaaaatccaaacacatcctcaaagagtgagcactcttgatatgccagaaactattattggccctcgcagacttttccaaaatacattttaagtggactgtctcttctcctgatacgagaggtttaattagtgcacctcttctgatgggaagcttagctctgtctatcaacagtaggaaaaagagtgctcgagcagaactcaggcccagaaatctgacttctgaaactgaaattcattatctcacgggataatgcaatacatagatagagatgggaaaagggaatgtgttctctgtattggtttaaacaggtgggtagggcatcctaaaagtcttatgaaatgtgttacagccacgggaactcctaagcagccttgaaatggtaatataaatttaaatttattgacataaaaatccatatgtttattagtggaaaggcagattataaagggtttacctgtgggatcccatttacacacaaccatgtatttttatgattatgcatgcctgtgtgtacgttaattatacagaaggaatgaataaaaagatatcaatttaataaaaacaaacagtagttatctctttgtggatgaaatgttcactgattttcataccatccatacacttctccatgggatttgaatatcttacaagagcatgcataatgtttacaatgaaaacaagcggtattggaattaatatgcagatttctgagacatttttaaagacagtgaaatttctatgattatatagttttgggttaatttaaaaaaaagtatttgataatttcaatatgcaattgcctaattccgaacaatcaaaaaattatatttgaagacattgatccaggccaggcgcagtggctcatgcctataatcccaacactttgggaggctgaggcaagtggatcacctgaggtcaggaatttgagaccaaactggccaatatagtgaaaccccatctctattaaaaatacaaaaattaggccgggcgtggtgtctcacgcctgtaatcccagcactttgagaggccgaggcggcggatcatgaggtcaggagatcaagaccatcctggctaacatggtgaaaccccgtctctactaaaaatacaaaaaattagccaggcgtggtggcgggcacctgtagtcccagctacttgggaggccaaggcatgagaatcccttgaaccagggaggcggaggttgtagtgatccaggatcgtgccactgcactccagcctgggcaacagagtgatactctgtctcaaaaaaaaaaaaaaaaaaaagaaaaagaaagaaaaaaaataaagacattgatccattatcttgcaaaaagagcaaatttctacaaaacagaataagtgcactgttaaacagcttttttaacaaaaacaattggaataaattgcctttcaaaacattcttattggttcctgacttttaatgtgtaaaaaattttaaatttgctatggcacattttaaaaaacattttatttaatctaagttgagatgattttacatttaacagtaatgctcatcaatgtatgtcaacaactttcttgttttgaaaggctttataggactctcttaaattaggaatttcaatctgccgatatacatgtgttatggcagatgattaaatacaagaaagaaataagcaacatattttatttctgctgtgagaaatctctttctaatttagtttatgtgatatatcatgttgtgctttataatttttaatacatgatgcaaaagttttgaccgatccttgctccccaatctgaaatgccattcttaagaatagaacaaacaagaataaaccaacatacctgaggaaatgaaaacacatttttatttttcaagaatgtgagtaactttaataaagaaaatatttttctcaaaattatagttttgtttgctacaaccatggaagagtaagcagcacttgccaatgattctgttctactcagtcttcagccataacatgaggaacagaactgcctcttgtgcagtgcggacgtctcccggtgcctggacatgcacttttttatatttatttatttatttattttatttttttgagatggagtgtcgctctgtcacccaggctggagtgcaatggtgcaatctcggcttactgcaaccttcgcctcccgagttcaagtgattctcctgcctcagcctcccgagtagctgggattataggcacgcaccaccacgcccagctaatttttgtatatatatacatatattttttttttagtagaaacagggtttcatcatgttggccaggctagtcttgaactcctgacctcaggtgatccacccacctcggcctcccaaagtgccaggattgcaggtgtgagccaccacgcctggcctggacatgcacattcatttgtaactcacctgcattcttcactctggcagctacagtttaaataaagaagatgaaatttcatggctgaatttaggtttctggagaccacgtctccccttctagtagatggcattccagcagtcaggggacgtgtatgggaggaggagacgccatgcacttgttccatatgctctgttgcaggaagtcctcttagattcacgcctcttggtagaccagatgctggtctcggtgtcctcatcctattctggcacctaatacagggtcctataattatctccctgctagaatccaagctccttcataagaaggaacgtgattgttttgcatgtgccgttggtagtgcagttcctagaagacagaatggcatggcaagtggcctgcccagctagcacagtgtgcctttactgcggcccaggcgggaaaccacaccaggctttcggaggcagtccttatttcttttttttttttttttaattatactttaagttttagggtacatgtgcacaatgtgcaggttaattacatatgtatacatgtgccatgctggtgcgctgcacccactaactcgtcatctagcattaggtatatctcccaatgctatccctcccccctccccccaccccacaacagtccccagagtgtgatgttccccttcctgtgtccatgtgttctcattgttcaattcccacctatgagtgagaatatgcggtgtttggttttttgttcttgcgatagtttactgagaatgatgatttccaatttcatccatgtccctacaaaggacatgaactcatcattttttgtggctgcatagtattccatggtgtatatgtgccacattttcttaatccagtctatcattgttggacatttgggttggttccaagtctttgctattgtgaatagtgccgcaataaacatacgtgtgcatgtgtctttatagcagcatgatttatagtcctttgggtatatacccagtaatgggatggctgggtcaaatggtatttctagttctagatccctgaggaatcgccacactgacttccacaatggttgaactagtttccagtcccaccaacagtgtaaaagtgttcctatttctccacatcctctccagcacctgttgtttcctgactttttaatgattgccattctaactggtgtgagatgatatctatctcattgtggttttgatttgcatttctctgatggacagtgatggtgagcattttttcatgtgttttttggctgcataaatgtcttattttgcgaagtgtctgttcatgtcctttgcccactttttgatggggttgtttgtttttttcttgtaaatttgtttgagttcattgtagattctggatattagccctttgtcagatgagtaggttgcaaaaattttctcccattttgtgggttgcctgtttactctgatggtagtttcttttgctgtgcagaagctctttagtttaattagatcccatttgtcaattgtggcttttgttaccattgcttttggtgtttcagacatgaagtccttgcggtgcctatgttctgaatggtagtgcctaggttttcttctagagtttttatggttttaggtctaatgtttaagtctttaatccatcttgaattgatttttgtataaggtgtaaggaagcgatccagtttcagctttctacatatggctagccagttttctcagcaccatttattaaatagggaatcctttccccattgcttgtttttcgcaggtttgtcaaagatcagatagttgtagatatgtggcattatttctgagggctctgttctgttccattgatctatatctctgttttggtaccagtaccatgctgttttggtgactgtagccttgtagtatagtttgaagtcaggtagcgtgatgctttcagctttgttcttttggcttaggattgacttggtgatgcaggctcttttttggttccatatgaactttaaagtagttttttccaattctgtgaagaaagtcattggtagcttgatgaggatggcattgaatctataaattaccttgggcagtatggccattttcacgatattgattcttcccacccatgagcatggaatgttcttccatttgtttgtatcctcttctatttcattgagcagtggtttgtagttctccttgaagaggtccttcacgtcccttgtaaggtggattcctaggtattttattctctttgaagcaattgtgaatgggagttcactcatgatttggctctctgtttgtctgttattggtgtataagaatgcttgtgatttttgcacattgattttgtatcctgagactttgctgaagtttcttatcagcttaaggagattttgggctgagacgatggggttttctagatatacaatcatgtcatctgcaaacaaggacaatttgacttcctcttttcctgattgaataccctttatttccttttcctgcctaattgccctggccagaacttccaacactatgttgaataggagtggtgagagagggcatccctgtcttgtgccagttttcaaagggaatgcttccagtttatgccaattcagtataaacaagcctcacgaggatgtgtgatagattactgatttctttgaagacaagaaagaaaatctaaacagtaagaataatatggatttactaaaattgaagatttcatgattaaaaattaatagagaaagaacatacattgatttttaaaccatcaaagaaattgagctctgctaacaggctgggacgtgtccatgattgacttgctccctcctcttgagggcgagggaagggagagaaataatctctcatatctacatctctcagaaactgttacccagagctgagaaatgtgtttgcttgtcaagaagattctcagccttggtttgaagaatttaacagtttcctggatatcagacctgatcttgtcggtgaggagcggaagaatttaaattcctcgctccttggtaacatattaactctttcaaaccacaaaggcatctgtatgctggaatatgcagtttctgaaaggactgctaagggacagaaagaacaaattggctgctctgagatgaaccattttctctcctttgctcattattctgtttcccagcagagtcacagactggaggaacataaaaagtgagagctagggtgtttggttttctgttcctgtgttagtttgctgagaatgatggttcccagcttcatccatgtccttgcaaaggacatgaactcattctcttttatggctgcatagtattccatggtgtatatgtaccacattttctttatccagtctatcactgatgaacatttgggttggtttcaagtctttgatattgtaaatagtgctgcagtaaacatatgtgtgcatgtgtctttatagtagaacgttttcttaagagacccgagagaggaccagggttaaaggccaagcccggcaggcccaggtccacagagtgggaggacagactgaaagacagcgcattcctctttttctggccatcttagcacattctctggccctttggtcactcattgatgatggcatgctgtcaccaccacatggcatgattatggctttttccatagagtacaagacccagcctccttttccactgatttctctcttcatccgtccactctgcctttcttcctctcttttgttcattcgttcatgtatacatttctatattctatcaacaaacatacttcagaacatgtgtcatactttgggacagaatggtcaatgagacaggaaatttcttgccctgctcaggtaagaaattagtagcttacacagtgtattagcctgttctcatgctgctaataaagacatacctgagactaagtaatttataaaggaaagaggtttaatggactcacagttccacatggctgggaggcctcacaatcatggtggaaggcaaaggaagagcaaagtcatgtcttacatggcagcaggaaagagagagagtgtgcagggaaaatcccctttataaaaccatcaggtctcctgagacttattcactatcatgagaacagcacaaggaagacccacctccatgattcaattaccctccaccaggcccctcccatgacacgtgggaattatgagaactacaattcaagatgagatttgggtggggacacagccaaaccatatcacacagatagcttgattattaattagaataaactcagaaattctgcaccagtgagggagcagggagctggaaaggtgcagagaagggaactgaatttggtggagtggattagatagaaatagccaggaccaaaggcagccagaatggaatgtggggagacttgaaagcaagaaggcagatggtacctttgaagaggtgcaagagtttcacctgggtaggcagctacctgtgatgaagagaaagtgagataggaggtgggtggtgccctcctttgcaatacatgttaaggagtttggactgttagccacagacgaggaaagagatacatcttagttcctttgggttataacaaaataccacaaactgggtagcttaaaaaacaacgttcatttctggactctggaagtccaggatcaaagtgctggcaaatctgttgtctgtctggtaagcgcccatttcctggcttgcagacagtcacttcctcactgtgtcctcatgtggtagagagagagctctggtctctctttctcttcttaccagggcactaattccatctaaaggctccatcttcatgacctcatcatccaatgcctctcctccaagagccatcacactgtggttagggcatcaacataaatgaatttggggaggacacagacattctgttaatagcagcatgtatgattttcagcaagggacatacatagtcacatttgttttctaataataatgatccagcttctatctgtaaaagtggatttcagggagccagactggaggaataagatctcttaggagatttacaatagtaggaacaaagtttggaggcatcttcgtggcatggtagcaatgaggatagagaagccatctggtggtagggagatgtaagaaacaatgaacctgatgtggaagccaggagggaggtgagactcccaggggtgccagcatgagagctgaagccatggacacacaatgtactgggctgggtgcactcgagggcaaatggattttcggggagagatagtgagtttagttttggaaacgttgaattgtgtttgatcaccacaccaccatcaggagactttcagctgtttggaacaagggactagaagaggtgaaaatggctgggggatcaagtggcagtttctaaagagaatcaacattctcttccaccatacgtagatgaacactgtgctgttaagtttaaagaaattattcccgtgtccttttttttctcttaaagcatctgctttatttgtacaattagggcatgtggtgtgtccctaagcacccgggcatagtggagagtcaggaaaagtagcctggggaaggagggcacatgacctcactgcaaacatttccctttcatgtgagggtgggtaccacctttagacggggacatgttggccactgaatcagatcagcaccaagggaccattcagaaagcagcaagtgtgttgtgatttggagacaaactggaaaaaaaattaatcagctatttatccccttttaaaattaagcatgttaaagataagaataaaaatattttgccttcatatcagcttcccaagaaaaggtgtgctatgctgttttgtgtttttatgcttttgagtttacactgggtgagtatgaggaaattaactgctgtgggattaatctccacaaatagcagtaacttaaaaataacaacataagagattagcatgcttgagaagcatgagggggagtgactttgattgttttcactgaatttactgtcctttcttgctaagttcactgttttgtgatgtgccttgttccgtgtgtccctaatttgcaaatgttgggagaagttgcgcttgattgacactaactgtatgtaggaggagcagtctcttggtttttgtgcctgtatagatcatcgctttacactgccgtcctgtgatcttcctaaacttttaaaagtatatttggagataagcacaaggtgggtaatgctggcatgcgagcctttgccctaaacattcaaaaagcgccgtctcttaacgtgtgtcttcgtcccccccaaagaagacggtgtgtacaggaggaacataaggagagaagcatacctctcctccttgttatgacatctttcaaaacttagcaattgtcagtgaatatgaaaagagacaactccagcaaagaagaggggctggagtttttaaggacaggacaggggactgcttttaaggctgacttaccaagacacccaataaatttccaacaggccaccgtgagcatttctgattccatagatgccttgaaaggacttaattttttagttcatatatttctgtagacttagtctattcatatcacatagattctttctctctctttgtctctctctgtctttcttaaattttacttttaagttctgggatacttgtgcagaacatgcaggtttgttacataggtatatatgtgccatggtggtttgctgcacttaccaacccatcatctaggttttaagccccgcatgcattggatatttgttctaacgctctccctccccttgcccccaccccccgacaggccccagtgtgtgatgttcccctctctgtgtccatgtgttctcattgttcaactcccacttatgagtgagaacatgtggtgtttggttttctgttcctgtgttagtttgctgtgatggtttccagcttcatccatatccctgcaaaggacatgaactcattctcttttatggctgcatagtattccatagtctatatgtaccacattttctttatccagtctatcactgatgaacatccaggttggttccaagtctttgatattgtaaatagtgctgcaataaacgtatgtgtgcatgtgtctttatagtagaacgatttcttaagagaccctcaagctctgcccaaaatgatgaactctcggctgggcgcagtggctcatgcctgtaatcccagcactttgggaggtcaaggtgggcagatcatgagatcaggagatcgagaccatcctggccaatgtggtgaaacccccatctctactagaaatacaaaaattagctgggcgtggtggcacctgctgtaatcccagctactccggaggctgaggtgggagaatcacttgaaccagcgagttggaggttgcagtgagccaagatcgcaccactgcacttcagcctggcaacagagtgagactccatctcaaaaaaaaaaaaaaaaaaaaaaggatgaactctcttgcatgtccccttccagaattagagaccatgtacctcctgcagagaacgtggtgtctgagagagtagtctctgtgcagcacagagtgaggttacatgaccgagttctcacttgggaaaaccgagttcccacttgggaagagctgtcagaagcaccaaaacctcacggttacgtctcacaatcactgctcttgcaagtcctccccagtggcccgttttccatgggacagcttgtcatgaatatattgtgtccatggccccacctcacccccacattacaggctaaagtctgctattagccaagctactaacctctcatttagttactaatgtgctttgtcatctctgtaaccatatgtccaaaggctaatggtgggcatcacatttatcaatctaatcagtaagtaaataaactctccatgcagcccctttcaccaataaaatgacattttaaaattgcaaaagcaattttaaaaagagaaggtgacatctgcactggaaattatgaatatgcttgtgttgcctttttctaaactaggagccacaagcataattttgccataactgttgtatcataggctgtttgatttatgcgcatctgtgcactaagtggtgtttcctccaagtcccctaagtaatgtgcatcctaatgtggatggattgaccccttcctgtcttttcctccgagctgcacgaggtgagctctgtgtacctggtgggctccttgctttggttactacagctttttatacttagggaaaggagaaccagagtagctttccccagggacagctgctgctgttgaagaccatcccgtctctacttccataaggtatcgcaacacagatttccctctctttcagctttaaaaactatttaggggtcatgcatttttcctttaaatattgactgctcctttttagaattgttaatgtggaaatttctaactggatttataaacacactcatgaaaggagctttaaagatttttttcttgcctgggtttcttgttgaaatttcaagaataaaattgtttatgacaaataaaattgtcataaactaagcaaacaagagcacacaaagaaaaaagctaatattattcccctcattttatccaaaggttcatgttcacttgtatccactcacaaaagcatctatgttgacacaaagcatttccttcctgcgaattccgtggttgtactatgaagttctcatcatcaacctgttcttactccattatgtatacagacgcctctctgggtcaaaatgacctgccctatctcactttttttaaaatagcagcagagtatcccatggtgcattttagcctgaattgactccaccattcctctgccatcaacatgaatgtgggttcccaggcttttccactcgagaccactgctgcagacgtgtttgtgcacacacacctggacacctgcgcctttatttctgtaggagggatgcctgtgtattggatcattggatccaggggaataccattcagagttttcatcagtaatgccagatttctgcagacaatgttatagcaattggttatgttaccaccagcggtggatgtgatcaatctttggagttttggccagtgttctcggtggaactcttctgttatattaatatgcatttttccagctgctaaggaggctgggcattacctcagctcctcgtgctgctacctctgtgacttgccgtccctattcggaaccccttttatactgagttgtctttctcttttcaaatttaaggctatcttaatatttgggggatatagattatttttctgtcctataatgcaaatgttttctctcaatctaccattagattgctgataatatttatgaatacctatggtgccttttcccacgtagaaaattaaaatttatgtagtcaaatctggtcagttctgtggcctgtttcttatgttccttaagtttacaattctttaaagaagttaattttttttttttttttgagatggagtctcgctctgtcgcccaggcaggagtacagtggcccaatctcggctcactgcaagctccgcctcccgggttcacgccattctcctgcctcagcctcccgagtagctgggactacaggcgcccgccaccacacctggctaattttttgtatttttagtagagatggggtttcaccgtgttagccaggatggtctcgatctcctgaccttgtgatccgcccacctcagtctcccaaagtgctgggattacaggcgtgagccaccgcgcccggcctaaataagttaattcttgactcaatatgcaattggtgtttgtggctgcggtcacttgtccagctggctgtgttctctcctgtgtgggctccagcctgacaggcactctggggggacagctgccttccactctagggcagtgccttctttatcacacactttctgccatttggaactttttctaagctcttcattcttttcaatcaaactgttttttcccatttctatgtcaataccatactggtttcatagcattagctttatagtaagccctcaatatccagaagagcatgatatttgcctaattgttcagcagttatcatatctttatttttccaagtgatcttcaaattttgaagatccccaaattaacctatctggagacagactagagacacgtgaaactgtgcttgtggatgtaacttcttcccgaccaccttctcctccaggcatctgctgcatcaccacattcattaaggtcttgctctgggtttgtggattagcgtctgtcttctcagtgaacgaggttttctttaccatttctgtgtcaatgtggcgactgataatagaaagaaaagccattaattttggtatgttttttgtctccaaccactgtattcagttttctactaattttaatattccttggaagagtctctcttctgtttccttggcatgaaatcatttcatctgcaaacaaagcatcttcccttttaatatttatgcaaataatgttgggcaattatctcactatgttaactggagcctcctaaataatgttggctagaagggatgatgaaggacatctctttttcctgatctcaatgcagtgttattaacatttctccatttaatatgacctatgctgttgaattatggtgggaatttatgtacactctttatttgaaatgggtatagaatgtttcctattgtttttccatttatttcctttaatttgtaggtataataaccattataaattttaattaaatacaaatgtgtatttatgtagttaacatatattagactatgtttttacatagaataatccccattgccaccaactctacctttcaccagtgaatgtatgaatcatgcctctcttgattcttgtgcatcccataaagttaggcactgtagataatactcttctcatttagaagttcaagcttaaggctgggtgtagtggctcatgcctgtaatcctagcaatttgggaggctgagccaggtggatcacttgaggtcaggagttcaagaccaacctggctaacatggtgaaatgccatccatctctatgaaaaatacaaaaaattagccaggcgtggtgttgggtgcctgtaatcccagctattcgggaggctgaggcaggagaatcacttgagaatgggaggtggagattgcactgagccaaatacactactgcactccagcctgggcaacaaagagagactctgatgcccaaaaaaataaaaagaagttcaaggtttagaagcgatctcagagctggtgacctttctggtttgcatcactatctttcttaacgtcaggaaaggacagttgttgtttttcataattagcattgttatgatactttccaatttaaagtaatttcacatacattatttcattcaatgatcacagcaaatctgttaggtagcattattaatacatttattttagagagactaagataggatcagtgacttaatttcaggcagctaggaaatggcaaactgaattcaaaccctattctttgactcagaagtccctaatcttctgattacattattcggcaaggaggtggtggtgtgtggatgcagggaaatgtgattctgggaggagccttcccatcagagtcacaaatgtgagcctttgtgcctccttcctcatctttgctcagtggtccagcagctcagtggagcactgcatgagagctgcggagctcagtccagacacagacgtgcacatgctgcgtggttcatttacataacactcaggacggagagaaacgaagggatgctagtgcaagtcagaagagcagctgcttaccgggaggggtgtaggggaacattctggagttctgacaaggctctatttggtagcaggatctctagattgagatggcggtgtgggtttatgcacctagggagctttgtagagttacaaaattaacattaggtcaccttatatccttgacaacatggatgctctttcaaggccaaaacaggttttaagagagccttttgtttgtatttaaataaaaagtgttgtctttaccgaggaggctctttggctagttgtgagagctgcttcagtgtgtgtgcataattgcacacgtgtacctgcagcgaagtctaattctaaaacacatatggggtggaggctgggaggagggagaagatgaagaaaaataactaatgggtactagggcttaatacctgggtgatgaaataatttgtacaacaaaccccatggcccaagtttacctgcgtaaaaacctgcacatatgcccctgaacttaaaataaaagtttaaaaaatgcatgtagaatttaaaggtgggttgactagtttggttactactataaggcaattcagctctttagaaatgcataaacccagagaattgagtaggctagaaaagccctggaggcttccgttatgaagaaagagaattgctgggctaaaatacatggacacatctgtgatccgtgtgaaatggagcagcagtgtatgctggttataaatcctctgaaactcaaggaatgaaaattttggtactcaaaaattagtgttcatctgggtggtccatgctctaagaaatcttcatacacaaacaggaactggtgataaaatgtgcggatggagccttggcacttggggcacttctgtggcagcaggcccagcccttgcctcccagatgaccatgcccagtagaggagaaggccagttttggaaaggagctcatcagagcgagagtcctgcagcagacttccatttttccttccttgtctcagttgaggttacaaacccctctctggattggttcctctgatcagaacacttgtgttgactgcctcaggctcgccaatccctacccaccctatggcaaggggctgaggttatcttgataagcacaacatggtcatgaccctcttctttctgggccccagaccccatggctatgaaacagcaggggtggtggtgaacacatggcggatttccaatgcttacttcaaggggcattttttaaattatagaagcattctttacagttggagctatgggattgctttaatttggaacaattctagtgcaaacattaaaatgcatttcctatgataatgaggatcattgtttattgagcatggacatcccatctctaaatctcaaaataatcccctaaaaaggcagtcgtgggcttagagcagcttgaccagaaagacatgtaagcaacttccctcccaggtaaacacagggaccctgaagctggtggaacagttggagatctgggaaagggaagagagctcttatcccgcccctactctcccctttccaaatgcaaggcctggagcctgggttagccatggcccacgaggggaatgttgtgtccaccatgatctgggtgataatgagaatgaaacagtgtgctccacaggaaaatgctgtgaagctacacagaagccgtctgttcttacttttgattcttgcattgcggcattgttgctagaatgactacatctcttggtgtgtttgaaaagttaatggaaatacagttcttcaatggacttactttatactatttaaagttatttaggttgatgatattaatggttttaagcattttcattctctactctttcctttcattttttttcctatggtcttctgcaacacaaaagggtaccataaaagaatgccattgcactatactcataatgattcttttccaaaattacaatattttgtattatttctaattactccctaatttgccttttttattgagcttgggtattcaaggaccatgtcttcatacacctgagtgtgtaggttttcatgccccactcacgcattcaacaaatatttattaaggttgatgtgcctaacacctaaccacagcaatacacaggtgagcagaatgtacctgtttcctgctttgtggagcttacagtttagtaaaggatacatacgggagtcaaatcatcatattgtacattttttctagaaataatctccagaaattattcattgatgtgtagcattgttaaaggttttaagtagaatcagaaatagatcttcaatagctcatctttgtggcataataaaacttggatccagatgtgggaaggcaagacaggaggctgtggcaagtagacccccactcactaaggcctggaccaccccagcagtgagggagactggcaggtgtgtgtgagacaccaaggtgtcgaactgcccctgggtagtttagtaaaagggcagaagagacaggaaggtaaagagaaaagcaggatgagaggccctgagatttttatgtgatattttagacttccttctgtgtttctctaatggttatacattgcttattcagttaagaaaacctcaactaactatggataaaggtttgcctttaatgtttaagttctatggaaagtcactcacaaggtaagtggtaaattgtatttgttgaaaaaaatacgggatgatgtgatgtgaaaccgtggctgggagaggccagcaccgacctgagtcggggaggcttctaggcagccccacctgtgccacaggtggacatgtctgtgcctcagcaaagtgtctggccatacttcaaacaacttcagcctttgtgtcgggaccaccccttgttctccagaaaagtcaacctctttacatctgtctctgcatttataatggaaatagtatcctggtattcttacctcacatggtcttaagaaagaatcaatgagatatagcagataatcaaagctactaaaattctaaaaatatgcaaatataaagaataactgggccaggcagggtggctcacacctgtaatcccagcactttgggaggccgaggcaggtgcattacctgaggtcagaagttcgagaccagcctgggcaacatggtgaaaccccatctctactaaaaataccaaaatcagccaggtgtggtggcacgtgcctgtaatcccagctactcaggaggctgaggaaggagaatcactttagcccaggaggcagaggttgcagtgagctgaggttgcaccattgcactccagcctgggcaacagagcgagactccatctaaaaaaaaaagaaaaagaatagcttgtttttattgtaatattcgcctatccctaattggcttatgtggttgtattttcaaattgtgtgtaagacacacatcatatccacatgtgaattcttcagggccctcttcaggccaaagaaactgaggaagaaaatgcagaacccaaaagcgagtgggtggctgggagtcctccaagggcattttgcagtcttaggaaaagtctctgtattgttgcctacatctgcggtaacattggccatacactctgtggtttcaacatcacagatgattggcttacagctttggaggtcagtatctgaagtgggtctgcagggctgtgttcctggaggctccaagagaggctgttccctgtacttcccagtgtccagcggcagccgctttccagggctcagggccccgccacatgctaatgtctgctttcaccatcacgtctacttctctgaccctcttgccttcctctttcccttacagagacccttgtgaggactgacactgggccctccactatccaagatcatcttcctgtattagtctgttcttgcactgagataatgaaatacccgagactaagtaatttataaagaaaagagggttaattggctcacagttccacaggctgtacaggaagcatggctgaagaggcctcaggaaacttacagtcatggcgggaggcaaaggggaattaggcacatcttgtaaggccagagcaggaggaagagagaaaagggagagttgccacacacttttaaacaaccaggtcttgcgagaactcagtgtcgtgagaacagcaaggggaaaatgggccccatgatccaattgcctcccagcaggcccctcctccaacacttggcatgacaattgaacatgagatttgggcgggacacagatccaaaccatagcacttcccatctgcggactttaacttaatgacacttgcagagtctcctgtgtcatgtaagatactcacatactttatccccaggttctagggattcgctttagggatttcttttctggaaagaagagcattattccgcctcccacaggctctaagatgctgaaacagccccaaacaaatcaaattctttaaatcctaggattacagaaaaacagggtaacccaacatagcctgagccttcagagtttcatccggcagtgatgctgtgcccaaagaaatgggtcagatgatcccccactgtgccagaatgttggggaggaaacacaaggtcaggcgagccagcgtgccctgaaaacccctcaatctcctggcttctctcagtttgcattcattccctcaccctgtgtgactgcccccaagctctctctcctactgtccctgtctgcgcctccccatagaaatccctgtgtggatccagttctgtcttctactcattggtctctctctctctctctctcacacacacacacacacacacacacacacacacacattcctatcctccctcccagttccacaattctgtacaaaacaccaggaaccagcctggcagagacagaaccctccactgatgcggaaggacagtaagttgtatggccaacccagcgttctctgtgacagagaagcgaagaggaacaactttaaactcttacacattggtaaattttgcccatggcccaagactatacaacaatgtccaagtaatggctgttagctttaaatcgtctattttgtttggaggacttgagttctttaagaacttggaccctgtacatgaattactttgtatatgatagcgtgttacacatgtgttatgtgcctacgccggccattacagggaggaaggtgggctttttcctaccccttcgtgtagtctaatgccagacacaggcagacattctgtgatgatggtggctctgatgccctgggtgcttccgtgttccagccactgctctgagcacctcgtatccatcagtgcattccacctgcagagtccccatgagagtccccaggagagaggggctgcagtgttcccatgacagatgagtaaaccgaggtacagaaaggtcaaatacatcgtccaagatggcacatacaggaagaagtagcactcagactccaagccagacagtctggagccggtgcccacactcttaaagtgagtgggagatacaggcagttgactgcacggcattgctagtcacattggatagtgtgggatctcaccagtgccataatcaggtccacgtgcacatcatcgccagatgacggtgccgccctgctgacagacgcacagtttaacaagagcgtaggaagacctcaccttccctggtcaggggtgcggggagcagcagtgcttccctgccatcggggccggcatcagccaagcaaccctttccttcccgggtggtctcatgtggcagaaacaatcattgatagagcaagaagggactgagatcacaggcgaccgcagccccctcctgggctccagtagcaaagtgggaggacgaagactgcattcataatagagaattcctgaaagcttgaaaaaacgcggtggctcacacctgtaatcctagcactttgggaggccgaggtgggcggatcacgaggtcagcagttcgaaaccagcctgaccaacaaggtgaaaccccgtctctaccaaaaatacaaaaattagctgggtatggtggtgcgcacctgtaatcccagctactcaggaggctgaggcgggagaattgcttgaacccggaaggcggaggttgcagtgagccaagatcacgccactgcactccagcctgggtgacagagcgaaacaaactccatctcaaaaaacaaaaagcaacaaagaaagaggttgagggcggtggctcatgcctgtaatcccagcaccttgggtggcctaggcgggcggatcacgatgtcaggagtccaagaccagcctggccaacatagtgaaaccccgtctctactaaaaatacaaagttagctgggcatgatggtggacacctgtaatcccagctactcgggaggctgaggcaggagaattgcttgaacccggacccgggaggtggagtttgcagtgagccgagaccgcgccgttgcactccagcctgggctgcaaattagaaaatgttttcctcgccaatatgattgaaggagagcgagtttaaaagacttacaagcacaattatttttaacatggaatcatgtttaaaagagttgcactataaaatgaaaatccggcagttcgatccacgggctggggggcacctccttgacttccgccgagcaagggtctgtgggcgctggttcctccgcgccggcctcccggtgaccgccatcgccacctggtggccgtgggtctaacacacaggttcactggaaatggacttcgggggagtctgcaggattcctgagattaaaacacccaccacacagtgcgcactcaatggggacagctggtaggaatcttcggtggtcgctatgagcgaggtattgcacggttcagagatgaggataatacacacacacgtgtgtgcaatgcgcacattcgtatccacagtgcggagtggggagcatgggatcatctttcgtaatttacaaactgctttataggaacaagtaataccttaagagttaccttaattataaatttttagcttctcttgtttgagtttcaccaacagcttgatttttgtaagagcatgactccccttagcttcacatccatccctcacagtgtaccagcgtacagagccggccttcagggcacaataatttaggtttaaaagagtgagatggagaacaagccctgtactgactttacaatgatttttaaaaataaaaataaataaaaaaggccttaataggaagcttaatgtagtggaaagaagagacaagcagagaggtaagtactatttttgaaacaggttaagttatagtcatcacattatgcattttacaagcagcacgtgacttatgagaaaacagaggcccaggcagatgacgttcatccccagctttaaggtgtacatggctggcttgtgatttaccctaagctgagcttgcaagggcagcgaccactccctcccagggctgtgaatgtagacgcaaaggaaccagtgtccattcctcatagaaaactcagctgattgagctaatttgacgattaacactatcatattgtagtgaggcatgccggcgatctagactaaaactctgttaccatggggggcaaagaacggcatcctaacccagattttgtaacgagctgggcaaatctcctaaggttgatctccatttccctcatttgtgaatgttaggtgttttcagtcatctaagtctcctttattctcttaaacaggcacacaccctcactcgcacacatacatatttcttttctctgtcatatttccgcaaaccaaatttccttgtaagtgacgtaagatagctatgattaaaaaaaaatactttcactttacagttagtatgtttaaaaggtaatgtatgttagtttggacatttgaaataatttataattagaaagagaatgcatacatacagttttgtatacttgagtatttctaacactatgaaattaatattattgtgtcttgtattaatgcgaatcatgatgttaactcttgtcactagcaagggaagaataagtaaggaactgaggttaaacctgggctgagctgcactcagggatgtaccctgaaatgcacagcatgcttctcctactccaggttttaagatgaattttttcttacggaaaatggaaaatggaaatatgatcatttaattctgaaaacttgttttagaattcaaatacttaattcagtagtctgcattgagataaatttttaatatattcattacacaaaaactgaattttattttcccttaattacttttgggtaatgactcccaaataagatgagatatttatgagtttttaccttagactacatttttcatagattactatttatttactgtaagcatgaattcttaagtgcctatttatgtaggtaaaagcactctgtaatttttaaagcaatatattattacaagtgttatttattcctagcaaattgcctaacaggttgtcctctcaccatttttctaattttttttggccaggtcaaacatgttttcacacctttgaaaaatgtacgtgaaaatgtcctgttagcgtgaagctgtgattcagaggtagcgtaaggtttcagtgtaaatgcaaacccaaccagtagctagagatattctgtatcttcaaatgtttgtcttaaccacatggttgaatatttaacctaatgaatatggtggcaggaaaactggaagcaaccatgcgccctggcgcacgctgtcatttatacagagagctcttaattccgtcactgttctcctaggagatggcgccttattctatttacctctcattatgaaaatgtcagtgttccaaccttgataaaactattgttgagaaagtagaatgtacttgatgttttcttgtggtagtttagtctgggagggaggaagtggtatttgatggataattgttaaatttagatttttaaaattccttttgtcataataattcaagtttcactgaaaaaaaatccaagcaaaatgactggaattatttaatattgattggtagtatccaaggcactatccttaacagaatttgttttgttgtcgattttaaaatttgaggaattttcaaatattttgacaagcacaaggcataaccacatttataacccttctatgtttgtaacaggcatccttgtaattgattttatggctatgggatatctgagtagagtttctctgggaatttctggaatcactgattttgatatctcaaccttagttatagccacataatattattggagaaatcattaatatcagtgtttatgcaccaattattttgcttaagttatcttcaattaggacttcaagtagaataggattatctcagttgttttattgattaatatacttcaacttatgcttgaaaaattttaagcaattcttcatattaaatatctaagatggtttggagcacaccgcctggaggagcctgtcagtttcccaccttcatttgattccatcctattgtcttaactctccacttggcctttgtttgacatagatgttcaaaaattattattgaatattattgaatataaaatattatatataaaaatataaataatattcaataatataaaaatgttattgaatataaatatagaataaaaccctgacaactagcaaatatatccattatatagtgtgggcatgtgagtatatgtgtgtttttgtacatatataatataatattttgtcattctatcaactttacaccccaaacataagcataagaatcatgacatgcattaaaaaaatgagaagcatttgaagattttcactttccatgttccgcctattaccgactctggctctgtctcattattttgggggttgtctccagtttcttcctctctcagcagcttcctcattgctatctagtggagacgcagctcttatttctagtatgtttcctaatttttgttagtttttattgtgatgatcctaccccagtcatggttttcttattccgttaagttaatataattaatgaacgtattatgctgtttagaatataaggattagggaaacatttgcattctaaagggagtccctgtcacgtgttgttcatgggtctcacaacatggattgtgttctgcccaataccagagtgagggctgcgtcttggcacagatgctttttgtatccaggcttccttgggagtgacacacgtcttccatcatagaccctacacggcggtccgcctgctgatccaacgatgcccactgaagtcccggtgattctgcagagaccctcaggatccctgagggtggagacgtccaggacaacatgcagacggagtccacagattccttccttctctactgcaacacattttctctggtttatttttcacaaatccttactactgcattttattcaacaaaaatcttattttgaagtcatgagaagatcccacctgtattttttaagataactgctgtatttatcttggattagaagtgaaagacatcaatgacgggaaaacaaaattgtttccgtggctctggcaagagaccctgagggcttactgaaggcaggggcagagggaacgcaagggtgggcagctgtgggtgctctgcagggggagaggtccaggagctgctgccatgtggaaacccacccaaaacccagtggcctccagaaaccacttgagcttctttctcatagctctcccactgccctcactgggtaggtccactcacagttttcatgtggttggtgacaaatgccagatgtgtctggagtcttctgacaactgctgggctgatgcccaggatggctccagtgctcaggtctggcccccgggccttgaagtggagccaggtgagggttggctgcacctccctcactccctgcacagcctctccacgtgggtgtcttggcttcctccaagcctggtggtcctaaggtggtcaatggtcttacatggcctggctttcccgggggcggatcttccaagagacctatatggaatctgagaggcatcttctaacccagtcctgcaagtcagatggcatcaattgcactgcattgcgttgatcaaaagagagtcataggacgggcagagattctggagaaggcatggcagaaggccgtgcatatcacaaggcatggctcactggggacccactctggagacaagttccatgatgtgtagataagctaaatgtggaaggtggaaggaggtttgtttgctcatgattccaaggtttgctagcctgagaattcaagtcatcactgtgattgagatctcctgggagcaagggcagagaatggagaagagaggcaagaatgcaggttgggaagaacatctgtatttgacgactcagcatggtgctcagtgaagggagtgaaatacagacattttcttcaagaacgtaacatggaatcaggaggcttctttgtcacaggagacccgtgagcttccagaaggcaaacaaggacaaaggcatctcctccgcagcattccagtccctggatggccttttcttcctcgtggttttgtgcctagccctcagcatgggcctcatgaggacagaacgtgttcattgaacatcgagtggaaccatggtcattcgggaatcaggaatgttgaggctcgtcctgttttcgtcgactggacgtggtgcatcctacttctcagcctcagcttcctcaactgcacagcaggctcgtcctgttttcgtcgactggacgtggtgcatcctacttctcagcctcagcttcctcaactgcacagcaggctcgtcctgttttcatcgactggacgtggtgcatcctacttctcagcctcagcttcctcaactgcacagcaggctcgtcctgttttcgtcgactggacgtggtgcatcctacttctcagcctcagcttcctcaactgcacagcacagctctcccgctgtccccaccccgacactcccgcgggggccttgccttggcagcgccctcctagtctagatgccgcacaagaccgagccacagaaaggcaggggcatctcactcaccagtttattcagcatgtcacccaggccctggcacgtgctagacacaccacaaacatttggcaaagtaaatgcctttgacctttttagtttaagtttacacatttggcaaaagttgcattctgttcattgtcacttcgctttctaatgtttctttttctataaatagagtcaatacggaagcacgagaaccttcctatgcctgtcactgtctcatggatttataaaaacgtgagagaacccttaatccctgttgaaatttttattgtgggggttctataaattcatttattcaaaagcgaatctatttaacacctactatgtgctctctgtattaggtgctggagatatagcaggggacaaactggtaaaaacactggccttgtggcacttacatctggtagaggcactcacatgatagcattcgaaatgaacacactttactgtattttacaaagatttcaatgcaagggaggaaactaaagcagatggagagtgatcaacagatcacctgtcaggaggagcagggaaaagtgttaacagccgggtggtgagggactcactgtggggaagaggaagcaccgtggctgcatggggatgtgcgtgccaggcagaggggagatccagggtaaagccctgaacgctctgctgtgtatgacgaacagaaaacagtctgtgagatgctacggaggtaggacttttggacctggaatagtgggtggatcttctgattgaacaacacacagcaaggggctgggcttccaggcaggcaggacactgagtgaaaatcactgtgatttatgcacgtgatgacggaaacctgaaaagcccagactgaagcagcagttgagctgcatttcaaagatctcttcgactccttgcgttgtttatgaagatcctgggtctggccacctgtagcattgactcattggccaactcttgattcattcatccactcatccattcatttgtttgacaatcattattgggtacctcttatatttcagaatgggtatatcacagtaaactaaaatcatggctcctgcttttaaaaaagtattatctcctgagagaagcagatattaaacacctgaaaagtcaataactatctaattacaaagtgtggcaaatatcatgaaggaaaggaaggtgttcatgacagagctgcaggaagcctatcttaaactgggcgattataaggggactctctgaggaggttgctttttatctaaagccagaaggtaggaaagacaaaaatgttcaaggtctttcatttgtcaacataggacggactccccagaacaaacgaacagaaagacacagacttcatggtaaccttgggacttgtttttcctacacgagggagctaagagggtgctataagtaaaatacttgcactgaaaatcaaaatgctggttttctatttctagtctataccaggaaatagcaccacattttgaaggtcagatgatcatttgcctacttacaatccactgcatgactgggcgtattactctgagctccagctcccttcttatgctgggatctgacacataaaacctctgagtctattttcctatctgtataatggaggcagtaatgttttcataactattttcctatctgtgtaatggaggcagtaatgttttcataactattttcctatctgtgtaatggaggcagtaatgttttcataactattttcctatctgtgtaatggaggcagtaatgttttcataactgttttcctatctgtgtaatggaggcagtaatgttttcataactattttcctatctgtgtaatggaggcagtaatgttttcataactattttcctatctgtgtaatggaggcagtaatattttcataactattttcctatctgtgtaatggaggcagtaatgttttcataacttttttcctatctgtgtaatggaggcggtaatgttttcataactttttgaaggttaaatgaaacaatgactttgaactcacccgaggcagcagctggcagttaaaacagatctttgagcaagttttccacttaaaagtggcccagttttcagcagcacatacaacagaacaatgaggagagtgagatggaccaggctggggaagcctgcgggccccaccttacatttccacgtggaaatccctgcatgcagtggtaaagtgggagcacgtaggagtcttcccagaaagcccctccaggtgcaggagtgacctggctggctggtggagctgttggacggagcgcgtgcctgtcgcttcattctccctctgtgttgtggaggagccctgctacggcagctttgtttttgcacctggatcatacagcaggcttagtgggcaggtttttcccccacatggaagttttgcagcttggaggaccaaagtttaatttttaggatgcttgtttatcaggaatcccaagtcactctccaattctgttctatcaaacataaagcaatagttggttttcatccatctgtttcacttttacttttcattagttcccaactcaggaggtgggagacaaggttattaggaatctgcttcttctcccagccaggagacagtgaagctggcagggcccccgtggtcatcagcaccctccttatgctcctcgtcgtggccacagcagcacccagtggctgagcacttgctgccttccaagcactgtatcaggcagtttacctccattgtctcatgattatgaagccagctctgcagaggagatcagcattacaggcatttgcagatgatgaaacctaacccaagcaccactgtgcgactcgcgggaggctgcatggttcagagctgatattggagccatggtattaaggttcataatgaattcgttttcctcaacacagactggagaggccatgcagtggtcagcagagtggccaatgctttcttagttctgagagtgctcctggtgttagttcttctcctaatgagcatcctcagtgtggtccggggtcatcagcgtcagtgttgcctgagtgctgataaaaacacagaagccaggcctttccccagaaactgcattgtatcaagactccagggcatcagataacacagctgtaatggggattgcctgggaccaggtcaccacgtggctacagtctcaatgccccaccacacactgcatcgtgtgcatgagctctttgcagaaggaagtcagtacaattgtgttaactctttttctttgaatttatagttttaggcaaatgattaaggaaacatttttaaagtgtttcaaacgtacaatactttcctttgaccagtaaattgtggggtgatacatttaagcactgctttttataaaaacttttaaaactatttcttggttttgtaaataagtaaatgaatgtgttcttacttcatttgaaattttggtcacagaagcctgctgtgagcttcgatagagagatgccttgttttaaaggggatgcagaatattttggtctcaggaaagcaggactggagcatgaaacactaagaatcttaatcacgctgaggagcacaaggtcccagacagggcaaacacgggagggggctctgggctcatctcgctcattccttacaagctggggtttgtttcttgtgacgctcctcaggaagctggcaaaaaaatagtggtcccaagtttgcacgcttcaaagaacaatatagaacaggcttttacctgacgcaaattgtttcaccctggtgtttcacaggagtgatggcaaaagcaagtgaatgatatactgcccgggggcaacgcccaccatggcagccaatggaggagacagggcacaggccaggacccccaggaggacccccaggctcgactttcaacacccaaggcaaattcactcactcttgtcttcgtcctttttttcctgcacgttttgagataaagaaagagaaaatattcacacacaatccaactattctagtaggtttctcctccggtctttacctggttcctggtgattgcaaatggatcatttgatgatctgttgccctgtctttctgtgtgtcatactaactgccctattcactacagacaattcctctttgttagaaagatccttcacatttctagcctctgttttcaagaattcctttcttattccctaaattctcaaaattagtatttgaaaatggctcccagtttcttaaccaccttgtaatgctggttgctagtccctgttcttcgaattcatcgggtttgctaaaatctcctctgccgttaccacttccctctcgtccatctctggaggagcagcacgttgtgtgagtgccgtcggggggaggatgggaggacgctcctaggacttgtgctctgttacatcgagatgcctgtgagacaccaggcggggatgccaaggacatctttgaccatgaatgtctggagctcagtgagagtggtagggcttgaggtgtacagcttagagtctttttgctgttacagggaccagtgagcagggctaggctgtgctgacgctggggtactctcccaggcctcctttttagagctgacaccctcacttccagcctctaagaacatgggctgcccagggcccactgctgtgtccctcaaagggaatagctcctggccaagggaaatggctccagggccgcgttcctcccaggaggagcccatgccccatagctggctgtgctggggtggaagggccaccctgcgtgctccacagggacaagtttgaaggaccagctcaactccagggcccgccctggggtggcctgagacctcagttgtggtcacattgctgttcacaccagcactcactcccgcctccatactgccccccataagcgtctacacagcatcctcacaccccttctgcaagtgacctccatctccatgcctgcttccaggggccccatgacagagccagaaaagtgcagaaggtgccagagagtttgaccatgaaagactgagtgagacacaggagcaagcaaaggagatggaaaagtaccagacagggtggcagaggaaggaaagaatgaggggagggagagggagaggggaggaggaaatagagggagggaggaagagaaggagagagggagggagggagggagggacagggacagagggaggcagggacaggcaaagctaatagagaagagccaatcgagtgagagcagaaaagcgacccctggctttgggaaacttggaggttattctgaagtggtaaaaacagaagctaacatgggttggaggatgaatatgaggagggaagtgggctacaggctgctacagacaattcttctgtggttttagatttcctataaaggggaacagataaatggagctcgaattaaataataaggttaaaagaagacctatattatattctatattatattatagtaggaggtactggagcactgtatgtgaataagtcattcaataggggcaggttttagaattgacttctcctctgatgagtagtgcctctgtacgatgactggttatggcacgacctcaggtatctcctggcatcaaatgggacaaaggtcctcagaggcttggacccctggacttggcaccatggaggcacgtccaaccagactgcccagcacagtactccctgcgtcactccatgccatgcgtgcatacgctgtgtttcactgtttgtttccatggatatagaactgttaagcatgcattgatttagaatctcttagctccgaatttattctgaaagggatatatatatatatatatatatatatatatatatatatatatatatataaaatcagcacttttgtgaatcttcctccctgaaattttatttccacacatggctagttttttctttgtgtgcatgtgcatgtgtgtgtgagagagaaatcctacaaaccaattttcatttacatcatcaagtggccatctattaaattcttaattgaaaacttttaataatatccaaatacttgttctagagacttccttttactttcttagtctctctccactccatccttccccaaaaccccaagtactacaagaagtggtattgactaggacataacttaaaatttctttttttataccagtggtttttttttccagaaatttctaagaaagctaaagaaagggcaagctctgcagcctctttctctttgtactttgagattctgaggcccggcaggtgccttgtgctgcgacattccatccctttcctggttcatctcaattcacctcctacctctggcgcccatccggctccccttcccacgctgttctctaacagaagctctggattttccagaattaccacaggaatctggagggggctggatccgctgtcagggagtgggacttcccagccaagtgtgttcctgctactcctgggacacactgccgtgtttttcttctgtagcaaacattccaaagactgttgcaaacaggaccatacccagcaaacactcacaggtattgaggaaaaatctttatattcatgactgtccacaatcaaggtgttcccatactgatccatcattattggaatgatctgtgaggacagttttgacctcagtgaagaggaatccacagacttttagcaactaaggattggctaatgtgtgctgtgtctctttggccttgttgggatcaggctggggtatagacagggagtggccaggctgctgtcaggacaggagaggaggaaaagcagaaggctgcagccagccacagccagacaacacaggcacctgatggtcagcagctcagctgcagtgacttgtaatgtacaacatcaccaaaactgcaggaggtgtagaaaatatattgcatagagctaagtaacaaaatagatattccacatcgaaaaagaaaaaaaaatactgccaagatcaaacgctgtatctttctgaataaaacaaaataaaaataataagcatcagtgagaagtcttaagaaaaaaatgtcctgaatgtatactgtgatcttcgcagtaacatggatcataagatgcttacagttaaccagcttttaagcaatgctgatttctaatgcctttgctaagaaatgccttttactggctttgacatcatttggtgtgataggagaattcaaagatatttgaaggtctttgaattgtctcaaaaactcactgagaaacctgcattcagtgtgagggaagatcctcctgctttaagaagaacttgcataaatatggcagcagacaaggtgttaggatgaagctgaaaggaaaaacctccatagaatagagttaggccttggttaatcatgcccctgtatgaagggtaagctgtggggaggagcctggctgctgagtccattcctaagaactcatcggatccatgttcaggaggaatgaaagcatacgcagtgtggccacagctccgtctgttcctctgccttgcatagcacactgggtagagttggtacactgggatgcatttggagggactctagcagtgggttagtctagaaggccactcaggtgaggcgttcacagcacggacaccctccgaataagggggctttgattttctgcccatctcctcctggtttgtctggaaagacaaaccaaggtgttcgtttctgttggtaaaaataaatttcattgctcaggtagtgaggtttattcaagcatatgccccgatttcttagatattgactctaatgaacttctagattgaacagatattattcaagaaagagctgagcgttgggttctgagcaccgtgtttcagaacaagcagctccgtgtgtgcagcaactgcgtctctggggtaaaggcagagcagcggcccgccttctgctcttctgggtgcacgcgcctattctcccatgctgaaacttcctgtcctctctcattcgcggctcaacgtctattctgagaatcctcttccctctaaactagcaacaaattaaacacagcccattattctctttgaaaactagtgcacaatcctgatttggtttaaaatattttgttgtcattattgccaagtacaatggagacaaaaattgctgagaagaagtaacataaaaaaaaaactccgtaaaaattatctggccaaatgctttaggcattagctcctacctttcgggatcaatggctctgagaatctattcttgattattctgggcacttagctctttaccagagtcccgcaaatgctttctgtaatgcgtcagagagctagtgttttaggattcacaggcaggtggtttctgacaacttctggcctctgctgttgtagcacaaaagcagacacagccaatatgcacatgaacagctgtggcagtgttccaataaaacttattcacaaaggtcggctgtgggccaggtttggcaagtgggccatcctctgctgaatcctgcccgagcacagaggaaggagattgtgctcgacgtcaccggcagggcttcatggtgatggtcttccctgcccaaacccacgtctcagtcttacattctcaaagttcgttatcatttgcttccttttttgccaccactgactgcttctgaactgtgtgccaggtcctgggctggtttctgtaagcattgtacaatatgacatactcgtgcaacagctgtgggagacagatgtgttgatctccactttatagatgaggtacttccagctctggaaggttaactaaccccacgaaagccacaaaggatccagctcggctgagaatctcacctgctctgtctgcccccaccacagctagtctggccgtggaagctgtctccagacattagtagacagccctggacactggatgtctgctctggggacaggtttgggggcacatagtaaccaccaccttggacatactgaatttgaaaatgcctctaagatactggatgcatcaaatgcttacatttttcaaatttcatttgcaagaaactgagaggacatgtcctgaatgcttgtgtctggtgttcaagtcatggtgttaggaacgtgagagacttccctcatggagatgaattttatttatttatttatgtatttatttatttatttttgagatggagtctcactctgttgcccaggctggagtgcagtggcatgatctcagctcactgcaacctccgcctcccagggtcaagcaattctcctgcctcagcctcctgaacagctggttctacaggcatgcgccaccacacctggctaacttttgtacttttatttgagatgggatttcaccatgttggccaggctgatcttgaactcctgacctcaagtgatccaccctcaagtgattcggcctcctacagtgctgagattacaggcaagggccaccacaccagaccaaatttcattttaatcagggccctctttattaaagctatactaaatgtccagcctcatttaaagaaaagaatgcaaccaattacaataaagactttatctcactttctctaacatattatctttatttttataaaagttgaaaggcttccaaaggaagctcgccctgtctttgctcggggcttctggtcgtccgatcccgggtgagccacattccctccatgagctggctgcgtggtgctccacactgcagtggtgcattcctttgagttggtcaaacagggtacaaatcagagctggcttctgatttgaaggtgtttgactttcttttcaaccagcacgtgctttaaagaaatgcacagtccctggttatcctaatgaatcaccctgtctcgggaataaaaatgcatcacacatatttagcctgatatttgtattgaaatgcattgagcccctgccttctaaaatgaaccacaaaacacatacacgtaaacctcattttgattccatgctgtttcataaggtaatttgttcaggcactcagatctggcaagagtctctgaacacttggtacatttagcttcattgagtaaccccaacttctattcattttgcaaatataaaaatgcataccagtaatttataagaaatttttgtgaacgtatgacgccttactttttaaacgtgtttgaaatctctgcaaggacaacattgtctccagtcactagtaacccagccccactgatacacatccattttaaaattagcattttgtcattaaaaaagaacatattaaacatggagagaaagcagttgttcttatgtcatgagcagaaataaagaggagaaaaacacagtatagacagaattttattattcctacaaagttcacaataataaaagagggggcaacagatatcactcattctagaacagtctggggcttatgtattatacccttctcatgccataatgcagtcatggcagttgctagtgtggaaagcaaatcctcctcctagtatctctgattccctggtctgtagtatcccacgagcacattgcatgtggtccacggagcacagagagggggtgtccacgctgccggggatccattgcattctaggccgaaacacttactctcttcagttagaatcacacagagcttctacaaaactacactgtgaaactgcattctctgaagattaatggagtcactcttgtcttagatatgaaatataatcatcaataaataaaagtagatgatattacagaacacgaggaaattagtagcttgttttccaatcataaaaaggttactgctatgatccaatctattattttcagtagtaatgtaatgtgtccaactggagtattttctcattgggctgagtgacttaagattcctctagagtggtgtgacctctccttaaagaagagtaacagctgttaatgattcagaacttcggatgagaacaggagtctttctagcagcaaaggccagaaacagcatggaaaacttccctcctgccctcccccaaccatgcagaaccctcagagtcccccagtgcctgagagaaggatgctggtgggaataaagcaggggcgagtgtttcctaaggtaacattcagaggctttgttgttacaactggagagggatggccagtgagccggacaaagaccacagaaagcacttcgtgccaaatatgtaactggacgcagagaccataaaggtcagggatgcctctctggcccctggcgagccagccttggagccgctgttgccaggtagccaccgccttgtgccgttctccagccatcctgcccgcctgaaaagcatgcagtgctgacccacttactaaagggctagtgtgtgcagtttttcttctagctttttgccctgaaattgttattcagttgccacttaacattttatctgattccatctttaatatgtggttgactgcagtaccatgctattactcagaatgtagttctttccaacttcaaagtatcttatcatcatcaattgagattaacacctctgtgaaatgtgttacagaattattgcgttgattttgtttgctttttgctagttgactccctttttcttgttatttcatgcattttgagcatttcaatgatttcttccagctgcctagtacctatttcgaggacatactgtggtattaatgtaacttgaatggcacaaattgttctcatgttcatgaatgtaacaaaagtcttaaaccacattagtgactttcagtctgtattgtcaactatcctgaactctcttcaaataattctcacaaatgctactgagagcccctgatagagaaaggtggctcagaggtgagtccatcatgggaggcttggagtcagctcctgagagggctgagtagagcttgccttcgactgagctgtggagaaaccgttttctatactcacagcatctgctctgttgaagcttcttgttaatatgcccctcacaattccatgtatgtcacccaaatctgacatgacaacacctgcttgtcaccgtgagatcttgctgttgtttctcgtgaaggagaaagtatgtctgcggagcatcccagggcataagtgagaaaagaagcagctgcactggggatggaccaggaggcagaggcccctcatgtaatgtggggaacgtgccctgtgcacctgcagagcccacctctgcacgtgggtgccatgagggctgtgctgggatgctgggttacctatgagttccccgtttaagctgacgctgtggcactcggtgcatcagatggcatctctgcactctcgctggccgatggccaagctgttgttgaatggccgcctccattctgccccgcagacatgccaccactaactggctggcatctggggctgattctgtatttagagaagaggaggacgtgttgccatgggggagttggctccattgatctagaatctcatggtggtcctgctgcacagctctcaggacaagcaccaggattaagcactgcagaggagccctggcaaaggctgggataacctcattttatgtgaccaaggatgattaatttttcaaatttgggcccatgtagaggccattgtaagtatatttgtttcattgctggatggttgcagcgctgaatatttttttttacccacgtgcagagatttctttgaaaattagagggaaacatgcaggctttctctggcacatgtaagcatgtggaggaattttctcaacctcctcttgaggatggtgtccatggcaacagaaggctgttctgtgaaggaattctcaattagcgctaaatacacgcatgctgtgtctcctacttccctgcacagagcactcactttcacagggatttcaaggcttttttttttaagtgttatgacattatatattaatataatttgtttttaagctgcttatatttattaagcccagaatttttatatagatcaatattctactggagcaatatcttggctattctaataggtgtgggctgaagttagagaccagatagggatgagagtgctaccgagatgcaggaaatccaggctccatagtgacttcagaccattgattccacccatccagcactcagtgcttcacggatcaagttaattagatctctatcatgtttttatgcaatatagagatctagttaactttatacacacacacacacacacacacacacacacacacacacattcccaagaggcattgccaaaatggagagtgtaaacagtagaacggtgtagcagacaaccttttctgtaataagaaaggtagaatgggaaaatcttgggaaggatctgtaaacaacaaagaacaatattgatatgtttaagagggcttggaattcggcagatgaaattagaaggaaaaaagtctttccctagtagatccctacatatgttatagctttaaaccatgtaaacaacttacctataaacatttgaaaagaaaatttacctatgttccattagtggttcttgaactaattattaaactataattctcataacagtttggagggatcaaaatgtttgatatacaaacatttattaagcaccaattatgcacatggcagtttgccagtatcttgccaaaacatatataatttcttacataaaaaaaagctcagaaggccacaagaagcctaaaaatcactctaaaacagcttccccccagtggtataagtaggggactgcagggatttggaggaagacaaggtgacagccatggtggagataaggaaggtttctgagataatgtattcaggaaagggcatgccagcaagatgaaaaatgtgtgcttaatttgttcggcaatcagaaaccactgaagtgtttggaatggagaaacctaatcataggtcctgcttttcaagaaaggttatgactggtgatccctttcacataaggtaaaacagtaatagccgccattttacaatttatagaacagatgctatttcaagcacattttatgaagtactttaaatgcattgtctcttcaatctttacaacacctctatcaatggataaatggatagatagatggataggtggatggatgggtgagtggatggatggatggctggatggattaatggatggatggatgaatggatgaattggtggatgagtggatgggtggatggtggatgaattggtggatgagtggatgatttgatggatgggtagaagggtgcgtggttggatggatgggtggttgggtagatgagttgatggatggatgggttgatggatgggtggctgggttgctgagtggatagatggatgtatgcatccatccatttaataacacataaatggatagattggtgggtgggtgggtggtagattgatgagtggatttaatgcctgaagtaactcacagctattttattattaaatctttattttgcgtatattttaatggggttccaaagggttaagcagccagcatacagtcatgtgaatggcatatgagagaggaaggactgggtccatgatgctgaaggtttcatgcctcaccacgtaagagttagtgctggtgagatctgccaattggtgagaaaaaagtatctactacaaataggcatttaaaaaaaaatatgatgtaaaattcactttctctcaaaacttatcaggaaatatgtatataacatataaaaatcaatcaaatttaatcagaattttttaagattgcaataattctaggtcaaattcaatcaaagctcaggcaaccaggttgaaagagaggaatccttgccattatctgatctagaaacaaactgcttatttgaggagtgataactctgctacaggtgtgagtaaattctgaatattgttttattatcatctgtttattattatctacgtgctattctacttatttttaccatcaaaatgtggaaaatatattattaaattaggccagtattaaatccagtcttagtttcaatgtggagatagaaggatgtctgttatatatgcacccctgccatgagttttgagcccaaattttattaaggagaccagtgagtatggcttggttgagaagaagcaggatgatgtctcaccattacccaggggactagcagaagaaaggggaaatttttcttccaggattttgaatttaaaccacttaggggaacagagaagacttcactacaaaacaaaactgaaagaaatattaataactcaagaacaagattctctgtggagaccagtgtccatggacaatgggcacctcagtgggtttgagtgttatttctgatgacatcaaggactaggttcccaagaaagggtatcgcctcctcctacccacagaaatacacatcagtaatatgtgggcctctgggaactcagacacaaatctggaaaaaaggagggctcagtgggttgggagaccaaaataaaatttaaggtaaagtttagaaaaaaatgttactatatttgcacaaacaaaaaagacaataggattcccatctttggttattctctagagccaagggtgattatatctgatgatcccaccctcactggtgcccgcttctgtccttgaagtttattcttgctttttctcaaccaaaccatactcactactctctttaaaaaaaaccctggctcaaaactcctgccagagatgtataaataacatacatccttctgtctccatattgaacctaagattggattaaatgttgacttaagtttaatatacctgccacacttttggtaattgacaaggaaaacataaatgcaaccacacacagacaatataaaacaatatattgaggatggacagggtgaggatggacaaggcctatggcgcccattcccactcaacagattctgctctctctgtcaatcataagtctttcagaatagcctagcctgtatgttaataattggcaagcctccccactcagagttactggaagaaaacaaatggtataacttaagctacacttcttagtcttaatgcgattctgtgaagataacggaattcataccttaaaatgcgtggctgtactatttgacttgcagcagaagtaccttttcacgtcttcacggtatctggtgatcttggagttggttatggataacagctatactgttttcactctttgttaggacattttaaccagagcttaaaatgaatcaaaaaggatgttgctaagtaaatgtgtgtacctctaccttctcaccacattaaatagcaattaggttttgagacccaatgtaaataagtgtggtaataacatttcttagagaaggacccagaacggcaagtgctgaaaattttctctgggaagccttttagtctctgtgctgtgtctcttaagggcattccattaggagacctgtttgccatgagcctttcagaaacttttatgaattagcccttagtttcctaattttctatcagcccatttttcttaaatgagaaaaaaaaaaaacaaatgacatttaaaaattgaagcataaactcccctgggaagactgaaagctacatgttctcttttattttgttgcacacacacagatgatttgctgagagtctgagaaaacaaaatcagtacatgtgtcagccatgttgcagcagcaacttacattctgggactgatcatctcagccaaagaaatcatgttgttaaaaaaaaaatggacaaaagaaatacatttaagacctttggaagaagcaggcagggctgatctgcaatgcatttgtctctgtttccacctccctcatgcttttaatgggctgcctagcggtgcttgtgctacattctgtgctccgtgctgggctgggcttgcttcctgtggatccaaaacctatttctgtctctccccacaccttttgggaggtgcaggggataaagttgttggtgggttgtccagctcccaggatggtcactgcagaccccaccacctatctttagaagctccagactgcacttaatttcaccgtagggtgtggcacaaacacaaatggtttacagaccctgttttctctgctggctgctgcttctgacatgactgaatatctcaaccatagcaaactagtctgtcacatcaatgtttgtgtttctttttttcttttgtttgcttttacaaaggttaactgggaagttgatgggccaggaaattctttgctgtggagctgccccctgccctgtgtctgcagggcgtttagcaggacccctggcctccacctgctggataccagatcaccctcctccctagtgtgacaccaaaaatgtgtccagacattgccaaatcctctctgggaggcacgatctcctactggtctagaaaacagccaaactcatggctcaggataatctaatgcaacaaattatttaaactctgccttaagttagtttgttgaacatacagtgttaagaaccaacactgtgtgacttaagacaggtggtacttgggtttaatctccacatgatcttattcaatgttcagaccctttaaaaagcataaattattggtgttgttgaaaagacatctgtctcctgaaaactaagttgacttataaaagccatgaggaaagaagcctacaggaacgcctaagcaatctgttaatgtgctgcagtatgatctacactgtgtgtgtgtgtttgcatcactacaaaggaatatctgaggctgggtaatttataaagaaaggaggtttaattggctcatggttctgcaggttgcacaagcatggcaccatatgctcctggtaagggcctcaggaagcttccaatcatggtggaaggtaaagaaacaggcatttctatatggcaagagtggaagcaagagggcaagcggggaggtgccacacttttacacaaccagatcttacatgaactcagaacaagaactcattcatcaacaagggtatgggactaagtcattcatgagaattctgccccagtgatacaatcacctcccaccaggcatcacctccacctgggaatcatatttaaacatgagatgtggaggaggtacacatgcacactacatcgtatacccgatgagcactgatgactcatcatatacccgatgagtaccggcaaccatgacactgtgcagccaggatgctcccctcacatccttgccctcctctcgatcgctgtgaacttaggtaagtctcatggacacagagatgcaaattttcaccacgcatctccatcgcttatttgggtcattatgaggtggagtttccactgtgtaaaaaccctctgtcaactccacagctctgtacaataaccgtgtgttgtgttacttttgctaatcttgtgtgtggcctaatgagatgagaagatgcatgagtgccctgtgtgccctgcagaagcctggcctctacttgagaagatcacgtgttgacaggaagaggaaactaaaggagttaaatgacccaaagagcccacaggaagagcctgcggagcacacacctgagggccagggtgggaccaggctgaatgcatgggttccaggggctgcagcagtcctgatggtgatcacagacacaagaaagctcactccagcctcactgccgtgtagcaaagcaggaatcagaggggagaagcagagggagttcctgctgcagcgcctcggtcacctgggagtcccacggaatagagaaagtgccacggagcaatgaacactgggtttaaagcaatgggaaggaggccagggaagaggctggggagggaggctgggggagatggtgctccctgtggttgcagggagattggaagaggtggcagaacagaggttaagggagactgggaccacaaggatgaaggacgctgcagcctggccgccgctggcgtgagaggagctgggccccctagcccacactgtgaagacgacactttatcctgatgctcccatgtcagtctcacagggccccaaagcaagatggggcaaatggctctaaaaggagaaggttctcaaaagaaatggacacggcagacttttgttcaagaagagaaccctggggcctctgcctgggagcgtggcctcggtattctcagagtgcctggcacacagtccatcctcaggaaggtgagctgggggtaggataactccacactctccacacctgcaatgcggactcacccctgaaaggaacaaaagcagagatacctggtgtcttcagagagcctttcaccaaggctcctcatatcagaatagacaagggggtgtttactgcattttgttttggctttttagatggcactatttaaagttagagtgcacagaatgaggcattttggttatttggaagatctcccctgagttgacttggatacgggagacatttgtaaatagcatgtctaggaacctgaacaacctgaaaagaatgaactcatgtttgatatagaccacccatgagaaagaagaaaggggaggcaaggccagactgctgcctctgaaagggagcagagcgggggctcctgtgccctccaaggctgccaagcacagtggcccccacagctgtctgtgtgcatgtcccttgcacagcaggaatattgtgagcagcaagtgagagcttcgtggcaccctggacagacctgccttgggtgactcagtgaacagaaaaaggaaagaagaatagaaatcctggttcaatgtctctttcttctgatattgcaaaaataaaaatcactttttaaatattcgctgtggtcattcttttgtgatgaagaaagtgcaatgataattgttaataaaaattttaaattatgagctcaattattaagcatgcgtgaaccatgtgtaaaacccacaggtgggcgccacagacccacccatgaacatcccacgcgtgtccacgttcaccagggctcctcctcagcggcatctggggcccaactcgcaaagcaaagctctgctccgcccctctgtgcaattccccctgggcatgatagtcagaggacgccgtatctgaccacagttccaacccaagtatgacagctggacagagtaaagtgctgagtgtgagcggtcagggggtgcccggggcgatgaggagagccgtggagtcaccacacagacctgatgctcatgtatttattcaggtgaggatggtggtgtcctgtcaaaaaccctttggcccatagattgcagagagaagccacaggcagacactcacagatggaaaacgactgctctcctctcctcctcactgacttagacacagtgaaaaccaagaattccttggtgtagtgaccccccgcggccacaggtgggggctcgcaggatagctcccctgatgtgaggtgctgacactgcttctggggtgtctccaacccaagcagggtcttgtcggatagcatacgcttaatttcttatgacgccacagtccttgtgtattcagggcctacatgacccttttcatagaactcttgtaacaacaatgcccatactgaggagcattgatgataccaggcccttgctggctctccagataaactcagcctcacctggagagagaaaggagagttggcagaggtgggatcaggtggcctggatgctgtcctctctgttgtctgcattgctgtgtcccagaaagccccttttccccagggactaacgggaaactcagccctggcttctgtcacaacttgggggcaccccctgggacacagcgcttctccctctccacttcttggtctctgtttttgtctctactaaagtctaggaggttttgtgacatttacattgtctgatcattttttgattacatagcaaagcaaatttgagacccctgctggactgggttccttggagacacggctcgcttgaaggagcagcaggtgacaacagggctgaatgctagacatgagaactttctagtttctgataatcttttttttatatactttaagttctagggtacatgtgcacaacgtgcaggttagttacatatgtatacatttgccatgttggtgtgctacacccattaactcatcatttacaataggtatatctcctaatgctatcgctcccccctccccccaccccacagcaggccccggtgtgtgatgttccccttcctgtgaccaagtgttctcattattcaattaccacctatgagtgagaacatgcgatgtttgattttttgtccttgtgatagtttgctgagaatgatggtttccagcttcatccatgtccctacaaaggacatgaactcatcattttttatggccacatagtattccatggtgtatatgtgccacattttcttaatccagtctatcattgttggacatttgggttggttccaagtctttgctattgtaaatagtgccgcaataaacatacatgtgcgtgtgtctttatagcagcatgatttataatcctttgggtatatacccagtaatgggatggctgggtcaaatggtatttctagttctagatccctgagaaatcactgccacactgtcttccacaatggttgaaccagtttacagtcccaccaacaatgtaaaagtgttcctatttctccacatcccctccagcacctgttgtttcctgactttttaatgatcgccattctaactggtgtgagatagtatctcatagtggttttgatttgcatttctctgatggccagtgatgacaagcattgccaagtcaatcctaagccaaaagaacaaagctggaagcatcacgctacctgacttcaaactatactacaaggctacagtaaccaaaacagtatggtactagtactgaaatagagatatagaccaatggaacagaacagagccctcagaagtaataccacacatctacaactatctgatctttgacaaacctgacaaaaacaagaaattgggaaaggactccctatttaacaaatggtgctgggaaaactggctagccatatgtagaaagctgtaactggatcccttccttacaccttatacaaaaattaattcaagatggattaaagacttaaatgttagacctaaaaccataaaaaccctagatgaaaacctaggcaataccattcaggacataggcatgggcaaggacttcacgtctaaaacaccgaaagcaatggcaacaaaagccaaaattgacaaatgggatctaattaaactaaagagcttctgcacagcaaaagaaactaccatcagagtgaacaggcaacctacagaatgggagaaaatttttgcaatctactcatctgacaaggggctaatattcagaatctacaaagaactcaaacaaatttacaagaaaaaaacaaacaaccccatcaacaagtgggcaaaggatatgaacagacacttctcaaaagaagacatttatgcagccaaaagacacatgaaaaaatgctcatcatcactggccattagtttctgataatctttttttttttttgtacattgttttcattttattatcacagcatgtttgtgagaaatactttaaaattcttcagcctaagagtaaaaaaagcccccccgccccaccccctgctccgctgtcagttttctcccttctgtgtcttgcatactggctcattgactttctccactccaggtatcctaacatcttaacagtctccttgctggaaagaaatcttcagtggcataatcttttttaaaaagatttgggatgatacatttgagggagacaaactctaatgaaaacgctctttaagaaggtagcaaaaataaaatatttttattatgcttttattattgtcagttcatcctctgtatttacagattttatgtctgtgaatttgcctgcttacaaaaatgtattgtaacctgaaaatcgatgcttgtggtgcattcaaagttacacacacacccatgtggagaggcaaaagcttgagctgcccagcacacaccttcagctgctaaagggcagggcgatgcccggtctcctgacttcagctccataccataaacaagggtctttttcaaggtctggttactgctctgtgtgtcactttttggtgattttgctgcttacaacagcccccaagtgcagtgctgtggttctgtctagtgtttctaagtgcaaggaggctaggatgtgcagcacatagaaaaatacgtgtgttatgacttcaggcagagctgcaggtccatggccatgagttcagtggtgatgaatcaaacatacataccttatttcattgcacttccctttactgtgcttcacggatcgtgtatgttttataaattgcaggtttgtgacaaccctgcgtcaatcaagtctattgatgccattttttccaacagcacttgctcatgcagtatctgtgtcacattttggaaattcttacaatatttcaaacttttttattatcatcatatctgctttggttatctgtgatcattcatctttgatgttactattgtaatttctggagggcactgcaaacagcacccattggagatggcaaacttgattgataaatgtgtgtgttctgactgttccgccagtcattcttctatctcccccttctaaactgacctccctattccctaagacaagcatattgaaattaggccaacgaacaaccctgcaatgacctccaaatattcaagtaaaggaagagttttatgtcccttatgttaaatttaaagctagaaatgattaagcttagtaaggaaggcatgttgaaacctaagacaggtcaaaagctagatttcttgtgctaaacagccaattttgaatgcaaagaaaatattcttgaatgaaattaaaggtgctacttcagtgaacataagaataataaatggaaccagccttattgctgatatggggaaagttgtagcggtctggatagaagattagagcagccacaatattcccttcagtcaaagcttaatccagagaaaggccctaactctccttaattctacaaaggctgagagagatgaggaagctgcagaagaaaagtttgaagctggcagaggttggtttatgaggttcaaggaaagaagtcatctctgtaacataaaagtgcaaggagaagcagcaagtgctgatggagaagctgcagcaagttctccagaagatccaggtaagatcactgatgaagttggttacattaacaacagattttcagtgtagatgaaacagccttatattggaagaatataagccatctagggccttcagagctggagaggagaaatcaatgcctggcttcaaagcttctaaagacaggttgatctcttcttaggggccaacacagctggtgaatttaagttgaagccaatgcttacatatcatttcaaaaatcctagggcccttaattgttatgctaaacctactctcctcttgctctataaatggatcaacaaagcctggatgacagcacatctgtttacagcatggtttactaaatacttcaagcctactgttgagacctactgctcagaaaaaaaagatttctttcaaaatattactgcttattgacagtgtgcctggccacccaagagctctgatggggatgtgcaaggagattaatgtcattttcatgcctgaaacacaacatccattctacagaccatggatcaggagtaatttcaattgtcaagtcttattatttaagaaatagcattttgaagacaataagtgctatggatagtgatttctctgatggatctgggcaaagtcaattgaaaactttctggaaagaattcacaattggtgattcatgagaggagggccaaataacattaacagaaggttggagaagttgattccaatgctcatagatgattttaagttcacccaagacttcagtggaggatataactgcagatgtggtagaaatagcaagagaactaaaattagaagtggagtttaaagatgcgactgaattgctgcaatctcatgatcaatcttgaatggatgaggagttgcttctgaaggatgagcaaaggaagtagtttcttgagacggaatctacttctggtgaagatgctgtaaacactgttgaatcaacaacaagaatttagaatattacataagcccagttgataaagcagcagcagggtttgagaggatggactccaatgtttaaagactttctaaggtggttaaagtcctatcaaacagcatcatgtgcctcagagaaatctttagtgaaaggaagatgtggaaatagttttccaatagaagttttccaatagatatggaaaacttcatcgttgccttatttaaagaaattgccacagccacccaaccttcaacaactgccaccctgatcagtcagcagccatcgacattgaggcaaaaccctccaccagcaaagagatgacaactccctgaaggctcaagtgatccttagaattattgagcaataaagcaatttgaaattaagatatgtacatttttagacataatgctattgcacacttaatagactacagtatagtgtaaacatatcatttatatgcacttttttggaatgaaaaaattgtgtagcttcctttattaccgtattccctttattgtggtggtctggtgtgagcctgcagtatctctgaggtatgcctgtattaaacagggtgtgtttaaacagaaacacacataaaacaagtttatgttttgattgattgacaaagatgttgtgagcagagcatctcaggaaactaaccctgcatttactccaggagcaatggctcagaatccttcatttctgtttgctctgactttataggatgtgactcccatgaataatggcagcagactgtgtatgatacctgcagagggatgggatggggacaagcttgaactcaacatagattctaactcagactatcccacctgtctcatttaatgtttgaaggacaggaactgctgtgtctggtgtgttgtgtatattatctcacttatgttcacagggactgagtgcaagggtgttatgacatattttcactgccaggaaaaggtcaagtgacttgtccaaggctatttaatgaatcagtggaggagaggaggagatagagaggggagagaggagaggagtggatgaaaaggagagagacagagacagagtcagagacagcgacagagacagagagaggaagataataactgaaccaggtctgtaccttccagctcaatttcctcctcctactctgtgctattaacctccgtccatctgtataatgagaagattggaccaaatggttgcacaaagtccttgcagctcttatatttctgaatctctgctgatgtttaagactttctgcacaccccatataaatgacagtcattttccaagtcctctctagatcccacctctcaacagtccttcatgaaacactatcgagatttctgtttctttcatgtgtgtagctttattaggaaagacctaagaagacaggagagatggatctcctgaggctctgctcctccagccattccctaccccaggcattcagtgcttacagcagttttcggtacaatagcaaacactttgtaaagcccttctgcagtacttcctgaagggtggcggtgcagttttcatttgcaagcctgattgtacctggtgtatttaaaatgagattgacattgccttaacaatagagcaaatagatcccccaaaattgctcgaagttaaattactttagacctgaccctcttattgtaaattccaaataaccgcacatttcatattttcctccatgtgtaaagccagagggctcctttcttttttgtgaaatcagtttttgtagatctgttctactgatgtatctaacagtattagtatcccactgtttatcatattcattatttggtaaatgtcttttaaaacttaacagaaatgatacaactatttcttttaacaaatttactttttaaaaaagcaaaaagcaggaaaatgttttttggtaggattcagtctgtatttgtaggatacttgagagtgctgttttcttatggtttgattttaaaaaatgagacaggctctatgcttttgcttttaataggatacaaacctcataaaactggtcgtaattgttcgttcaaattgctgactgcattctttctttaaaagtattattcaggttagaagcatggcgtctctttgggtacactaatctgtattgaagctcaagtagaggaaaattacatattttttatactagtacttagaactagctatctttttttttttccagtaaatcaaccccttttgaatcagacccgttagtgcaggttggacgcagctggccccgctcccacaggctccatcagcctcatccaccaccagtgcctgggattgtctcacttcagggcccaggggaaggactggatccactggtcgctctagtgatgcccaggccaacagcctactgtgagtttagggtcatgagcacaggcctcaccaccaggactgcaaacacctcatagaacactgtctcttgagataggaatcctcactgaattcctcaggcttctggttctgtgtgtgacatttccatggaggagaagggctcatggtttcccactggtgccagtgctgctctcccaatgcattttattttccgtcttctagagaaagcgagtcagtcatcaccttctcttcggtgatgcccatgccaagtcagagaagtccccttcacacacggcctttcccctgtggtcaggcagctatcacactgtatgtggctcagctctagtgctgtaacgagccacactcatgtgccgctcaccatgtgctgggcactcttctctgtgctgttggctgcatgacctcttgttgacccctcctaaccatcctgcaagttagagatttacactcgtgtgttacagagggagaaacatgctcagagagtctgaccaactcagccgtgatcacaaagtggatgcatggtcaaggcaaggctatggagccccagtagaccacgtgtggtgtttatagcgaatggttcccatgttagcaagctgtcactggcccgttctgtgcttaaaagccattatagattagttttgaatgtcatggtcttttgtttcctttttcttttgacttgatctatttgtagtagctcttcccagagaagcactgggttagtcccttgtcaatgagtcgtgtttggataataggaactacattcagttcatggacagggcacatggcggttgttaaaaaccaagactaataagcacaaatcatattttatttaggaccaagctcttatttaacagattctaaaatacttttgaaaagccaaccttgccgaagctgtatgagatgtttctgttaattaatggagcccgccaatttgccaaatgctgtgtgatcccctcagcagcatagatgaacctgcagggcccctcctgggtgtcctttcagggctgacctcagaagcctgaccctaaagcttcactttgcctattacctgtggcaccctagcctttctccagtgataagaaatttcccaaacaaagaaaaagggaagaacattaatggcattaagagttttgtaaaacatgcacatgaaggctttcagcttatttggcattgcaaacctatcctttttttaaaaaaagaagacaagcatagcctacccagaactcatagtacctggcctctacctgtaatcagggggactcccgtaatgcacccaagactgaaagagaaactgaaggcagcggcaggcggatgataaactgtgggctctgaccgtggtgtcacggggagttacgtgtggaatcctggttgcaggggacagtggggtcagcctgggctgacataattcatccttcaactcagagggcattggagcttgggaagtcagggatattttctcctaagacaatgctgtttggcttctttttcagcataataaattgattttgctttgagaatgctgtggcctgcatgaggttggcagggggcatctgaggggcaggcatccccggagctgtgaggcaggagcagtggcgcaggtgtgggacaccagctgaataagaacttcaggaggaaaaagaagaagccaaaggtgtctaacaaataaggagagaatcttcctaaggggaagttccaagaaactacgtaaacaagccctttgtgtgagatccaatcagcagagagcagctaagagagcggaggcctggggttcggtcaccggggctcctttgctagcctcagaaccaacagcagggcaggcagaagccagggaccttcagctaagggggtgataaggcatggaggttgtcaggattgcagagtgattctatgtgtgaaatgtctcaggttttattcattacaaagtgagtacaaattaaaatggtagaacaaatgggtatgatggcaagctgcaggcttttttctgttccgagattaactgcctatttttcaactgttggctttagtgtttcaccaccgccttccataactactatgtacaagtataaaatgaatagtattaaaaataatgtttaaagtaatgtaattatacaaataatttcagtttaaatgcatattccttattatgcagattggtttaacggccccatactttgatggagtgctccgttgacacaatgttgatctttggtgctatattatctagattatttagcgcatctcttcctaacagcatgttgccttactaaagagtaaactgtgaggtctggccctccatactcactgttcccttaatttcagtcttctttatcaagacagaggcatgttataagcaggaagaccctaagaagtgagatcacagtgatgtagtccttcatttttcttcgaaatcagaatgagatccaacagaaacaataaccattgtttacagaatttttataagaaatactagcggtaggttgagattccattcccttctccctgggtcaagcccacctatggaggggctgggagaaaagggaacacccaaacgcattcttcatgaaaaggagggagtctgtggatcaggaaaccgagtggggacagaggggcctgagagcgcggtgtctcagagagaggtgcgtgtgggtcgattccagcaccccatgtggaagccaagctgcttcagcatcttacgatctgggctccagctagggcataaaacagtaggactgtgtggatcaaattcaattttgccaacattattgagtgctcattatgttccaggcaatgaatgaagcactggggatactattatgaataagactcattctgcttgggactttgagaaatgtatagggctgaagaacaggaacataaacaaccgtgacaaatggcagagcatgacaagcctttgggaggtatcccacaggttgataagaatccaaagaaggagaaactattctgggggtgggaaagggagcagcatagacttaatgtagaagggtgcatttgaagcaagtcttacgagttgaacaagagttggagagacagagaagcatgaaggcaaattcccaggaacgtgcctgtgaacacacacaagatggaaatatttgtgccaaatagggacaggtgtactcaactgcttagacagtgggggtctctagaggatttggggcaggggagtcacacagccagagctgagttcagggggcttgcctgagcacatgtgcagaataatcagaaagccaagaggcatgcagacagctccagtgccatcatttaaaaatgcgctcttggagaaggtggagacagctgatggagaaaagaaactgtgcagataggagggcctgcagagtttcaccatgagagggcagaggtgaaaggagaatgcatggtcagagaagcttcctgaccacaaagtctgatgaccacagggtgggcagagctgcttagagaattggagggtgaggagggctggccaggggatgcagccttggcctggttgcctctgatgggctttgtcacatggctgcgctgagtgcacatctgtcagataataaccagtgtttcctcctccaacgtttacaccaggttatactgtagatgattgttttgctaattcattcctttcccaattaaatccttgtattcatcatctatgtctgtgtaacaaattataccagtacttagttgcctaaaataactcatttagtatctcacagtgtctgtaggtttgggattcaggcctggctgggctggatcctccctcatagggtctctcacaggctgcagcccatggtcacttgggacctcagttctctcggggttccagcaggccgattgcctcctggtttctgcagcgactgttgccaggactcggtttctctgaggctgtggatggaggtgctgccccttgctggctgctggctgaggagccctctccactcctagcccagggccagtcaaagcaaacacaaggggcagtggggtgaggacctgcaggggagctctcagtgttttctaacctgatcatgggagggacatcccatcacttgttgatgtatcctgtttttcacacacaaggcagtcatccggttacaccgaagagaggcatgaccaggagatggggtaagcaggaactctggaagagctgcctgctcccttctttaggacaagaactgaactttccattccttattagccctctcagtctatactaaaatgagtatgggaagtcatcagcacatgggcttactgatggagtggtctccctcccctctaagaactgaactttccgttccttagtagccctctcagtctatactaaaatgagtataggaagtcatcagcacatgggcttactgatggagtggtctccctcccttctaagaactgaactttccattccttgttagccctctcagtctatactaaaatgaatataggaaggcatcagcacatgggcttactgatggagtggtctccctccctctaagaactgaattttctgttccttagtagccttctcggtctacactaaaatgagtatagaaagtcatcagcacatgggcttactgatggagtggtctccctcccctctaagaactgaactttcctttccttgttagccctctcagtctatactaaaatgagtataggaagtcatcagcacatgggcttactgatggagtggtctccctcccctctaagctcttttattcccccggtttcctgcccacatccctggccccagtgctgattcttttttctgttctaatcagtcctgctcctctccaaagtgtcagatttctcagtcctcttccttgttgctggtctgaaaaattgtacgattccagattctggttaaaccggtttcctatagagtgaatcgccttgcaggaaaggtggcttgcagtggcagtggataggcttttggccactgtgacctgattaattcagtcacttcagactgtgtggtagatgagctcctgggccctgcaggcctgtgttggtcccacctggaaaaaggtgaagacagctgtgacagcgggctgtgggatctctgctcattggggccattcctgcgcatgtgcaggccatcctgctgccagctgtattgcatatcaggaaatgtaactggttggcaccactcatgaaccacctgattgctacccagggcaagagctgagtgggggatttgcatctacaagtgagcacaggcgtaaagggttgagaaaagccgcagcacttaggaagggcaggtatttcttcaaagcaaaagtattccaactggcttagagtgcattgcatttaaaaccagtgaagacaccttccacatcatccctagcagtgacattggcagctttctaggtgtgtgcaagctcacagcttgtgtgcaccggtctctgggttctcatggtgactcacttttcagagcccatgctgaggaatcacagtatcccttccactcctttcaggccccttgagatgcatcttgattgggaggagagagcagggttggcttacaagatgccagcatctgcctgatgttcttctgttctagtcaggcatgaggtcttgggcgatgaggagattgcttagggaggtgggctatggtgtttgtgctgaccagcatatctgaaagccactggttttattcctaatcatgcaatagtcttccctttacaacttgggaaatttcaaagaggttgccttgttttccgaagggtttatatatatccccagtaagaagctatgctatgtgaacagcattatgataaaattccagtgcattactcctggaactctgtcccctcactaacatggctattgattttttagttcccataaaacattctcacatgatgattctattattataaatgttacaatgttatatgccacatttggagaaaaaaacaaacattctcaactaatggccatggaatgccagtcagagcttctgatgtgtggcttggcttaaggcatgtgacaactgcccttgtcacctacaacagcatcacttgctcgtgtaaaacttgaagaaatgagactgtttttcagtgactctgaaaaagattaacacatgaatttgacttaacttttatggtactaaagttctccataacttcaaacaatgttagttcaatccccacatcgacatttcctttgaaagcttgagcaactgaaccaagccagtacatctcagtttcttcatttgtaaaactgccccaggtgtttccatagcattttatataatgctgtcttatgctatacacacataagttctttgtatatgtatgtagtgtggtgtagatagtggtagatcctttcaacagccctactgatggatgctatcattctatcagcctttttgatcctcattccaattatgctttaaaataaactaaggttgctgggtgtggtggctcacacctgtaatcccagcactttgggaggccgatgcaggcagatcacgaggtcaggagttcgagaccagcctgaccaacgtggtgaaaccctgtctctactaaaaaacatacaaaaattagccaagcatggcatcgcgcacctgtaatcccatctactcaggaggctgaggcaggagaatcgcttgaacccaggaggcggaggttgcagtgagccaagatcacaccactgcactccagcctgggcgacagagtgagactccatctctaagtaaataaataaataaataaatataaataaataaactaactaaggtatgaagaggttaaaaagaataacctctgggacttgccttgcagtttcctgcattttttccagagatctttccaaatgaagcaggacagattttcagtacatgcttgtaaacaattgaatgacatgatgaagaatgagagggcaaattagtgaataaatgttctagcaaatggctagcaggaagcaatagaatagagtatattaatttactttgagagccatttggccctctagttccaccatgctgagtcccttaatagtcatatcagtaccattgagaaagcaatttggtcaagcatgcagagatttctcagggaggtgcatttgccaagagggaagtaggagtccagaactgccacccactcctggaacatttatacagccgttaataaattttacaaactaaataaaactgaagatgcaactaacaggagagggggcctattttccctttgctctctctacagaacaggagagacggcctgttttccctttgctgtctctacagtggaagtccatatttttacccttaattgagaattatcttacatattataaaattcacccatttaaagttcataattcaatgatttttggtatatcctctgagctatgcggctatcaccatattctaactttagaacctcttcaacactccaaaaagagacaatggacccattagtggtcacccttgattctgccctcccagcagcccttgacagttacagtccactttttgtctctgtgaatttgcctattctggacattttacataaatagaatcaaacaatatgaggggttttgttgataccggcttctttcatttagcataatgtccatgtagacacattttcattatcttaggagtgaaattgctgtgtcacatgttaaagttatgttttgcattttgaggaatggccaaaatttttgtcaaagtagctgcaatattttatattcccacctgcaatgtatgagagttccagtttctccacatcctcaccaacatttgttcctttcttttcttcttttcttttcttttccttttttgcaatagccaccctagtaaatatgaagaggtatctattgtggtttttatttgcatttcccagatgacaaactgacaaatgatgttcagcatcttttcatgagattattgtccatttgtagattttctttgggaaaatgtctattcaaatcatttgtacattattaaattgtattgtcttttcttattgctttgtaaggattatttgcatattatgcatacaagtcccaagtaatatatgtaatttgtaaatatttattcttgttctttttgttgtttttccattttcatgatggtggcctttgtcagatcaactttttagttttgattaagctaaacttatgcgtttgctttttttttctcttatcccttgtgtttttggtggtgtatttaagatgccgtcacctaacccaaggacacaaagacttactaataggttttcttctaggagttatatagttttaacttctacatttaggcctttgatacattttgcgtccatgtttgtatatggtgtgatacctgtccaactttattcatttgtatgtggatacccagttgttccaacaccattcattaaaaagacttgatttcccccattaaattgttctgaaacccttgtcaaaaatcagttgacaataagtgagatggtttatttttagattccccattctatttcattgatcagtatctatccttatgctggtaccatcctctctcagttactgtttgttgtttatttatttattcacttacttgtttatttgtagtagatttttaaaatccagaagactaattcctaaacctattttttttattcaagatttattttctttctttcttttttttttttgagacggagtctcactctgttgcccaggctggagtgcagtggcgcaatctcggctcagctcactgcaagctccgcctcccgggttcacgccattctctggcctcagcctcccgagtagctgggactacaggcgcccaccaccatgcctggctaattttttgtgtatttttaatagacacgtggtttcaccatgttagccaggatggtctcaatctcctgacctcacgatccacccgccttggcctcccacagtgctgggattacaggcgtgagccaccgcaccaggccaagatttgttttcttatactgggtcctttcattgtcatgaaaatttttaaatcaacttagcaatttcattgaaaaatactacttagaatttggatctgtagatcaatttgagaagtattgctaccttaataatgttaaatattctgatctgtgaacatgtctttccatttatttcaatctttaatttcttaaaacaatataatatagcttttagtatacatgtcttgaacttcttttgttaaatttatttccagatgttttattcattatgtcaattttattaatgagcttgttttctaatttttatttttgtattttttattctagttgttttagtccatttgacatactatagcaaaatgtcataaactatgtggcttataaaaaacagaaatgtattttgcacagttctggagcctgggaagtccaagatcaagacaccagattattgggtgtgtggtgaaggctcatttcctcataggcaggcatttgtcttctcactgcatccttacatggtggaagggccagggaagctttctgaggctactctatatgggctccaccctcatgacctaatcaccttccaaggaccccatcccttaataccattaccttgggggttagaatttcaacatatgaatttggggaaacacaaacgtttaaatcatagaattcatatgcaaaatacaattgattatggtgtactgatattctaccctgcaaatgggctgcactaatttgttagttctgatagctttatctattaaggaatgtgggatattgatgtctccagttatttttattgtctatccccttaattttatcagaatttgtttcatgtattttggagctgtactgttagatgcacatatgtttataattgttatgtcttcttgactcattgaacctcttctcatcataaaatatccttttttgcacctaattttgaaacattgtcttcagtcttttgtgtctgatactagtgcagtcacttcagctctcttttggatattgcttgcatggaatattttttcatgcttttactttcaaattatttgtggctttgaattcaaagtgcgttttctagagaccatttaattgaatcatgtttgtttgtttgtttcaaatctattctctgccttttgattgggatgtttaatcaatttctatttaatgtaattattgatatggtaattttacacctacagttatgcagtttattttctgtatatcttgtgtctgctttattcctctatttccctatttttgccatattcttgttaaaaatattattcctggtataaccttttagttcctttgttgtttcttttaataattttaatttttctctctcattaatttccctggaaattacagttagctgttaacttgaagcaacctagttcagactaatactaactttgtttcaaacatagttaaaaactttgttaccatattcttccatttcttccaccaattttgtcctattattgctatacaaattacttctttataccttataagctattagcacagttttataattattgatttctgccgctgtcttttaaaacgtatagaagaacgaaagcattacaaatgataagcttataccatcttttataacatctatgcagttatcgtcaccactgctctgtattttcgtgtggttttgtgtgttctttcatttcagcgtgaggggctccctttagtatttctaaaacgacacgtcttctagcaataaattctctgtttttatttatcttggaatgttttaatatttttaagaagagtgtagctaaatagagaactttattgatagtctttcaactctttgaagatgtcatcacactactttctattctccatagttgctgatgaaaagtcaagtagtaattttattgactctgccttgtagtcacttcagctctcttttagttattgcttgcatagaatatttttccatgctttcactttcaaattatttgtggctttgaattaaaagtacattttgtagaccatttaattgaatcatgtctgtttgtttgtttcaaatctattctctgcctttttatcttgcaactttcaaaaaaaatttttgcctttgccttttgttaatttgatcctgatatgtctacatatagatccatttatgtatattctacattgaattcattgaactctttaattgtgtaggttaatatgtttcatcaatttggaaagctttcagccattatttcttcaaataattttgtccccccttttcttctcttcttctgaatctctcattctgtatataaggatagagttagtggtgtcccagagatctgtaaggctatcttcatttctgttcttttttttctctgtctctgagactaaatactctctattaacctatttttaagttttggattctttgttcttaagggtcaaatttgttattgagcttctctaatgtactttttatttcagttattgaatatttcaactccagaatatttatttggttatttattttataatatctatttctgtattgaaatcctctacttggtgaggcaaaattgccatgattcctttgaatttttcagacagttttctttagttatttaaatgtatttataataattagtttaaagtcttcaccaagtcccaaatctgagccctttcagggacattttcagttaacttttttctctcgtgtgtgtgtgtgtcatactttcctgtttctttgtatctctcatgctttttgtaatgacaactggaaatctttaggtaatatgttatagcaattctggtatcagattcttacattccccaagacttgctgttgttgctagatttttgttgctactagtttagttttgttttccttgttgcttcttattttttagtaactttcctggtaaaattctggagattctgagtattgtgcattgtttggttactgattcctctggtaccttttttctttttctttcgagttcttggagcttgtagtttgtctgtttattggttagtttttaaggcctggctttgtaggtattatgcctgggtcaggataagttagtggtcggccaatgaatagccagaggattttattaaatgcctttcctgaacagcttctaccatctgccaaggggatctatgtgagaaggcgttgccttaaactcctggccctttccaggagggcttaactcttaatccatgcttgtaaagagcctcggggtcacccaggaatgagtgcctggtgcctttcttttcctgtctttcctggacatgcacacagccttgtagattcccaagagtgtgagagagttttccaaagttctctgtggttgtctatattctctaggatttctttattcaactcccagccaggcttctgtttgtcccagctgaaaccacagccttgggcagctgggatgctgccagcagtttgctgtctccatgattccctgaaggtaagtctttccctcactactgtgcccacagagtccagatttcctaagagctgcaatttcagataaaatattgactgtgctctgaggacagtgcttttaatggaactccaaaacccatcaattcttttccttgttttcaatgtcaccggcttttagccgggatgaagagggggatgggaatggccccaaattaaaaagtcacactcatcgttatctcaaaatccagtactttccagtttctcttgggtgaataattttcattttaatctgtggctttgattaattgtcatattctgaagtagttgattttattgttttgccaacccataagcttttttaatgctccagattttcatgatttttaacaatgtaattcataatatatttcagctgcctttgaaccatatgtagttgaataacataatcttattcagcaaagttttgttcatccctcctccaatgattcttacagtttgaaactcacagttgagtacttacaatgacatgtggccttacatatctgtcaaattgtgatagacctcagtcttccacctccctaccagaatgaacattcctcaaaacctctcgttcatcttagggtcttttcttacttctacagcctcagatggcaactcttaacctaggggtccagatgactgtgaatttgctggaagacatgcacatggtgagggtgtcagatgtgtgtggtacatcttccacccatcaagaggaatcatagcttcatcaaattttcaaaagaaagacccacaaaagggtagaatcctctctaagaacgtctatcacaaggaaaaataatcctttctttatatttcctctgccccaaaaaggccgatcaccatgccatctgataaacagtctatggcctgtgatctccattccctctgcttctttctgcactttgcattcaggcttctctcctgaaatgctctctatccaggggagtggttgagagtgtggacttgggcttgactcccaggtttgaaacccagctctactacccgtgggattgtgaacatgtttcttcacttcagagtgccttatttatttatgtgtaaggttgtgattcgtctataaggatcgtaactactggtacctcaaaggggttgttgtaaagattatataaaatagcacctatcacaaaataagccctcagtaaatgtgagcttttattattagatcgtttcagggctcaggtctccaaatgtcctgaacaaacccctgcatgagatcaaaagttaacagactgactcctaatgttcttcttcaactgagtatttttttgttcatcaaaaccaacatctcattcttttgggctgtttcatctcagtccagaagactggactgtttaatctcatggtcattttagctcatgtccacctctctagccttgttcagtgtgctctttcttactgtattgacaccgtatttcatttttgcttttaaccatatcccgttgggtgtgaatttcttcaagccttcactggtatttttttaatcccccaaatggtcttcatttaactggtattttaattctgtaaattgatatctttttctctggaattatctacaatttattgtacttaccactccttttgtaatgcacttctttggtaaaggtatgagcacatctaatgtgtgtcacactaagctcagactcacagtggatgtgttaaggcagccagtcagtttggttagaaaacttcagtagagtgtcttttctattgattaagactgactaggcacaatttaaaaggaagaatacaacttttgtgtgaaaccagaaataaaagtggcatgttttttttaaaatcagttagaaaaaggatctttaactgacccaggctctggaaggtagaaatttctctatcactgcccatagaaaagttttctaataaaccacacaagtgaaattattaaacaattgatttattttatttatgtttctcttaacattttcaatagagccagctcaataaacattcattgaatgatttcctcttgctaggccttgtgccttgcatggagaatataaaatgaccatatacagggcctcgagagtcttgtgggtgagacgggcaattcctgcagaaggcaggtgtacagtaagccaggaggccagagtgctgagggtggagaaaagcaagagctgaagctcttgcctgcagcccatgaggaacagggagaaagttaggcggccttccttggaaatggagggacacctaagctaagtgttgaagaatatgtccgatagtgggagggagaaagaacgctccaagaggaagtcaaacgtggacatgaaggtgaagggagcctcacaacacagaacatgcaggggttccttaaaagtgggagtcaccgacatacaacgtccaagatacgcactggcaggatgcggaggcgagaaatgcctgtagtcacacgacgagaaacttggactaggagccgaggaccttagatttatttcttctgcagccaatgggaacccaataaaggtctttaagtgaggagagacttcatcctaatgttgatgcctctctcttccccgtaggagagagaggaaagcctctgtagagccatcaatgttaggatgaagtctctccattaggatcaacatcaggatgaagtctcttcattaggatgaagtcttctttctgtaatcttcttacagtaagagatacagcaggctggggagcaattaggtggcccttcttcttctagtgagagaaagttgggggcaggactaaggcagtgatggggggatgggagatgagatggtgcagaaatataacgtaagtatgagagtgagggagggggaagaaagattcatctgtaatgttgccatggactcaatgtttgtgtcctctaaaaatccttatgttaatatcctaacctgtaaggtgatggtattaggaagttgggcctttgaaatgattaaggcatgagagtaaagcccttatgaatgtcattagtgcccttatgaaagaggccccagagagctccctccctccttctgttgtgtgaagacactgtctacaaaccaaaagcaggccctcagcagataccaaacctgcccaaaccttggtcttggagtttgcattggtccattttcacactacctgagactgggtaatttataaaggaaagaggtttaattgactcagttccacatggctaaggaggcctcaggaaacttacaatgatggcaaatggtaaaggggcagcaagcagcttcttcacagggcagcaggagagagaaggacgagtaggaacttccaaacacttataaaaccatcagatcttgtgagaactcactcactagcatgagaacaacactggggaaactgtccccatgatccaccacttcctaccaggttcctccctcaactcctggggattacaattggagatcggatttgcgcggggacacagagccaaaccatatgagacttccagcctccagaactgtgagaaataaactgttatttgtaagctaccaaggttatgctattttgttatagcaaccaaaatggactaagacaaacatctcatgcattttttctggcagaattgaggacaggaagacgattctgagtgatggggcagtgggtaataatttgctcaggtcttaacatggaacctttgaggcagctgtgaaactttctagtagataactttagacatttggattcacaaatatgaaattcattgaagtgctcagcatacatttaagaattgccagcacataggtggtaggcaaaatcccacatagtggtactgtttccaagagagaatgataatggcttataaagacagtaaaacgtcagagaacaacagctttcaagagcccaccaaagacatatagacaagggctctgccgagcactgccttaggagtcagcagagagcggctttcaaagacggggtcatttgaatcattgggctcctctttcaagggaagcttgacacggagtcttttttgaggatgatgtcatgacatagaacccaaatgttaaaaatctatatttacaattccatatatttatcttcctgccacaagtctccacctggatgttccagatttatctcaaaatcaaattgtgccaaactaaaatctgctctccctcctcgcccacagctcttcagtgcctctggtctctgtacacctctgttctcacgcctgagcctggttttaggtcacgatcacctcatggctgggtggctgcagtagcctcctaattagtttgccttcttctagacgtcattccccttatcaattcccccattccagccaaagtgattttcaaaaaatgcaaattatatcacctatccttccatactttaaaatctgtcatggcctgactttcattaggacaaagttcaaatgtttcttcccaccagtttatttttggctattcctactttcctcttatgtctcagtgtcagtattaatttttatgagattcctctcatcagtgccccctcaaactgagaactcttgtctttccaaggtgagcccatggcgtcctgagcttttctgtattgtaaggacatttatcgtattgtatggtactcatccagttgtttgtcaatatcacaccccagacagtaaacttggtgagtacagagtcacattttgtttcctcttttttcccctgtgctgagctcgtagtagaacacacaaatatttggtggatatctgaccaaattaatgaatcagtgatgattaaacattatcctaatctcattattaatggaggtctgtacatttttattaaccagtagctcatattactattttcattttaaggtaatagaactacatttctttaaaacctttcagaactccaaattggcttttccccagttagtcaggatttatgaggctttattacatattaacattttttatttccatggtataaatcagaaagcccccagtgggtcaggatttatctgtacattgtattctacagcaccattcccttttattttttagacttcaccccatatcctctttccccactattattaacacagctactaggataatcattcttaccttgtatttgtatcacttcattctttctaaggtgttttcataatttttgtctcattttatcttcaaaataggtcattaggaatgcaggtatgtagacacttcccacacatgaatattcaaatcgatattaaatgacttttccaaggacactcaaataagtaatgatgtacatggagccgatattgatgtcctgggctcagtccagtcacagccctttgtctttttcttaaaatgaatatttacatcaatgattttttacttattatcaagtgaataaattattataactgatgttgcctgctttaatattttgaatttgagagacatgtcaggatttgctgaatgcatggtgtacgtgacacaataaacatatgtccagacaaacacagttgttggttcatcttgctcatcagggtaaagcgaattgggtcaacatcaaatctcaaaaagggtttgcaacaaaagtcaaacctcagtatcaagccagaaggaacttgtttagaagttcttccatgtcctgtcattgctttgggcactcagtcattcccagtaaggctgtgagctgagaagcaagagtggcttcccccaccctgagcgaccccacagcacagagcctccacgtggggtgagaggtggtgtcgcaacgcaggttagacagttggatggatagacaaatggcagggtgatggcaaaatggaaacatggggtagattaccttaacaggaaatatgaactttccttttgcaaaaaaagtaggtaagaatgataaatttactattacagctaatctctcttactcaaattaggtttttcctatattttggggatgtagtagaaatggaacagcaaaaaaggatcagctagatttttgttttatttttccttgcttagtgacaaataaaaaccgaatatatttatggtgtaccatgtgatggtatctcattatggttttgagttgcctttctctaatgactaatgatgatgagctttttttcatatgtttgttggctgcataaatgtcttcttttgaaagtaccttaaaaaaattttacaagaaaaaacaaccccatcaaaaagtgggcgaaggatatgaacagacgcttttcaaaagaagacatttatgcagccaacaaacataccaaaaaaagctcatcatcactggtcattagagaaaggcaaatcaaaaccacagtgagatgccatcttatgccagttagaatggcgatcatttaaaagtcaggaaataacaggtactggagaggatgtgaagaaacaggaacgcttttacactgttgatgggagtgtaaattagttcaaccattatggaagacagtgtggtgattcctcaaggatctaggactagaaataccacttgagccaacaatcccattattgagtatatacccaaaggattataaatcattctactataaagacacatgcacacctacatttattgtggcactgttcacaatagcaaagacttggaaccaacccaaatgcctatcaatgatagactggataaagcaaatgtggcacatatacaccatgaatactatgcagccataaaaaaggatgagttcatgtcctttgaagggacatggatgaagttggaaaccatcattctcagcaaactaacacaagaacagaaaaccaaacaccgcatgttctcactcataaatgggagttgaacaatgagaacacatggacacagggaggggaacatcacacaccaaggcctgtcagggtgtcgggggctaggagagggagagcattaggagaaatacctaatgtcaatgacgagttgacgggtgtagcaaaccaccatggcacatgtatgcctgtgtaacaaacgtgtacattctgcacatgtaccccagaacttaaagtataataaaagaaaaaaaaatgttgcccaaatgtcaaggagttttctccttgtgtgtttttctaaaagttttactctgcagccccaggcttaaatctgccccagtcccaggctaaccccaatagccacagactccaggcacccgtggcctcagataagatgaattttaaaatcagattcatagagggaaatgttcttatcctacttaccaaggaagggtaataatagctaagtaattgtgactccccctccctttctctctttttcctccacatacttgaacttatacatatgaaaaaaaaaaaaaaaaaaaaaaaaaaaaacaagaagaacacaggtgtctgtgtccaaaaaaaaaaaaaaagccagtattactgttggatcattaaaataaaatcataatttttatcttcagattattttcatatgattttgtgtcattatagatgagggaaatactattatctttcagatattttccttaaggtgaattgtttagcaatatgtttatttacaaagtgagtaatacattacatctatatttattgaggatttaaatgatggcatttcagaattttagctaatatggaatgtgcagggaaatggtttactctcttcccgtgaattctttgcaggaagccagttgtgaactggagggtccctggcctgggtgtcaggacagggagggtccgggtctcatcttgccatggctgacctgctctgtgacctcatcccagtttgtctatgcactgagtttgttttcctggagaaagcttcagccactgcaacctcggactctcctttctgctgggggaagccctctatggaaatgtgtgcaagtagggctctgctggccagggtatcagctcctcatgtcctcagctcatccccacattctccctgggtggcttctaaagtgtctcctccaaacccctgggacgtcagcaatcaccatgtaaagttcattggaccagaagattcctcaggttctttcacgtgtgagcaggccccgacaccattatcttgataggaaattaaacatctaggatgttgtcactttttatctctccaaaatttggtattgtcagacttcaaaaaacattgtaattaaacggcaggggacagtatctcatctgggcttactttccatttctctgacaaataattgttgattatttttccatacacttgtggtgtatgtgttcccgcttgtgaaatgcttaacattttctgcactatcttttattgtgttgagtatgcttttatttatttttaatgctttatatattcttcatgtaaatcaaaaatatatcttcttccagattataacttgaccttccactttccttaagatgtcttttgatgaacaaatttttaatattaatattttcaaattaattcatcttttcttttatagtcaatgctatgggggtcctgtttatttttccttactccaaggtttaagtacatagtcatctatgttttctaggaagagttttactttagttttatgtttttgtttttgttttggtacagacaggatcttgttatgttatccaggttggtatcaagctcctgggctcaaacaatccttctgccctggagttacaggcgtgagccactgtgcctagacttaaggcttagtttttgatatttaactccttaatccatcttaaattttctttgcatatgatgtgagaatacagttccatcttttgtcagtaatcatttttttcattctacttgttaaggaatatatgtatttttaatcttgtggcatactttctctattccgaagtctcctcatgcaatattcataggcctattgacaggtttttattctattttatagattaatttctgtatcccaagtcaacaccacatggatttaattactacagcttcagaataattcttaatgtcaggtagaactacccccctttcctgattctcctttttacaaatgttggagatattcctgaccctttacttcttcgtgtacacctataaagctccttgtaagtctcatttgatattttgattgaaatcacattatctattggagaagaattgagaccgttaccatattaagttttcctaatcacgatgtggtttatctctccgttgattcaggcctcctttaacatttcttaataaagttttgtgactttccctctagaggcatcacacaccttttgttaaatgtgttactggttttgtattttctgaccagatgtaaatgcttttctgaatggctcctctgcaatgacactgactcaccctgactgccaaggcttcctgagctccgccatctggtccagatatttcttggtcagttcttctgaggacaggatggagtaatagcaaggacaggacagcggcaacttttctcctttcccccatgcttgcaaggggcagctacctgcccctgaccaggtcacctctcattcctccccatgccccacccctgttttcttcgtttcttggcattgcccccatagcctctcctggaattggtcttgctgtagaatcagtagtttgtaggtcagcactttggtaagaatgagaaacaaatattatttaaattcacaacaaatgtacagagaatatttatgagccatgctattttaatgatgaggaaagtgaggttcacaaaggccaagcgagtgtctgtgatcacacagcagggaagaggcggggctgttcttgagggtctgtgttcctgaagactgagatgccaggggttcctgcctcactggaagttgtgctgaggtttataagaattaatgtttataaagttcttagaacacacctggtgcccagcaaggacatatgaacttttctattatcattaccgttcctctgtgctgatcttatttaataagagaagtaggatgtggatctaacctaacatgagatataattctggtgccacattagaagaagtttaaaagtgtttgatatttaaagattatagatcactttttttggaaattgaaagaaggtatttgagctgggcttttttaaatgaataaaatttaaacatttagtgggaagggctggtgtgaaaaacgtcatgaggcaaggagacaggaagacacacttttttttgcaaaaggataaatcattcctagaaaacatcagaattttagttttcttgctgttattttatgcccaatttcttctttctgttttaacttccaactttggttctagatgctctgtgtgtgtgtgtgtgtgtgtgcgtgtgtgtgtgtgtgtgtgtgtgtataaaagagagagattgatatgccctaggaaattattaagttccaaaattagcagcatttttataagttaattaaaaagtgtcatctgctccaagtaggtgaaaaatgcacatgatcatattggaatgggaggcagcatggagacactgctgttctgagtgcgaactcattgcaaggaagcaagacgctcactgagaagtgcggggtagacatgtgctccctttgtagaatcttacaggaaaccatgccgggttactgaggctggtaatttcaggttaggggagggtgattaaaatggctactcgggatgaagagtttaaaatgatgaggagtttgaggcagctgatcaatttaatcaaagtgcaattgctttgggaaggactgcctctttgaaaggattaatgcatacagcaaggtaacagaggagatgtgctgtcaaggtttttatattgctataaattctaactttgaatatatttgtgactttgtagccattaatttggggtattataattattttaaaatttttttaatctttgatttgaatagtgtagctataactatactactataatgtgatgaggttttagaagtacatttgatttttttgtttgttttctttttttgaaacaggatcttgccctgtagcccaggctggagtgcagtggcactatcatggctcacggcagcctcaatcttccgggcccaagttatgcttctacctcagtgtcttaagtagctgggaccacaggcgtgtgccaccaagactggctaccatttttatttttctagagatggcctctccctatgtttcccaggctggtctccaactcttggtctcaagtgatcttcccaacttagcctctcaaagtgctgggatttcaggcaggcacaagagtcactgtacctggtcatacactcatttcttaattttgactttattacatctaaacaccaaaatactttaatcaggaatcgtttcatatttcataatgaaaataaatgaggaaaagttatttcattgaaaattttactttccaacaagcttttctgaaatgtatttttatttcactaaaatagaaatatctgtctttttctacattaattctattagatatgttatatgtttcataatattctcagtgatttcatctaaacagttgaagattgtcaataacttatattgtttctaattcagaattgtatagattattgcactgaaaaaactcacaaaaaactccctgagcaatatcttaaagtctcctctctgtacacagatactttcagtctccctcagggaggtcatgataattatgtccttgatgtgttcatcctgggaaacctacaccgtatctacatttcaggatgtcagagtccttccctccacctgatcttgaaaacttcacttccccatgttctcctggacaacttctatcctgttaacaactggaaatcatcaaaccttactgtgatggtgtggactccatttcacctgctgttaggacacagtctcccaagcaaggtactcagggggtctgaagctaggtcttgagctggctccaactcaaccaggtctaggcactgacctcgtgtttgccccaagtggcttctgggagtgaagaggaataatgtgaagtctgcccatcgtatgtggtttcacacttgccattttctatagcccctttctctgggcttctcccctcctcagttctgctgtcaatacttaaagaatacagatatcacatacaaactgacctgtgtgtctaaagagcttagttttaaataatgggtattaaacaaccttttgttcaaggctctctacattaaatttctagagattcttatgtgtccgatctcatggcatgaatatctagtgttaacatctttagtgtagacagcctcaagcaaggagacctgtagagatatgttaggaattatcaaggaaacgtggtttttatgttgtttgttttgttttttttgagacagagtttcactcttgtcacccaggctggagtgcaatggtgcaatctcagctcactgtaacctctacctcccaggttcaagcgattctcctccctcagcataccgagtagctgggattacaggcacgtgtcatcactcccagctaatttttatatttttagtagagacagggtttcatcatgttggccaagctggtctcaaactcccgaccgcaggtgatccacccaccttggcctcccaaagttctgggattacaggcgtgagccgctgcgcctggccatgttcttttttttaatccaagttcatgtcatctggctcagaatccagttcttggctgtatgctctgggggcacaggcacccctagtcaggagcccaggaggcaaagcacacaaagacccccgacaggtcagaaggccccgcccatgtgaaaagggtttccaggaggctttctaatgctgtcttgttaaatatgaacagataatgaagatctctagatgttcgtgcaagccctgtaatataaaaaggacccaaacaaacaaaaaagaagaaaataaagactgttgaagagaaacaaagaagttatcattgactttgtctgagtcacagaagagaagctacattgggtttgctgaatgagaacacatttattttaagtagaagaaggagaagatgagttgaatcactaagagatcacttagaaatttaaagatgagtgttgaaatttaaatttaaaaaatctcacaagagaggtgagaagataaaggaaatctgattagaacaaaatggcaaagggatggaaaataagattggagggtctgtccagctcccgcaggaccattggctgaatcgtgtaagttccagaaagagatcagagaaaatggagagaaaacaaccactgaagaaagcagggaagacgatggcccttgaaaagctgaaggatatgtcacatgatgggagaaaacagatctacacaccccctcattcttgggaaatactaaaacactagaagcaaagagaaaattatgacgactctgggcatgagggtctaggggaaaggattcaaagaatcctcaagaggtaagaagacgagggagaaacgccatcagacctccagggaagttctctctcatctagactgttttgctcagacaaatattagttgggtgtcaagacaaaaatagacattttaacattgaggaatcattaaaaatctcccaacaacctttccataggaagcgtgggattatgtcttccaccaaatcaaacaaagaaacagaaaaccaacaacaagtaaatcaagacagaggaagacagggatgcagcaaaaaggagagagattacaagagatggggcagggactgggtgatggccaaggggcatcattacagcccaagctttcaagagaaccagtgtggacgaggccagatgggaggacacggacggctccctgagactttacacagaacaccaaattgatacctaagctgttcttccctaagaagaagataggacgtaattgggaatttgggatagagtcatgataagtacataggacagcgtgtgtacatggacacaattatattaattgcagggtagtaatgtgcagataagaaacatagtattaatgtgtggttcatctggcaatagtctcttcatagttatgacagtaaagcatttcctaataatctcatgtattgcccagtacaaccatgctgggggcagaaactgtgagaagggcttgggcgtggagcgcattagtgcacctccctgttcccctagatgagacgtggaagttcagtgcttcatgatgggaaaccgcgcagccccctgtggtagagacgcattcgtgtagggtctgaaggcaaatgccaaaagaaatggctagaagcgttgaaagctttccctctggggagctggaagtaagacagggatggtatctggggaacattgttttcataatcagccatgtagaggtattatacccctaaaccatgtgtgtgtatgaggttgatgagaacacacatcaccttttgaaagaccttttcttcctgttgttcattgtgatggctcacagttgcagcctgtcagaccacaagcaatctggagctgggctgcagaatctctcagggtccaggatgaagaatttcccagaatccagatatcacaggtccattgggtgacagggagctggagtgaatgagagcgcagttacgcgtttcatctttggaagaagagggcatcaaagttcttcagcgtccctcttccctccatccctctggtaataaacacatttggtaactgacaaaatgctccttccctgacattgacaaattccctggggttctcaaggttgttgcaagggggttgaacaaaggcactaaacacagctgtttcaatttctatatttagaactgaatagcataaatatagttttcattacaaatagaacggcttagaggggctccaaatgggactctagcttgccagcagctctggcagtcaccagaggttaagcccctgtgctggcaaccccgtgactcggctctgcacccctcagccactgcggcccccacagccaggctgcagggtccacagctccctaatgctgggccatggacgagttaaaccacacatttacaatgagccactagtgaaaacaagaagcataaggaaccctgagaataaaatacaaactagcaaggatcaaatctgcctcaaaattatctgtacccactctctaagtcacgtctattaatcaaaaccttcccattgcagatcactatttctctgattctttaaatgttaaaaggaaaaacaatttacagtaaaatgtataaccaaattagctttttatatattaagaataaaaatcactatttataatatatatatggagaagtgcttacaaatatcagcctggaatgttgtcttctacctcattatttggcaacaaacttttttaagaaccaaaaaaaaggaaggagagagagagagggaaagagagagagagagagggaaagagagagagagaagaggaaaggaaaggaaaggaaaggaagaatagagagggagggagagaggaagtgggcaaagatgggagggagggaaaaggaagggaggggggagggaagggaagagaagggcagagaggaggggaggggaggggaggggagggagacagggagagagacagcgagagaagaaaggagagaaaaagtgaataaacaagtttggctttctttagcctcaaatgcaaaactttcaaacagaatgtcattttatgcctacttttcattacaggatatatcattaaatttcagtctgtctcttaatatataatctgtctaaataactaaacataaagtaatagatcattcttgaatttttggacaaataatgattttttattcactacataattaactcaaaataaattaaacagcaagtacccttgttaaagggggaaagtaaaaatctttttcatatatcatgaatattaataatgacaaagttaaaatgaattttataatacagctatgaataattcattgatctacaactgagtttgtacaatcacttatttgttctatacgatgtgaaaatgaggaaatggcctaagttcctgtgaaagggaccctacagtcccaaactgaagagcagggagtgtcacccctgaagctgcagtccttccttgctgccacgctatctgatgtgcccaggtgttgtggctggccatgagatgacagatagaagtttgttagtttagttcgtctttggttcactcatgaaattgagcaaacttcagttccacacatgctctatgtctgcagtgggcccagttctggggtttagaatctaatgggctctgtcccctgccctgacgagctcgtggtggggttggggtgccgcttaggagatctacagttacagcatggtatgctaaattctctgacagagtcaagagaaaaccataacacaagatgtgttgcagcctccaaagcttcctacaaaactctttctaggaaacccaccacattttcagtgacagtcatccgtttataattatttatctatagaacaatttttctctgtactgaggcctttccttattctttctttttttaactgcgatgattctgaaaggtgaagagcctacgacgcagacataattaaggactttcagagagaaatttttcatagaaatgtcacccatgcattgtgtgccccctgccgaactgcagtcctgcgtccgtttgtgctttggtgcaaggcctttggcagggactgtgtggagaactcactgcatgcatgtccaccctcagtggggatgaagtgccgccagcactgggcaatgcacctggttccagggggctctgctcatcaacacaaacggaaagtgagaccattgggtgcttcctgcggtgctgtgagaccgccgccgggtgcttactatggtgccacgagaccgtcgggtgcttactgcggtgccctgcatgttttgtgttgcatgggacaagatggcatgtgctttcatggaaagtcactggaaataataaaacaatcctgcgaaaagcagttgcgaccccgttgatgccctcacccagagtaagaagctgggatgctatggccactgcaggcccactcagccaggcaccctttgttcagagaaatgggaacggccattcagttcccgccagtgtgggtgacacgcagaccttttgaggaataacaagaccactgtgtctataagactgagtgaattcttccttctctcaaacagcagacatgacccaattgtccttgagtttatataaactgcagtcacacttaggtatggtttcaattcatattccacttgaaggtagtaagatctatagttttgttgcccccatatgaatgaacactttctttaatcatcctcaatcgcttctaaatattgagggaatcctgggcagaaacatactagagtggaaacaagacacagatgtcactgagaaggagcctcacatccctgggctcatctctgaagtaagagaatcatacctgaactgtcctccccacaggggatgatgaaaacccaagagaataatggatttaaaatcattttgcagaatgttaatatgccacttttactactgttatcattccccagtgttagaaaaaagacttacttaaaatgtttttacctaataaattagtgtttattcatttatttattcattcagcataaatttgttgatcattagtgtgtgccaggcacaattctagactcttgtgatttacaaataagttagatagcaaagtgtctaccataatggaatgtagcttttccgtggggaaagacagaacatgaatgcataaacaggtatatacacacacataatccacaagggaaaattgatgaattggatgtcactaaaattaaaacttttgctctacaaaacactctgttaagacaacgaaaagacaagcaacaaggtagcaaaaatacttagaaatcaaatattcatcaaagaactagtatctagaatatacaatgaaatctcaaattcaacgatttaaaacaatgtagtaagaaaatgggcaaaagacatgggcagatagttcactaaagatgaaatttaaatgtacatgaaaagatatttaattccatcaactattaggcaaatgccagttaaaaccatgatgagctgtcactacatacctagaatgagtgacataaaacacaaagaaaacaccaaattttgactaagacaatgagaaactgaatcactggtacattgatcgaggcaaagtgaaatggtatagccactcacaccagtttggcgttttcttttaaagctagccatgtaattgctgtatgacccagctatcccactctcaggcattaatcccagagagatggaaatgtacattcacagtaaaacctgcacacacatctttacagaagctttattcatggtagccaaaaactggaaatagcccagatggcctccagagcatgaagagttaaactgtgtacagccatgccatggaatactactcagccattagaaagaataaactattgatacaacccagatggaagctccagagaattatgctgaataagaaaagccaatctgcaaggtttgcacagtgtatgacttcatttatagaacgttcttgaaataacaaaacgacaggaaacactgatgagtggttgccaggagttcagggtaggagagttggctctgaaagggaaggaatatgggtgtggctctgaaaggaaagaggctgggcttggttatgaaaaaagatggtgggggtggctatgtgcagggcagaagtgggcgtggctattaattggaagggggatggacgtggcaatgaaagacaatggggtggtcatggttatgaaaggaaaaggatgggcgtggctctgaacaggaaaagggtgagtgtggctatgaaagggaaaggagtgaacttggtgatgaacaggaagaggctgggcgtggctgtgaaagggcagggagtgggcgtggtgatgaacaggaaaaggctgggcgtggctatgaaagggaagagggtggacttggtgatgaaagggcaggatgtgggcggggctataaaaggacacagaggaactcttgctccttcggtgatagttatctgcatgttgactgtggtcatagacacagaaacctacactggtgctaaaatcgcatgcacatatatgaacacaagagaagtaggaaatctggacatcggtgggaggaatcaatgtcgttctgcctgtatgtgctatggttctgcaaaatgttgtcattggcggacactgagacgggtgcatgggatctctgtattctttcttccagctgcatgtgaatctacagttacctcaaaacagtttaaaaccaaaatctgtgtgatataatcccagataatgacaaatgccgtaaagaaaaacccactcattctcatttgggagattagaggaagggtggatgaggagaaaggccagcaaaactttggctgagaacagagtgtgactgagagccccaaggagcttccgcctggctgctgttatttttgttttgcagctaagctgcctgctaaacatgccgtttaagagttcatcctgggaattccattaccagtgatcacaagcagcatctgtgacagggaactgtgagcagccagaaccgtgggtgcatattccttcctaccgcacctgaagaactgggaaaaggaggtcactgactcactcactccttacctaattgttctgtgaatctttacctagtgaggacctattgttaaaagcacactgtagttggatggatggatggatggacggatggatgtgcacacacatttagtaagcagcagcatcatataccctgcaagggcatttagcctatagttcatttgtcagtggcttttaaatctacatctcataaattactcccagacgggaatgcatcttggaacaaaggtagtctcacctccagcaattactctaactccccttcctccaagaggggttctcatgtttgtgagggtgtgtcctcacgcctggagagcctgagggacccaggaaaggagccaggagcacccaaactggagtatttggacaagcagccctgatgagaggctgaaggtgctttgctgtttcacctgggaatgggaagggcactcctgactccatgatttgtgaatgtgcgcctggagaacagagcacgctccaaataaaacctttcattttgtccacaaaattctgttttgtagatacttatcactttaatgaaaaacctgtccctctcctgacaatgatcagtcatatctgccgttgaggcactgggactgcggctgctcccacaggaatggcctgatggtctccaggtcttcctccttgttaccttttgtgaacactgaagaatagaaaaaacacttttcccaaaacaacgatggacaacacgatgaatctatagaacatgctaacaagcttaaagtgatagagatgaatttttaggattaccagtagagtaagtcattgtgtaaattaacgtaataatattttatgaaagcaaaatattatgattgttttaagcatagtactggcaatatattagagtggctttgattattaatgtccaatcctactatttctcaatcacttgttttgctttatgttggtttgtttataagatttatttaaatttgtctattttttgtctttcaaatggtgagaattaacttgcatttttataaaaccactatgtcgaataccattccaacctttcttagtcaatttagtaagtaatagctcagaatgtgttggaaataactgtgcctactatataaacattaatcacagaagtttatgcataagccccattttaaacactatttggatgttgctttatagctataacaaataaaaaattttaaattattacccaagatgttgcattttgttttgctttttaattaataacatgctcttgtaaaatcttttatgtggaaatcacaacttatttgctatcctttgaactgagaaggacaaaaatacaaacacacatgacaacccgctgatgatataagctatgaaatacatgtgcagatacatcccgtatgcttctgtaatttgtttctacacattttgtagtcttaatactttgtagactcaatcataaaaatgactctttcccttagttttataagaatatagttttgtgtattttttatattacaaagagtaatttcattaattttcttaaaaggtttttctataaggaatgatttattggaaattaattgggtgtgatacgaggttgttgtcaccaccatccctctcatcttatctccatgcatctcatcatctcttgtgtctcatctccatgcatctcatttccatgtatctcatctccatgtgttcataatctccatgcatctcaccatctccatgtgtctcatcttcatgcttctcacctccatgcacctcatctccatacctctcatcatctctgtgtgttccatctccatgtgtctcatcatctcttgtgtctcatcttcatgcatctcatttccatgtatctcatctccatgtgctcatgatgtgtcttgtcatctccatacatctcatcatatccatgtgtctcatcatctttatgcttctcacctccatgcacctcatctccgtatctctcatcatctctgtgtgttccatctccatgtgtcttatcatctcttgtgtctcatctccatgtgtctcatctccgtgtgtttcatctgcatctgtctcatctccacgtgtcttatcatccccatggatctcatctctgtgtctcattatctccatgtgtctccatatgtctcatcatccccatgcgtctctatgatctcacctctgagtgtttcatctccatgtgcttcatcatccccatgtgtcttatggtctctgtgtatttcatctccatgtgtctcatctcctagtgtttcatgtccatgcatctcatcatctccatgtgtctcatctccatttgtgtcatcatccccatgcatctcatctctgtatgtctcatcatctccatgtgtctgtgcacccagcgtggcctcattgcctacttgcagcagatgcattaaagacctgacaatcacgtccctcaagtagagttttgcttttactgtgaatatcagcctcattattctgcctttttgttcttctctagagtggccacatctggtggaagaagaaaaaaatgtagttattgaattcaatcaagtgtttgcatctttcaagctatcaacaaaattccatcaagaaaggttccagttggtctcacagacgtatggatatccgaggagccacctaaaggtgaggaactctatgtggtattaatattttaagctttacatgcagacaggtgttttgcatatttaccttaaaatatgttactttgaaaaggcataaatataggtttgtgaatgaagcagcattttatttgataaagaatacaacacctcttgcttttaataaacaattcaatataaagtcagaatgtgtaatctcttggtaaacatagactcaagtagccttctgttatctagttataacatcacccaaaagaagaattgataagcatactaataggcctggttcacctttcagcagtcatagagaagctcccttgtacaaagcccctttaaaatcagatccctgtgtccattattagttctattttgggatattttatatttgaggaaattaagaaggtcattaattagggcctgttttgcattgcctagggttcctgtaggtttctgtcagttactgttgacaaacgtcccttgctgccactgtgggctctgggagtcatgcttcttgaaaaacttcaggttatggccttttgttttcaaaataattgtaaaatacatataacatgaaatttaccatttttacagttttcaaatgtgcaattagtgatatcaagtgtattcacatagtggtgcaatggtcaccacctgccgtcttcagaactttttcgttccctaactgaaaccctgtccccgttaaacactacctccccaggcctcccccacactctctgggtcccagcattctgctttctctctctgtgaatatgaccactagtcttacctcatgtgagtggcattgtacggtatctgttcttttgtgactgctctctttcacttagcataatgccctcaacatccagccatgtcgtagaatgggtcagagcatccttcctttctaaggctgaataatagtccactgtacatctgtcagtggacacgtgtgctgcctccacctttcagctactgtgaattatgctcctattagcttgagtgtagaaatatatatctgagtccctgatttcacatttcctgagcatcaacccagaagtggaattgctggatcatgtagatcatattttatttttaatttgttcaggaaatgccactcttttcaatagtggctgcaccataaagtggtgcattatcgccacagttcacaaggattccaatttctccatatccaggccaacacttaactctttcctgtggttttcttttttaaaaataatagatatcctgatggatgtgaagtggcatcctattgtggttttgatttgcatttccctcattattagtggtgttaagcatctttccatgtgtttatgggacatttgcatgtcttctttggagaaatgtctaagtcctttgccttaatcagttatttgtttttgagttgtaggaattcttatatattatagatattagctccttatcatatatatgatttgcaaatatcttctgctgtttcatgggttgcctttcactttgttggtagtgtcccttgacacacaaacatttcgttgttttaagttttgatgttgcccaatttagacatttttttaacctatactttgggtatcatatccaatcaatcattgccaaatccaatgtcaggaagctgatccttcctattttcttctaagagttttatagctttagcctctgtgtttaagttgctaacccatttggagttaatttttctttttacaggtttaaggtaatgttataactttattcttttgcatgtgggtatactctgtgtgttgaaaagactgtccttgctccaataaatggttatggcacccttgtcaaaaatcatttgaccgtatatgcaagaatttatttctgggttctctattctgttctactggtctgtttctctgtctttatgccagtaccacactattttgattacagtagctttgttgtaagttttcaaatcagaaagtatgaaatttctaactatgttctttttcaatatagttttggctatttggggatctcttaacatttacgaatcttgcaatatatttatttttgaaaaaaaaatgaccttaagattttgagagggattgcactgaatttgtagatcatatggctaagtttcttaatgagacagaaacagggtttcttatattttctggtaatgaatttctatatgcaatttaagcgtgtaccatgaccttatttctgtttggaaagaaaaagttcagatttttacctagtttttctgaccctggtatgattagtaatgagcaattacataagaatatcaaatataaagttttctaaaatcttccccaaagatgaagatgttgtgtctgtttagtttcttaaaaactcagctttgtttttaaggcttaattctctagcagtaattttgaaggctttgttctctagtagtaatttcttaggtagaaagtcaacaatggcatgggatgttccacctaatctcagtgattgaagatacgctggtgtccagcggttcattgctggacatgtttcctgggccgtattaggtactcagtcacatctcaatgaatccacagaggtctgtgcaggctgttgaggaggacccagaagagatcttaactaggagcagaggaatcaaagaggactttgaagagcagatcaccccaaaagtggatctttaaagattagtttattagatgaataaatctggaaatggctgacttgagagaagaaaaatacaaaacttagagatgggaagcatcaagtaatggacgtggaatactattcagttgtcacgtacagctgcatgttaggacaaagggcttagctccccatggcttaggtttggtgtttataaaatgagcatgggtactgtctgtgttctgtggtccatgagagacagaatggggtgtggttctatttcttaccctatcagatggaacgtagaacagaatggtcctctctaagaagttgcatacctcctctcagtccttgaaattgatgactactttctttcactcatctgcctgccatcctttctacccccaaagttggatgttactgtattcaactttctgaattcaattttagtagctgttgtgcagtttgtccaactgtagactccaggaattgttctgctagtcctaccctcagattacaactcagaatcagaaacactcagatggaaaggcccttagcaccaccgccacggcaaagcagcagctgttgcacacaaccccaagtcccgctaccttctgccgctctcagctcttccctcccctgcagtgctccccctaccatgtgtcatcttttctgtctgcagcagcttagcttcctttagcatctccacttaagaaggactttggggcttgatcttatgggagaaataaaaatgccatagaacaagatttagatttagggcatttttctgtcctcgtgtgtcccaattagccactgtgattgctgagccgtgaacacctgtggcgcctccgcagctggtgctctaggaaatccaatttcccctgaaccagagcccaaagagaaaatcacactctgcatccaatttccatgctaaagactgtccttaaaataaaatcaatatctgtttcccgaaaaactacatgaattgtgttctgaatggtgactattttaaagaaaagcatatcgtgtccagaaggagaaatctgctgaaatagctccaactctgtaaatctatattctttgaccctttgaaagaaatatatttaaaacagtgagcaaatgtcatcaggtagtcctgaaactgccagcgatcacttgtttttgggcaaatctctacaaaaaatttgttcttttttttgtaaaacagaagtaaatggtcaagtgagatggatatcatgaacctaatgtaaactacaaaagatgataatagctgctaatcatttattaagcatccactctgtaccaagcttggttctaaaagtgccactcaccatgtctcatttcatcgtcaaaaaaccccctatgaagttagtactatatacatatttatatatatatatatacacacacacacacgtatataagtttattttcacaatactgataaagacatgcctgggactgggcaacttatgaagaaaaagaggtttaatggactcacagttccacatggctgaggaggcctcacaatcatggcagaaggcgaaagccatgtcttaactggcggcaggcaagagagaaatgaggaccaagtgaaaggggaaacctcttataaaaccatcagatctcatgagacttattcactaccatgagaacagtatgggggaagctttccccatgattcatttatctcccactggtccctcccacaacatgtgggaattatgggagctacaattcaagatgagatttgggtgaggacacagacccaaaccttgtctatctgtctatttatctatctatctatattcataatttatgttaggagaaaattaatatacagagaagttaaataatttgtctaacattacacagttaataaatgacacagatgggattcaaatttatgtaggcattttaacttccaagccaatgttgttaactactgtgaactcactctactatctctacaaagccatatgcaggtattatacattattattcttgtgtctctctgataaccgtgtataatatatatcacttgtgtgcatagataatgtactatgtgtatatacacacagagaacttgtggaactgctaggttgctaccaaatcaaattgttttgctttaatgactcagtgccgttaatataactttatagtcatcatcctcatacatgtttccccagaaagcaaccaaataattttgagtcttgctttgtcaagatcctccttaactcatggaataatgcttttcaattgttttcagagtgattcatttgtgttgcttctatcataattgttatgatttcattaaaacaatgtttattgcaatgtgatgttataaaatattatggatagttaaaaataaataaaattgtttgagcttttatttttctggactgtagtttaagaaatagtagaaatttgcatttctcatgacttgtgttatcaaagtcacaggccaccaccctgtaggagagtaggatgccaaactactgatccctgtcctcctattccggagtgtggtggaaactgcaaatcatggcatctccttcctcctaactgaggacaattacctgaagtcaggcgacaccctgatggaagcaaagttggaaaataggatatgtggttcaggaccatggaccgcttagggggattcagatctaaggggcagtcagatattgtcaagggatttagacaccaggggtccacctaggaggatgggaggcaggagattgccagagatgagtttctctttgctttgctgagagtcctgctgtagttagtggagtcagcgcatggaccacctacctctggtgtgtggcacagccttataggtccttctgggggctgtgtgagctgagaggtcccagcggtgtcaggtgccccacaggtccatggaagcttcacacaaatggattttccacaagagaatttctaagcttgaatgcccttgtttccatttccccttggaacagaagtaggaaactttctaagcctgaagttgtcaagcaagcacgacattttgctggagctacacaaattcacataaatctcaggaagaggtatcagtttctgacctcatcagaattcttttataagttttattttattttttttctggtcagggcagaagggattggaagaccgtggagtgggctaaagtggttcctcagattactggtactaatggttttgaatatcagactgcatcaggctctatccccgcttcacaaaatgagaagcagtaacacggatggaggaggtgcttggtgcacagtgtctgcattaaagccgggtctgtgcctccaacaagctcacagtccaaggtctgacacactccacagtttatggacagccccatgtcttgaaggaggtacctctacaaattccctggagacaatttttcttctagaagcctggaaagaaatttgtgttctgcagcctttgctgggaaatggtactgtggtggtttaagctggatactttgttcactgtttcgtattttctccttagtagtagtttacattatttccttgagttctaattttaaaaagattatataccatcatattcataaaaatttactattgttagtatgtttggagaagcatatcctatttaaataactagcagcatcttccatttaagcttgttgtatgtagacttcgttgtctgcttagatcaatcatccttcttaaatgtagttagccaaatttttatcatgaaaaatcggtgttgagcttttaaattttcttccaaaaatagaaatgtgtgagtttattcaatatgctaagcctcatacaatgtatctcccagagaatattaatgtttagtaatacataatctttcttttcacttgtgaaggagaattctcatgtacccacattccatagaaggttctagaatggccactgggggtacactttgttaggaggagcaattcgcagatgtatcattttcattagtcttgtggacaaaattctaatttgaccaggataaaaatcatgttagcgttaatatcataggtatctttcataaataaataaatccagcgtaaaatctatgggtgggaattaatagaatatggccaagtgaaatgaagagcatatttaggtccatgtaagacattaaacttaaacatagatactgcagaaatgaaatgaataaatcttgctgagtcaaaagaacgttcaagacaatgtagaaaggtggaaattttagtgcaggtattgttttaatattgtactaataaataagaaattacttcattaaaatatagcataaatgggtaaacgtagtggcgtattagcatattaaatttaacaaataaaaatattaactaaaaatgggcaaaggatatggaagacaattcagaggagataaaaatgaatttgacatcagaaaagctgctcaaactcatgacaccataacttccaagtggagtcactaagtcatggctttctttccctctcagtggacagtagacaggcaggctgatagcaaagtattgaaaagtatgggttatagaaaataattagcaatatcaatgaagctcagaaagggtgtatcctctgtactagtaattccacttctagatatttagtgtacaaatatttacacacaggagagcaaagtagcatttataaatagacagccagtgcagaagccaagagcatgacctctgaccacacctgcaagaaccaagtgtggcttcacccgggacgagctactggtctctacctgctgtggtttccttttctgtatgccaggaataatcacagtatttatacctaagacagttgtggtaaaaattgattgaatgagtgaaaatggcacttgtcacttagcaagcatttttgtattagaaatgttggctatttttattgcattcattacaagtcttgtttataagaacaagattctggaaacaaatattcatccataggagactggtgaaataaatcatgctatattcatgtaatggagcatgataaatttgcttttttaatgaaggagattatataaacctagcccaagatataatattaaacaaaatgtacagggtgaaaaaaccatgcatgtaatgttatgatttgtgtattataaaaagcatgtatgtatacgtagatgcttgtcagtgcattggacttcagaggaagaccacaggacaggttgtctcagagggaaggaattaggtgcctggggggagaaaaattgcttttcatagtatatctcttgaagctttaagaatgctgtgccatgcatatgtgcattcctttttaaaataaattattcatgtttatattcaccacatattcacggagagaccatgtgcaagtcaatgtgttgaatctgaaaagggtcccaaagatacagaagacgacagcggccctggaggagctaaggaccccacagcaggtcaggatgtgcaccctggggatgtagctaagacagacccatggaggaccacagggagggagggttagagccatatcattggtggcaaacatagggacaccaggcccttggaaagaagaaagttggcctggagatccaaatagctttattgaatttgagagaatagtgtggaaagaatcttccaccagctgagcaaaggcactgaggcagaaaaatataggtcctgtgtgagaaaaaggcaatttgtctaatttctaatgcattcacagtacaactacatgagcagaggatagggaaattgggacatttcattgctgggaacttatttaaaatgctttgcatgctctcttaagaaaaaataaataaaatatgagaggggtgagcaaaagaggatcccatccacaggctatgaggttattcattttatttttctaatacagtttcatgagcaggtgggtggttttgatgatgctctatgaattattcaaagcacttgcagacaggagttttggcccctgcatggctctgcagggacacccctcccagagcctctcccaccaggcctgctgcaggaggcttgctgtttcagcaccttaaggaagggcaggcaaaatcaatcgcagtgcagcagtctgcctgcaagaagcctgccccagaaactgtgatatctgcacagtgatggatgaggctcatatccttgtcatttcatgggagatttacatgcataactctcattagtgctaatgggagtttcttgcataaatcttacatgcaggaaggtgagaaaaacacagttttcttttattcctcatagactttctgttcaagccttcattccttcagtgtgggggctgcccttggtctattatcaggtaccttgcacttaaactgccattgctcctcatttacatggaaatggaccataaacagggttctgaactcacatgtttaaacacctcctacttgtgccatcatccttgcaagcacagatatccaattagtgcaactgatccaacaaatttccatgtgtcagttgtacctgctgtgaatgtcattctgttcagtgataacagggcttgcatcccaaaatagaggtaggggttgaggcatcgggaacacggagtccttgttgtgagctgaattatttttaaagtgactacagacaccaatcgcttttaaagtgctggcctgtatacgaaaccagggttgggttttgggggaagaaggctagccatggcccccatcgcccaatcaccatctctccccaagatggttaatcatgggtccgtttatactatcaacgcaaatatttagaaagacctagagtcatttcaaagaagacgtctaagattctaagaaggctttgtctcaggctgcatctaagaggagagactctagcattttcaaaagcccgttgcagagttttgtgctgtggttcgaatgcatgtcattttcttgtcccattgtaccacgatcagaacttctgggtgtctgttgctgggatgcagggagtgttggtgcaggaatttgatactctatgggcacaccatatctgcatttgcaactttacgcttatgtaactgctgataaaagtttatcttgataacttcagatatagttagctgtgactgagagtgatgagtgtggtgtatcgtgacagaaagactttaattgtaactaaaattgtgcaatgatttatagacaagtatgaacagtaggtactgtcttgccattgtatatatctatttgtgtatggctaacatgggagtgcacagggacctgtatctgagtaagccaagacaggttaacagaacatgtatgtacattaataggaaaagagaaataataacacaaccactgtaaaacattcacccagaaaactaatactttaatcagttaaattaaaaatgaaagaaaagtaccttttgaactctctccttactcattttttttcaaaaaacaaatgtctgtttgattgaattcatctctgtcagccaaaatgataaaaatcgtgtcttctctctaatccatcaaattctccatcagtcaaaattttgccttatgtttaatagagattatttgtaaattaatatttattttagtcatggtatgaacaatttgagaagtttttatgtaccatattcatgcattcattcactcattcaacagatattcctgggttcctccagggtagcaggcctgctcctgatgtgggcagcactggagggagcaaaataaagatgccacccctgagctcagggcaaggaagggggtgaagggagccagtcacccatgagtaagacatggacccattgggggaggaggccacacagacagtgggcacagctctttcaagatgtcttgcaggagtgtccaggaaagaatggaaggggaactggaggcagttgtggccgggactgtcccaggggagaaagcaccgcgtttatgaacttggaataatgtaattaagttaacaaacacattgtagggtgtggctgcaatgtacaatgactttgtgtggttctgaggccccttttaatttctgccattggtgagaactgataacaacataacaagaaatttcatggcattcccattgtaatttactgttaatcgaaggtaatatactagaacaaggtttctggaaaataaatgaattgtgtgactacatttaatacaagggactaggtggccgaggcaggggtcagggattgagggctcaagagtcctcaattttggaggaatcatccacagggcatagaagccatcaggaatctttgcagagtgattttggacatgatagctgtgaaccaggggctgaaaccctcaaagaacgtgggtgaggtccccgggcttggggccacatcagggtgtcgctttgagtcttagatgaactgagcttcacagctgacaagttttagggaaacagaggaagactggtccagagtccaagagcacacgtgccacccccggtgcagtgctgctggcaccaggtgagggctgccggagccagtgttgggaagaccctgcctgcagggaagagcaggggggaagggcagaggggagagaacatgggcctgggaggctatcgcctgctgtcatgacatcaagaatgaggacaggtgtggtgagagctggatgcatgccgggcgtttgaggcttagagacgaagggcagatgccttgctttgggaacagatagagcagagcaaagaccacatagtggctccaacctcagggtgggtgacagggaggccgggaccattggtgcagggacagggcctttgtgtggttctgaggcccttttaaatttctgccaatggtgagacctgataacaacataacaagaaatttcatggcattcccattgtaatttactattaattgaaggtaatatattagaacaaggtttctagaaaataagtaaattagtgtgactgaatttaatacacatagcattgcgactttgagcatggaaataatataattgcttaggattaataaatatgctccgtatcacaaggcttatttgaaattgtttgcatttgtcagggttcttcagagatccactcaaagttgcaagacagatgctcttcaatttatggtgggacaactccctaacaaacccagcagaagtaaaaaatctcatagttgaaaatgcatttaatccacataacctgccaaatgtgatagcttagtctcacctgccttaaacttgcccagaagattcgtatcagcctacagatgggcagaatcatctggagacagagtccatcttagagcatctggggttcatcctcaggattgcggggctgcctttgagctgcccagcccctcgagagggtgcccttcccttgccactgaatgtctctggctttaaacagacttacaagaagcaggagacactctgtgctatctaccgtcttgaaaacaaaactctacttctaagattagcttaaagatgatttttttggtaaaagagctaggggtgtggagagatgctccacaaaactatttctttatgggacttagatttgtagtacaatctcactggaaggaagaaacttttctacagagaatctttgagttcaaaggttctgtatatgatggttaaagtaggaagatggttgttattaaagattttggctagatacagctgcagatgtctgactttaaaaccatctgcttaagctgcaagatagaggtaccaggcccttcccttctttccggaaaatccataatgaaaccagagaaatttgcctccggtgagcaagcagaggcaaaggtcctcctggggccggccatgggggacgggctccttctgcagggagggagatacctccaaacactctctgccccagaagcatgaggagctggaacagaaaatttttctgatgtttggtcatttgataagagacaaagaatatctttgtaaaacgaaaagtaaatatagcatgacccaatctgcaattaattccaattcagcttgcaaagcactgagcagctcttgggcggctactctgagtagaccaagacccagcagggttccaacttctctctcccccagtagcttcccatctagaaggtgaactttttcaagggaaagaaggcaatttccttcaagtaaaacacttcatgttggatttgcaattgaccttgacaagactcaaatgtggcgatttcacaatcttcatcagctttcattaatagtacaattatgccatataatttaacttccacctttccccaaagctgtaacttaattcaaaagttcaagttacctcaagcaaaattattaatgcaccagtaatatatttttatatttatctgctaagtaacatttttctggataaaatgtcaggtagtttgcaattttacgtaaacacatttttataaacaaatgtatctttccagaaaaggcagtgtaataaaagaaattatttttcaccatgagttgtcctgtttctctttttgccttatttgagtgttcctatttttctgctttctaagcacattggttactatggagatggtgtcagaattagcaatttcaacaaatgcaagtagaaaagtagaaaccagttaattatagttttttaacctcaaattgatataataataaatgaaattttaaaaaatacacttaataaaactacttttacttcaaacttttaaataattacccccaaaatgaccagcccccaacaatgatccattcttcagaaattgaccaaaaaattaaatattgatgctttttccaaaatatcacatgttcgtaattttccctgaagagtggccaagtgtctaattataagggcatatttcaatttccatccagaacttaaaaatgtggataacaaatttacttataattaattttcctgcctgaaaagtaatttccagctgcatatgataaatacacattgctctacgagggaacttctggaacggggacaccctgggtttggtcagggggtcgcctgcaccagagcctcacactgactccacagagcagacattctcagaatcgagttttaaagattaatctgcatggatgatttctgtccctccctagttccaaactttccatcctgtagccaaggaaacttgtcataaggacaggctggatatgtacattgcatgtacaagaatgtattgggcacacgtagaaattcagtcacttatcaagaatccagagtacacgtgtgctcagcacagtgtcaagtgctgaggacacatcactagtttccaaatatacagccctaggaggattattaaaccagaacaccaggacaaatgaaatgagactgaaatagtagccctgacacatatcgccagctgtgatcagcacatattaagatggattcctaaatgctgaggggatgttgtgcaagagtccattcctagcttcatttccctttcgcaggccctcacgcatacacctgtaggcatgccctttctatgactctatcacgtgttgtccctgcctgtttgtcatgtctgtgttcccttagccacctcgcttcttgcagccaggcatgaataagggtctcctggtttgatccatctcacacacttatacctgcagccattccacgtggaagagtcttcctggctccttcccaagtgtcatgtccctagtcacactccgctgagtaaattttaaatggaggaagcatgagcgggctgatgcaggcatgcctgtgtgagctcaacttctatgcccaaatgaactcatcctattcctcatcaaaacccatcaccagtcttctgttaaagttgtctatctttgattttgttgatgggtggagaacctgtgacgttcaaagtcatatccattctttatcgtctatcatgtttttcctgagcaattcacaccttttcaccttcataaattcacctttgaacattcctgcaaatggtaaacttccctaacagtcaggaaacggaggttctgactaatttactaatttattgaactgaagatttgtccatagactacatacatcaaggtcatatgtagatttttttttttttgaaagtgggtctcattctgttgccctggctggagtgcagtggtgcaatcatagcgcactgtagcctcaaatttctgggcccaagcgatcctcccaccagggcctcctgagtagctgagactacaggtgccagtcaccatgcctagacataggtagaatgtttataaaatagtcattgtgagattgtgagggtcaaataccacaatacatgtgagagagtgttgtgaaccataatgtccccatgattattccttatcaatattggggaaaatgcgctccgtgagattctgttcattcccccggtgcttgctgactgccttccatgtgccagtgctgttccacgtaccgggaaattagccacataacacaaggagctagaggtgacagtgcctcatcggcagagagggtggtcagtggctaaacagtcacaacccagtgtgccagggctgtggcgaaaggagccacgaacaccgaggaggagggaccagaccctaggggaggccctggaaagagtgatgcctgaacataagaagggctgagttcagagaagggtgagggagctgcacatatggggagctggggtgtgggttcaggatggctgatgtccagcagggaagagggtgtgtgagggacagctggacacatcaaccagggcctcaccacctgtgacctttccacatgccagggagttcggattgggttccagagtgtactggaacccactaaaaaaaaaattctaagcaaacaagcaacgtcacattacttctgactgatgactacacataaaaaatcgatttgaaggggagatatttggtggcaggaacagcaactaggatatgctacagaaatattgacaaataaacatggcgtccagacaagatgagccgaactgggccagtggagagacgccagggaggcagcgctggccaaccattgagtaatggttgaaggagggtggtgatggcaggaaggagaagtcaggggaatccaagcacctggcttgatgttagatctgatggtgtcattcactgatgtggggagaagataatggggtcacctgagaacagggtgagattctactcaaccaaagacacacttaaaattgtataatgttggatttaaaagacaaccccaaactctagctatggaatccagttataataaaataatagtgataaaaaggggcatgatttctaacaaagtcaatcttaaacagtgcaggccattctaatagtcccgtgagaggcacacatcataaaataatgccgtttaattcagcgagcacgtattgtagtcccggtcctattgctcaggtttctgtccaaatgaacccatgctacgtctgcatggaatgcaaagttcaccaagacatagctcctcctctcaaagagtttataacctagtaagaaaagcaagacatggacacaacacaagtgttcatccaggctgtgcagagtcggtgctgggagttaggggaggttacacagtgatttgaggattcaaaactatagttttgaatgtatagttttgaaaactgtatattttgaaaaactgtagttttgaatatatagtttgaagtgtgtagggggttttttttttgtttttttgtttttttgggggggttttgttttgttttgttttgtttttgagacggagtctggctctgtctcccaggctggagtgcaagtggcacaatcttggctcactgcaacctccacctcccgggctcaagtgattctcctgactcagcctcccaagtagctgagattacaggcatgcaccaccatgaccagctagtttttgtatttttagtagagatggggtttcgccatgttggccaggctggtcttaaactcctgacttcatatgatctggccaccttggcttcccaaggtgctgggattacaggcatgagccgccgtccctggcccaaagctacagtttaaaaaaaaaaaaaaaatcaactgaatctgattacttgttttcctggacaagagaaccaccatcataactggagaaataaatgatttcaagtctcattagcaacagcaataccccaaagggcgtctcagccatgctctgtgctgggtgatagagattcaatgggaaataacgtgggcactttcccagttaccgtagaacttagaaaggttggcagaaaccaacagacagacacataaaacaattgcatgttgtaataagaatatcgtgcaggcagcaaacagtgtggtgaggaacaaacgagatggcaaatttagtctaagtggagtgatttggaactgcttttccaaggaaaaccacagctaggctgaggcttaaagtaaaggagtcagccctaagcggggggactatttcaggcagagggaacaggaaggaccctcggacactgctgagccaggtgtattgggagaaccaagggatgcctctgttgttgcatcactcactggctggcatcagggaacaaaatgagaccagagaccaaggaaggagccatgtcctgcagggcctggtgacaggcacaatgagtcttaaattgaagtgtggtggaagctactggtgactgcaaaacaaaaggctgccagggacatgtttatgtcttaagtttgatgcttaaacagattggagatttgaatgccaaggtgctggaatggcagtggagaaaccaattagaaagcagctgcattagtcaggtgagcgatgatgtagctcagactatgatcattgcattgatcaacaaaaaagaattcaagatatgttttgaagataaaatcataaagactcagtgatatgggggactgagaggaaggaagactgaagcgtggctgccgagtttctgccatgaggagctgtgtggatgggattctattgcctggaaaagaagacatcagagagtggagattgtggggagaagttacgagctctcttctgcacccgcattggagggtggagattgtggggagaagttaggagctctcttctgcacccgcattggagggtggagattgtggggagaagttaggagctctcttctgcacccgcattggagggtggagattgttggggagaagttaggagctctcttctgcacccgcattggagggtggagattgttggggagaagttaggagctctcttctgcacccgcattggagggtggagattgtggggagaagttaggagctctcttctgcacccgcattggagggtggagattgttggggagaagttaggagctctcttctgcacccgcattggagggtggagattgttggggagaagttaggagctctcttctgcacccgcattggagggtggagattgtggggagaagttaggagctctcttctgcacccgcattggagggtggagattgttggggagaagttaggagctctcttctgcacccgcattggaggatggagattgttggggagaagttaggagctctcttctgcacccgcattggagggtggagattgttggggagaagttaggagctctcttctgcacccgcattggagggtggagattgttggggagaagttaggagctctcttctgcacccgcattggagggtggagattgtggggagaagttaggagctctcttctgcacccgcattggagggtggagattgttggggagaagttaggagctctcttctgcacccacattggaggggggagattgtggggagaagttaggagctctcttctgcacccgcattggagggtggagattgttggggagaagttaggagctctcttctgcacccgcattggagggtggagattgttggggagaagttaggagctctcttctgcacccgcattggagggtggagattgttggggagaagttaggagctctcttctgcacccgcattggagggtggagattgttggggagaagttaggagctctcttctgcacccgcattggagggtggagattgttggggagaagttaggagctctcttctgcacccacattggagggtggagattgttggggagaagttaggagctctcttctgcacccgcattggagggtggagattgttggggagaagttaggagctctcttctgcacccgcattggagggtggagattgtggggagaagttaggagctctcttctgcacccgcattggagggtggagatggttggggagaagttaggagctctcttctgcacccgcattggagggtggagatggttggggagaagttaggagctctcttctgcacccgcattggagggtggagattgttggggagaagttaggagctctcttctgcacccgcattggagggtggagattgttggggagaagttaggagctctcttctgcacccgcattggagggtggagattgtggggagaagttaggagctctcttctgcacccgcattggagggtggagattgttggggagaagttaggagctctcttctgcacccgcattggagggtggagattgtggggagaagttaggagctctcttctgcacccgcattggagggtggagattgttggggagaagttaggagctctcttctgcacccgcattggagggtggagattgtggggagaagttaggagctctcttctgcacccgcattggagggtggagattgtggggagaagttaggagctctcttctgcacccgcattggagggtggagattgtggggagaagttaggagctctcttctgcacccgcattggagggtggagattgttggggagaagttaggagctctcttctgcacccgcattggagggtggagattgtggggagaagttaggagctctcttctgcacccgcattggagggtggagattgtggggagaagttaggagctctcttctgcacccgcattggagggtggagattgttggggagaagttaggagctctcttctgcacccgcattggagggtggagattgttggggagaagttaggagctctcttctgcacccgcattggagggtggagattgttggggagaagttaggagctctcttctgcacccgcattggagggtggagattgttggggagaagttaggagctctcttctgcacccgcattgggagggtggagattatggggagaagttaggagctctcttctgcacccgcatgaagttgtgggtgttcatagagatgccgagtcggctggacataactttgaggatatgcctgaattgtgtcgataccgacgttttctgcttagctcctttcccttcaatgtccctacgacttactaaccagcttcttaatcaatagggatttaatgagaaaaatgaagtgacctgtgtacagtaacgaagctacttagtctggagtctggagagaacccaggcccctaactcccaccctggcatgttttcatttcttaggttctggaaattcaagtgcatttatttgtcggaattgagctgaccctctctgtaatgcaccccttctcattaccatgacttgactctagagtgaaatgcacctgggatgtgggaaagcatgtggcatcgcagccccaccacagaagctcctgacaagggcacagccaaggcacagtgccatcctgtccccaggggccgttggggctgctccaggcaccatgtccttcaaacatgtctgaatggggacaaaacagctggggattgccaatcaccgtccctggagagttgatttaatagattcccctactccacccacctctattagaatgtaatgacctcaaatcaaatttcgtgagcaaggtgaaacccagattttttttttttaatgtttgttcctgatttcaccttcacatattgcagaatgattttcctcttaaagccaaagttcttttcagggagtagcattgtaagtagactaacctggcgtgcccccaggtcccatcctgagttctgcctcgttgccataggatgagaggcactggcgagcggtgtgtataaggccctccttctcgaatctgctctgggccacaggatgagaggcactggcgaggggtatgtgtaaggccctccttctggaatctgctctgggccacaggatgagaggcactggcgagggtgtgtgtaaggccctccttctagaatctgctctgggccacaggatgagaggcactggcgaggggtgtgtgtaaggccctccatctagaatctgctctgggcgacaggatgagaggcactggcaaggggtgtgtgtaaggccctccttctagaatctgctctgggccacagggtgagaggcacgggcgaggggtgtggggtgtgtgtaaggccctccttctagaatctgctctgggccacaggatgagaggcactggcgaggggtgtgtgtaaggccctccttctagaatctgctctgggccacaagatgagaggcactggcgagggggtgtgtataaggcactccttctagaatctgctctgggccacagggtgagaggcactggcgaggggtgtgtataaggccctccttctagaatctgctctgggtcacaggatgagagacatgggcgagggttgtataaggccctccttctagaatctgctctgggccacaggatgagaggcactggcgagggtgtgtgtaaggccctccttctagaatctgctctgggccacaggatgagaggcactggcgacgggtgtgtgtataaggccctccttctagaatctgctctgggccacaggatgagaggcacttgcgaggggtgtgtgtaaggccctccttctagaatctgctctgggccacaggatgagaggcacttgcgaggggtgtgtgtaaggccctccttctagaatcttctctgggccgcaggatgagaggcactggggagggatgtgtgtaaggccctccttctagaatcttctctgggccacaggatgagaggcactggggaggggtgtgtgtaaggccctccttctagaatctgctctgggccacaggatgagaggcactggcgagggtgtgtgtaaggccctccttctagaatctgctctgggccacaggatgagaggcactggcgacgggtgtgtgtataaggccctccttctagaatctgctctgggccacaggatgagaggcactggggagggatgtgtgtaaggccctccttctagaatctgctctgggccacaggatgagaggcactggcgagggtgtgtgtaaggccctccttctagaatctgctctgggccacaggatgagaggcactggcaacgggtgtgtgtataaggccctccttctagaatctgctctgggccacaggatgagaggcactggcgaggggtgtgtgtaaggccctccttctagaatctgctctgggccacaggatgagaggtactggcgaggggtgtgtataaggccctcgttctagaatctgctctcggccacaggatgagagacattggcgaggggtgtatataaggcccttcttctagaatctgctctgagccacaggatgagaggcactggcgagggtgtgtgtataaggccctccttctagaatctgctctcggtcacaggatgagaggcactggcgaggggtgtgtgtaaggccctccttctagaatctgctctgggccacaggatgagaggcactggcgaggggtgtgtataaggccctccttctcgaatctgctctgggcgacaggatgagaggcattggtgagggggtgtgtataaggccctccttctagaatctgctctgggccacaggatgagaggcactggtgaggggtgtgtgtaaggccctccttctagaatctgctctgggccacaggatgagaggcactggcgaggggtgtgtgtaaggccctccttctagaatctgctctgggccacaggatgagaggcacttgggaggggtgtgtataaggccctccttctagaatctgctttgggccacaggatgagaggcactggcgaggggtgtgtataaggccctccttctagaatctgctctgggccacaggatgagaggcacttgggaggggtgtgtataaggccctccttctacaatctgctctggcagctttgctgtttgaccatgggaaaacccacttcatctctccagttaactagaccttatctgacactccatcctgagcacctctcccagccctctttcatgcaagcttgcctgtggcttcatttccgtatcacagccactgtgaattcagaaagattttggacagctctgagcatccaaggtgccctgaatcccagtgatgttgacatgccacatctctaaaatgtgcagagaaataaattttaacttctgaagttaaagagttgttttgctgaaattagagtaaacatgctgtttttggagctggtgatgaagggtgcataatttcagaaagctgtcatgcacacgcttaatacaaacgcaaaataagtatgtcctcacaatgtgagaaaccagaaactaatgctttagacaaaatttaatacggactttattaaaacccgaatcaattttaagaagtgaaaaacaattagactgagtatatatgagcaccaaattttacagtcattctagttagaagtcaaaataggaccactggctgcacaactaaaatgattacacatcatatcagtgtgggctgagacataattccttgtcacctgtattgtacttacaggcaggttttaccaaattaacaaatttggtctcaggaaactattgaagaaaactgcatttgtcactctttcataatttgtaaggatatacattcagcttacacatacatttctagtaaaaccaaaaataaagtatctaaaattgacatgtttaaattataatgaagtcaactgctttctcttatttttaaaaaatcttaatcactcattacaatagctggcaaataataggcattcaattttatttagagaataaaagagtatacacataacaaatgaacgaatgaatgatagttaagaatcagatgctttagagacaaaacaggaatctaaatttaaaacttcacttatatttaaaactcctgcctgtaatcccagcactttgggaggctgaggcgggtggatcatgaggtcaggagatcgagaccatcccggctaacatgttgaaaccccgtctctattaaaaatacaaaaaattagccaggcgtggtagcatacgcctgtagtcccagctactcgggaggctgaggcaggagaatcacttgaacccaggaggcacaggttgcagtgagctgagatcacaccattgcactccagcctgggcgacagagcaagactccatcttaaaaaacaaacaaactaaacaaacaaacaaaaacaattcctcatgcccatcaccaggctctacaggacatgcctccttccttggtctctggtctcatactttaaaatacactaaattgtacattagccagttgttgctgtaactggaactctataagaaggtaaattattctcaggagcccttacattacaggtaaaaaagttatataaattataagatatgcaaataaaaatggctaaatattagctattattttttgactttgacaaatatggttttggtccatatagaatgatatgcaaacaatgataaaatgccaataactttctaaattatatacagacttttcagttagtaattttgaaggtaacattgaatatattttcagtgaaatacaacctggattattgtatgtacataaacctaatttcaaatccaagtcatttcatgtgtggaaagctatactgtgtgtgtgtgtgcagatgtctgtatctgtcatatgcacatcgatacggctttgctgtgtccccacccaagtctcaccttaaattgtaacaacctgcaagtgtcaagggtgggaccaggtggagataattgaatcatgggagtggtttcccccatactgttcttgtggtagtgaataactctcatgagatctgatggttttataaatgggagttcccctgcacaagctctcttgcctgccgccatgtaagacgtgactttgctctttcttcatcttccgccatgattgtgaggcctccccagccatgtggaactgtgagtccattaaacctctttcctttataattacccagtcttgggtatgtctttattagcagcatgcgaatggatgaatacacacaggcatacacatgtgtatggacatgaatatgttagacagtcacgaatgtcattcactagtcactttagcccaaatatttgccttgtgtaattatagttcaataaaatattacctttctctttttgatacatttagtcagattctttattctgagttgttaataccaagatgctaaactgaagctttttaaaaagttctgtaatacttgagtttaaaagaattttaaaaagcattcatcctagtacctaatttatagtacggataccgaggcttagagagaccaagtgattgtctcaaaaaaggtgtcctttaaccatcacttcctcacagaagccccccaatgtgtccccctcattttcctggttatgatgttccccttctgggcctcttaacaacgagttaatgaatgttttttcctttgcgtctcccattggatggtaagatccttgaagacataaagtgctttgtcctgatgtccctagttcctggcacacaggatggttcccaggaaaagtctattgaatcaatgaaagatggttttattgacaaatcaatgtttgtggccatgtctccaatactaagtctgatctttatcttataccatactcctgacaagagcatatttcagaaccatgatgataatttttgtcaccatacacaaaatattacttcattttttttaatttcctctaaaattctcctttcaagtgcagaactcagacaaaatctgtcatttcagtgtcttgcagaaccttcattttcttttcctactctgccactacatagattcctagcctccctcttgtcactatctgaccttcaaaatgataggactgtcgatctactattcagtcccttcaattctgcccccaaagtttcaatcctgacactgctttaggcataagtgtaagaggtccctgggcatgaaccccacaatcccacagcctcctgctctttccacaccaggctcctcctgcagagcctgagcctggtttgggctacgagcatgtgctcactccctgaccaagctgatcggtgctggcaccaagcactgtgccagacccagatgctagaccaaggggcccatgcccttcattcttccagcatctgctctgtgcttgcctgaaggagcagggcaaagcatgagtcaaaagcttattggctaagcattgcaaagtattcaggtaagcattgttctaggtaactcagcattatgaccccacatgtgatagaactcacctctacaagacagcaaaattgaatatgaggaagcatccaagcagaaacaataataacacagtgacattcttcagttttacatttgcttatggctcctgagctctaaagtaaaaatcaccttagctgccatgtataatgagctttcactgcaggagcccttggccactgacaccctttctaaattgggccacgccacatcaagccaggctggtctgaccttcctcccttgatcactcaggcaggtaagactcagagatgtcacccaggtggcccagtatcgcccagtaatggaagcgctaagttaatgaatgtaaaccctttgttagctttgccaaataccctctaaccagccttttagtgggtattctttggtcattatattgcatcttttcgtacatgatgtcatttcttaatttgcatttctatgatacattagaataatcaattcatatttgacagctaattttgttgtgtaatcttgacaacgctattctacacgttggcttatttcccagaatccggtcagtacatcatccccatgaatccaagaatggccgggggtcatccggcagcgtctgtgcctttcgccaaccgaatctccctttcagagacctttggtatcttgttcagaacatggactggcccagctgttgcctgagtttaagcctgtggtgggctacaacacagagtagggtgctccacgtgcagctgttgctgggctgggcagagaggtgcctggaagcactcaccagccgggagggtgctctgcctcccggggtggagctctcctgacttctggccagctccagatccggatccggattcggatctcccagatgaggcagctgcacctgcctctctcaggggcggctcagtctgtggcggcagcggcgatggggggttcacactgaggcagctgtgcacggctcatctctcttcctctccccttttgctggaggtggcgaggggtccaggtggagcgatccgatgtgcccccgcctggacgctgcccttctctgggcgtcacttggggctcttgagctttgtcctgtgggctccgctggtcgtgacggggccccacactcagagaaaagcaccccgtggccccaggataaccccacagaggcgagccttccactcccgaggagaggggcaggttttctcaagacccgccctcctggtgttgaggggccccgcacaaggctatgccagtgttcaagaacattccaccagaaagcaccctggggtggctgactcaggagtcctctgaggagcgggccccgccctggacggagaggttccctgtacctcccgggcctcggggaggcaggcagaggccgcactgggcaccccgccctcctgcagcgaaccttgacctgcagaacaacctccaccacgggcatttcctgtcctaggaagccagcgaggcctgagaagccgctttcttactaacgcactgagcttgtagtgggtggtgagcaattagctggttggctgctattgttggcgtgtgtttagctgagagacagctttctgtctgcggaacagttgggcctccctcggcccgggccacccctgctagaatccctgcagggctgccaggatccacagctcgcaacccagaccctccagtctccctcctgggcacggccttgggacacccggtctctgaacccttctcctcagtctcctctggtgcgggcagagatgggccggccccagcaaacctctcacccacgtcccccgcacacccttgtcacacagtggaggggacagactggggccacgtcatatggcatagggtgaagccgtaaaaatgtgtttttaagttttaagaggtgtgtttaatggggacagtaacacctaggccacagttttattataattgttaaataaagcttcaagccctagacccctaactagagcatggcacatggtggtactgagggaaagtctgttaaatgaacaataacaggaccaggcagccagggctggccctgctactttgaagcaccgattaggaggagaacttggcactggatgtttggttttctatttcttgctgaagctctgcctttgtcccaatcaggcacatgattagttcagattttgcttttgcttcatgtatcttgttctgaatattgagtttgagtataattgcaataggtcacactacctttttaaaaaattcattcagtgtgcaggtttgggagctgggggtgacaggaatgttatatgtaaatttatgtaaatgagtatgctaatgtccctgtgttcttgcattgtgtttcggtgaacgagtcccttgtcacactgtcacaggtgagtccaccagggagctgggtgcaccacacgtgctcaggaagacttgggcgtattgatgtcccagcttaaaacaatctgattacttttctcaaaggatctcagaagttcccctacactattccagtggagggggaatatcacacaccacttatctcccaacctagctgtctttttatgggaaaatcactctgtatgtttcttacagatgctaattttaaaattgactttgattcaacaagtatcatttgctgctgtttggtgtgaaataccagacaagataaacacagcacagccctcacattcaaggaccctgtagactgataaacgggaatcacagtagagagggagctggtatccccagaccaggaggctatgtgtaactgtttgttcagggactcactccgggagcttgaggagagcaaaccgaggcggggcacgctgctgtgagttccaactgctctgtgaagcccaaggcttggaggcagtgctgtggccaacctagggaagaagcaatgccagggagccagggccccacgcctcctaccctccatccagggcccctgaacttccatctatattgggtttgcctataaaattaaaaacacagaacatgtccacagtaaaaaagaaaaaaatcactgtacaaatggttcagatgcagtgggggcaataaaaacagacccacgggagcccagtgagatagtacaggctgggacagtcaggcctgggcacgggcagctgtggtgggacaggcggaacgcgtccacgcggtgggagctaagtcagagctaaggctgaaaagatgcagaagccctgcagttggttgaaaatgaaaaggacagagggaagactcaaaggtgattttctggttgtaggaagctgattgagaacaccttgatgatattgacaacaggaggaagtcagaattggtggactgcggctggctatggaaggatcttaggatgagctgtcactgggtgcctgcgtggggaaagtaggcagacactggaaatttgggagtagaagctttggtaggaaaaaaaccaatggcaacaacaaagccggcctggatataaagctttatgagttgtttaattagaggtagaagttaaattcctacagtgaatgaagttgccaaggatgaaagtagaggctcaagaacagaatctaggaaacattttaatttggcagaggaaggaatagaaagagcagcttggaaattatcaagtgaattctgtcagccacaaggggagggaatttcaagagcaatgaaatgaccaagccaaccaaatgccagaaagagcaaggcagaaccagagtgtgcacctgcactgggcgggtttgggtgctgtgttattttgtttgtttttttaattaattttgtttctaatcaacacatagtaattgtaagaataagttctggtgttctattaccttgcaggctgacgctagctaataataatgtagtatatatattccaagacgcctacaagagggatcttgaatgggtgccttttgagaattaattttagtaagagtagtggcagaaggtagataaaatatgttaatttttagattatagtcaagataaaaaatttcagaattatttgaaattggcatttgttttgagagaagtattttaaaaatcaacgtaaaatatcttctcggaagagagtccaagttttccagatataaagaaagcaagctggcaaagtaattctgccctaaatttttgtttgaattgaggggctttaaaattgggtaatttcaaaggtgcctaatccagtgaacaccgctcaatcttatcactgcattatagttctctcaaaaggaagagcccaccccagaaaacacattttgcattgattttaacgttaatgcttgaaagagttcatgcccacagacaaacattcttctgtatcagagggccacgtggtccaaggctgcgtccctgagaaagagaagaattcacttcgtcgaagaggaagactcgctagacagcctttccaggttgctccccatccaactattcagtcctctatgttgtttgaaaaaaaaaaaaacagcaaaagccttgtgccgccagggcaggggagctgctccgagttctgcctctgtggggtccttcaggagcccgtgctgggagcttcccgtccacacccactggatattaggcactacccaatctgttggtgtaggcttatgccagcctcctgaagtggagagagagagattgcccacacaattttgggcggagctcagccgagttcttcacacacgcaggccagccagaggaccatccacaggcaacatccaggcagctcctgggaaacaggctgcccccttctctaatggacattctgtgcacagctgagatgaacagttcatgcacgagtctatgcagtccagcccaacactcctctgagggaggcagctggtgtctaggattcggtaaagtgcccacactggccataaaggtgactcaggcccccaccctgatgtcccttccacctctactcttttttctttcccatcaagatgacctcacagtgtctttccctggggcgcagtttaaaatagcctgactcacatctactctgtttcattgacaaagatgtgggcagcacacctttgtcagtatcacaggctaacccaacaagtatcatgaaagatgctttctttcctagatggtgaagaaaatttaccctctcctgggccatgtaggtgagtcctgaatgtgactgacatttgacatgctggcctctgagtatctgtggccagttctgaaaagtagttatttaagatgaaacgcctccgccagtatttggtcgcaggtaggcaggtgacccgccttccatcacatgtgcctgagttgaccatatcaatttgcaggctgttgaatcattgtttttggaaagataaatacggacaaagaactgacattgtgcacccacatattgtgtacttttctttttttttttttcagagcaggaatggaagtgtattaaaaagctttagagcaggaacgaaagaaaggaaagtacacttggaagaggcccaagcgggcatcttggaggtcaagtgcagcatttgacctttgacttagggtgttatctgttggcatacttccagaccggaaaaggtctgtaggttaatagatggaacaggagaggttgaaatctctctcaatacttgtatcatcatttaaaggtagaatttgtgtatccttttgtttaaaaaaaatacctaaaattaatgctgtggaactctgagcctgccaaggaaaacactgtcccataaaataagggcatttaaatttgcatgagaagatgttaaccagcacagaggatggactgtagcttgtcagaccacttcgaggtgggtaccggagctctctgggacatgtgctcctaaccgtgaggagagagaaagaatccacttgtaccctggcagaaatccctcccaatttggaaggaatcctgcatagcctcagtagatgtgtgcctgtggggttgccatggcgaagtaaggccatatttaaccaacattctgaggttattccttttacgaacagtgtgctgcacccacttgcccgagggaagtgcagcagacatacacaagatgtcgtccttgcagactcccgaccctgagatttttcagccccttttgtgctggcttacactcaggacattttggaactgccacttgtgtcagtgacgtctgctgtgcaagcatgatgtcttggtcacagtggcatctcagtaaacttacacttttttttttgttttttgagatggagtctcgctctgttgcccaggctggagtgcagtggcacgatctcggctcactgcaagctccgccacccgggttcacgccattctcctgcctcagcctcctgagtagctgggagtacaggcacccaccaccacgcctggctaattttttgtatttttagtagagacggagtttcaccgtgttagccaggatggtctcaatctcctgacctcgtgatcagcctgccttggcctcgcaaagtgcagggattttaggcgtgggccaccgcgcccggctggtaaacttacacatttaatgaatgcaagtaaaagtcatcttccttgtcctctaagtttcttaagatcagaagggccccagataagtgaaaatatgacccatgtcctcataaatgttctccaatcgaccctcactcctcaccacctattttccagatagaacagaaaggactaggccccagagggctgtttaaacataagctatgtcatttgctccctacataaaccctttaaaagcctcctgccactgctagaaatcagcctggacatgtctggggcatcagcctcccatgtcaaccttcccctgcccacctcccaccttactccacccctgctctctgcaaatcccaggcctcctgtttactccttgaatctgaatccctttctcctgtacctgtgcacctgctgtgtcctcagtctgggcctttcttggctggtttctcaggcagtaggaacccaattatcacttctttagaaaagcctttcaccctcctaagctccccacccttctaaagcagcccctccgggagaccgtccagccagcgttgcccgtggttctcttctcaggtgtctgcccatcgtcacttactaagcagagagggaccctgaggacgcagactcacctgtgcagttcacagccttctgctgcaggagggaaggtcctcggtcttctggaaggagctgctcagaggcagctggggtccctggagctatgctaactgggtcaggttcctgttttacatcaatcccaaataaactttggctaattaaagatctacattttgaaaatcaaatatatgcaaggattaggagaaaatcctggagcctgtcttttcccttagaataggaaaagccttcttaggtgccacatacaacgtagacattacaaaagactgatgaatgtaagtagatcaaagtttaaaacttaggaacaagaaaagtttgtaaacaaagccaaaagaccagcagtaaactgggggaactatgatatgaaaagattaagtatgcagagtgcatataaacaatgtaataaagatgaaggaaatagctacatcatagaagaggaggtagacatgtctaggaactacctattctgactcagataatctgtcatacacaaatacaccatgaaatcagcagtcaagtgagatgtaaccccacactggcaaatgtgttcgtgaacgtgcgccttcctgtgctgaggataaattcatgagaacactctgaagggcgactccttggcatctggaaattttaaataaatctctacccttgagaaatataggtatgtgtgcatgagaaagagacacatacaaacattttattacagtattgagtgtttggtgaaaaataggaaaagaaaccctgaatttatatcaacacgtgatagttttataaactgattgtagctatactatggaataacagcccccaccaatcctgacaatcaagctatagctaattacactggcggctgggcatggtggctcacacctgtaatctcagcactttgggaggctgagctgggcagattgctagagctcaggagttcaagagcagcctagacaacatggtgaaacctcgtctctacaaaaaatacaaaaattagccgggtgcagtggcgcacacctgtagtttcacctactcgggaggctgaggtgggaggatcccttgagcccaggaggcagaggttgcagcgagctgagatctgctactgcactccagcctgggtgacagagcataccatatcaaaaaataaataaaataattacactggcatgtaaatgttatcaactcaaactgaaaaaaaaatagaagaatatttacagtataacatttatggtaaaaaatgaagtaattctagcatttccatatgtagtaggactaagggtgtggcagcctgtgtgtgaggttgcatgtgtgcatgcatgcatgtagatacatgtagagcaaatatagaaaaaactaacaaaggtgtttgcctgcatggcagagaatgacatggatctaaaggaacttgagtgttatccatgaagtctgaaccccccacactgagaatatatttatgtatcacttgagataagtggacttggggttagggcctctgggcttggataccaaatctgttctcttgtctgagtggccttgggcattgtataagtctgttctcatgctgttaataaagacataccgaagactgagtaattatgagggaaagaggtttaattgactcacagttccacaaggctgaggaggcctcgcaatcatggcagaaggcaaggaggaataagtcacatctcgcatggtggcaggcaagagagtgtgtgcaggggaattcccctttataaaaccatcaaatcttatcagacttactcactgtcacaagaacagcatgggaaagactcgcccgccatgattcaattacctcccaccaggtccctcccacaacacatgagaattatgagagctacaattcaagatgagatttgggtggggacacagcgaaaccatatcgggcatgttacttgaccttacataagtcaccaaattaatttctttttgtgagaaatggagataaagctaaatttacacagaagccagcatctagtattgtactaaggtgggaagatatttcttacccaagtcaaaaccatcctctccatctgtcaactcacaaatcagcggctcccccagctctatgtaatatgcccacgtgagtgtagacaggtggagagcagccctccttaggaggcgttctctctctggaactcaaaaacgaaatgtaggtggtgttgaggaactgcagggcctctttcccagcctcctatacaaacattgggctcacctttctgggggagttgttgatctctgcgtgaaacaggagaatccattgaccaagtggagaggacacagtccaagtgttcaggccctggatcccctgctacttcctgagggtttgagggtctaatcactcctcaactttgcattgctttgcagcatgcaccatgccataaacggcggagagcaggaaaggctgaatccgatgagcggcctggccgggcctcaatctgacccaatgtcttcaagattccctcctccacaaaaggagcactggagcacatgacccagtgagaatcttgctcttcatattggcccatgggttgctaagttactagtgaccaatgcaggtccttccatccctgttcctttgtctctccctctgctcctctgtctctccatggccaccatccagtgggatggcgggagggctctgggatgcaccaaactcgacctgcaacccaaggagatggccaacttcatcttctgctatgacctgagttagtgtctgagggcagacaacagacagagaaacagacactaggcaagaaggtcttattctgtctgccctagaatattattaagtgaggaaaagagaaagaaaaatcaaacctgcttagtgtcatctgagattttaaaagtagagtccacttgctttgggtctatactgtcttctttatgcaggctttactcttttgaatccatgtggaaaatcaattatgtacgtgtgtgcgtttgtgtgtgtataggataaaggcacgaatagtgagaaataaacttaattttaagagtgtagtgcttgtgtacaaaacagatacctgctttcactagattaacatgttattaatacttttaggtgaaacaggtacttaaataaaaacaacaaattaaatccttaaaggtccaaaattttgaaaaatataaaagaaattgaaatgcagtctctgccccagaaacctagcattcacatacaggaagacagtgaacacatagcatcccttctgtgttttgttggattataagatggatggatggatggatggatggatggagggatggatggttagatagatagatagataggattatacttataattttgcaacctaaagtatactttttcaaagttacatcttaagtgcttaaacattgctacaaagtcttcataatacttgttttacttggggatgaaagagttgtgtctattggaccctggctgtatgttgtgtattttgtcatgtaattcacccagacaccacacagcaaggtattgtgaccttcgcagtatgaagggggaacctgcaacttagagcaggtagatccacagttgaaggcactggctggaagcccatctctcaagctagcttcctttttcaaatcagaggtcctctcgtccatactgggacatggacttgttatcaatcacaaagcccttcctatgccattgggtaattagattgtgttcacaattgtctgttctcctgaataacttttgcaaacctgagaagatgcagaatgctacaaaggaaggaggttagttgatgtcaggtgagtgcaggcgcctgctggcctcaccagtgcgataagcagggagcgttgagtctctagggcaactctcagtgtggagtctacgagtccatgaatacggcaatagcccaagccactccccagcctgtaatgatggctctgtgtgaagccccaggagacccagcctgcctccccacctggctgtctttcaggggaggcagcacagctgtcgataggcctttggactcaattattagcaagattttaatatctcctcctttacattgtaatttaagcaggtagatgcttttaaattgccatctgtgtggtgaaattcatgctaagaaaatgtgggtctgctttaattagctgtgctctggctgatggatttcagaatgccgttgcccagattggcaggaaattcagacacttagatgcatgtactggtagctcctatgtggtttcgtgtcttcacgtgatctagatgattacagatgcatgtgcatacatatgtatttatatatgttttgcttttcttatccagcatgccagcttctttctccctcttgattctaaatattatttttgtcttttattgtctttggagttcttctttcacatatgtttccccagttcccacagaagctacctcatgcatcagcagccactgagtgctgtgacagagaagggtgttggattcctggttatttctacagaatcctggacctctgaggaattgtctggcttggcagcatttagaaaagtgaacagtgccatggcggctgtgagaactcttgagctagggtttcgtgtgcttccccatcttaaattccaaagggctttgctttggtggcttaataggcaggaggaggaatttctctgctcaggcatccaagttttcagacagcttcccggccagtcttcctgaaacagccacttcctgaccctctccatcttcttgctctgtgttctggtgtctgaatgcctctctcccctggcatatcacgtgtctgtgcatttgtttgccatccctgcctgggcatctaagctccagagagcagtggctttgtatggtttcaccacagcgttgtcccctgcacccaaacagtggatgtggacaaagctcctagcacctaattgatgagtgaatccttacaaggctttagctgacccaagatgaatgcaaatcttccttcctaagttgacattttattaaagaaaacagtggatggtgtgtgtccttttaggttccagcccctccctcattaactttttgtgaagctttcctttgttctgctgtaccatgattgcagcgagcctcctgacctgggagtcccacccatattcctggagggaccccagttggaatgcttgccggaatctcactttgtatgggttacacaacatctgcaagatagacaaagggctgccacttcacaggattgttgaaggaaatgaacaagtgaaatatgagacagaacctgtcctggaacccggggcagagtggacagccggtgtgctggtgggaagttcctcccgccccctccttcccttgcctcacaggcttctccttccacctttgtttcctcatgtggttttccctatctctaaaacagctgcaaagccagagcagctatgagtctcttgagtttgcagagaactttgtaattcatataatgccttgcacacttgctacttaatgaggtgccctgatgtgtgttttgcttggaaggcccaaagatagcccttttaggatcctgtttcacagcccagaaggtgcaggcatggaggtgaggtagccttccaggtggtccagctgcgggaggagctgcctggcctcccatagccatggcttccttatctttagagcacggtggcaacaaccatgcaagaacgtggcctttttgtgaggatcaagtgtgataaggacgctgctggtgaacatcctgcatgctgcgcctgcactgtctcctttccatcattatcgtggagcccaaattaagtccccagaaacagagactcctcggaggccgtgtgcttaaaggccctgcccttgcacccattctcttcagcattgcagtgctcttgaggccatgcatccctttgtaaaacccgcgtggtcgagcttatgattcatcccacaccaggacacctggtatctatggatacaagtgccagcccagctagaaaatttgcattttgaattagggccgaaaagatcaccctaaaacacaattttgattttaacgctgtgtcactccaagaaatccaatagccctttgtaggtaagaagagaaaaaaaagtccaaatatcttaattcggagttcaaaagccttgtatcctgactcaccaaagcctttctttctggcacactctctagcttctgcttctcatggggctgatagcacccctcttaaggggaactccagtgaatcttcttccccggaaacctgcctgctccacttcagctcctgggatctagtcctcttgctcgccccagcattggcactcattgcctgccttgctggccattcttggcctaaatacatcttatctgcattcatttctttgcttctgtgagctctgggctctgggctgagcactcagattatgaatcagagtcaggcagggtgcccatccgggatgcccagacacagatgctggagctcctgagaagctgccagcaagcagacgcctgtgctccctgctgcagaggaaggaggataaacacctcctcaccttccatgcagacacgaccttccacccactcctttgactctggtctgctgctgctgagctctgccctgcacagttctctcccaggatgaccggccttcccagggctgtcagcagtgaagggcggattatcacgtttgctggagcacagggctgctgtgggcattaattaagtcactgtttggaaggaacttggagaccgcccacaaaaggcggttcacaaggacaagggctggttattaaggcattaaatccccaatttgccactagatagaggcagtggaactctctctgactgctcaggaaaaaaaaaaaaaacaggattcctgcatatcccactgcaggaaaaaaaatgaaataataatgagatgcactttacttgctctcaaagttttatttcatttaaaaggtgcaaggaggcaatctactcttgatctggttcttccttagcagttagttgttatttactaggcaaattggctgcataggaaaaggcatgggcatccacatttctggtcatatgaatggagttccagcaagatcaaatcctgtgatgcatggagcaaacacttcttcaccatccctgtgccttaaaaagtttatgtgggaaggactccacctatgaccttaaaccaaactgcccgggtgcggacgcaggcctccgtgcagcagcatgtgaatgcatgaatggcactgcagaacccacatgggtgctttgtgttagcagaattcagtcccccttcttggagcccacctgggccagcagggctctcccctttctggtgagaattgcccctcatttctgagtacttcagcccagcgagatggagttggtggcagcatgcctccagcatgtccccgatctgcagagcagcacatgatctgaagcctggctctgcagacactccctgatcaacagccgaggttatagccagaagcggaattctgagcatggcaacatgcatctgagcccttgtgccctcacggtgaccatgagcctccggttccaggctccagtgggccacacgggcaatgagtttgggttaatgtttcaggttctaggcttcaggtcctggctcaccaggtgaggctgtgaagaggcagagcccagtggctggatgggcaggtgtcagaggccccacagacaccattgctgatgggtgaggatcttggcctggagctgaagggcacaaagggggttcccatgcgtcattcgagggaagcctggcccctgagtccagggaagaagtgaccgctgggcccgtgggaagttgaggcaggagtgagtagctcaggaggcttcagttgcttcatttgtgtttcctgagtgttccttgagacatcgcatgaatatatcaacaactttgagatataattcacatgccataaaatgcacccattggaagtgtacacttcagtgggttctagaatcgcgtgttctcctgtatctgtgggatacattccaagaccccccgtgggcacctgaaaccatggatagtgccaaaactccatatactatgttttttcacatacacacatatttgcggtaaagtttaatttacaactctggcccaggaagaggttaacaataataactaatgacatggagcgatgataaacaacaagccggcctcggtgctctatcacctggggccaccctgaagtgcaatgaggcaccctgcatacaacactgcggtaccacagcggtggctctcatgactgagatggcttccaagtgactgacgggtgggtagggtgtgcggtgtggacggacgcactggacaaaggaatgattcatgtcccagccagatggaactggagggcgggagatttcatcacgagcacacaatggaaaattcatcatggtttatttctggaattttccgttgaatatttttggaccattgttgaccttgggtatctgaaaccatgaaaaggaaaaccacaaataagcgggcctatgatagtcacagatacaaacaagtatcacccagtcaactttagaacattttcatcacctcagaaagaaaccccatcactcccacattccccgactctggccccaagtggccactaatctaccttctgcctctgcaactttctccattctgcacttgttatgtaaatggaatcattagacgtggccgtgtgagactgacttctctcacttagcataatgtgttaaaccttcatttatgtcgtagcatctatcagtgcttcataactttttatggcagatatatatttcattatctatgaattcatatatatcccacattagtgaactttattatataaatcagccccattctctttgtccattcatcagtagatggaaatttaaggagattccattttggctgtcacaaataaagttacagtaaacatatacagtctttatatgaatgtgtgaacatgttcttaatgcttctttaggaatggaatttctgggtcacatagtgactcgactctggtgaatccgttcaggagctgcctcactgttttctaaagtgactgcaccattgacattctcaccagcaacgtaggcatgttctgattcccttggtggtctagcacctggggccatcctcaagtgcaatgagggctgtctgcatacagcaagtgacaagtgaccagcacttgtcagcatctcatgtttgcttctggacatcccagtgggtatagcatggtctcactgtagttttgatttatacatctctgatgactaatgatattgacagtctttttgtgtgtttagggttttttgcagattttctttggagaaatatctgttcagatcctttgccagttgttaactgggttgtcattctattattgatttataataattatttatatattctggatagaaatcccttatcaatatatgatttttaaataccttctccccttctgtagattgtttttttcacttttgtggtggtgtatttgcaacacaaaagtctgttttttaaaattttgatagcgttcaatttatctactttttaattgctcatgcttttgttgtcatatttaagaatatgttgccaaatctgagagttgtatagttacagtttttttttttcttttttttctttttttttctttttctgagatggagtcttgctctgtcacccaggctggagtgcagtggcgcaatctcggctcactgcaactcactgcaactcactgcctcccgggttcaagtgattctcctgcctcagcctaacatggtagttcggattacaggcacatgccaccatgcctggctaatttttttgtatttttactagagacagggttttgccgtgttggccaggctggtctcaaactcctgacctcaagtgatccacccgccttggcatcccaaagtgctgggatgacaggcatgagccaccatgcccagcctacttttagttcttatatggatccaagtttgggtcttggatccattttgagtttattattgtacacagtgtgagatagggacatgctggaggcaggctgccaccaactccatctcactgggctgaagtactcagaaatgagtacccctgtttgcatggggatatccggttggttaaaaagatgattctctcccctttgactagccccggcacccctgtgaagagtctgttgacagtagacgcgtgagttacttcttggtatgggttctgttccgctgagctgcatcatgtctgtccatatgtggcaccactctgtcttgattgctgttgctttgtagtgagttttgaagtcgggaagtgtttgccctcctactttgttctgtatgatgttagctgtgggtgtggcttctgaatcttaaagttcacaaagccattgcatagaagatcatggatgtaatccctggtctttaaatgacagaacatccctagaagggcgtcggatcgatcactgggtagtagcagccatggggagtgtatccagaagataccgagacttgatccaatataatgaatctgtggctatgatggacagacagcagcagagtggcacctcccatgtgcctttcttcctagcacactgctgtcactggcagcaggccctgtctacacccagacaacacctaactgtccctgcatttcacagcttgttcatagccaagcagaacttaacaacatacagtcagccttcagacttgcagcttcagacatctaggtctagggggaaaacatttggcttcccattcttccaaatgttttcccccagacctgaagggtcatttagggacaagttgtttcttaatcccctgctgcctgtacgtctcaccttcctcactctctacacagaaaagcagctaagcaggaggagaagcaggagaatctactctgaagttctgccagatgggcactgccttggtgtactctccattttaccccatagatgcccaaaatgtaaaggcagagcctttgcacagctttagaataatctttaaaatgcaatgggaggctggtttcaaatatgcaaatcaatcaatgtgatgcatcccattaacagaatgaaagattttaaaaccccatgatcatctcaactgacacagaaaaagcttttcacaaagttcaacaccctttcatgaaaaaaaaaaaaaaaaaaaactcttaacagtttaggtatagaagaaaagtttctcagcattatgaaggctatcatgtaaaacctgcagctaatataattaacagggagcaactgaaactttgccactaagatccagtagaaagcagagatgccctctctcgccacttctattcagcatgggattagaagtactaacaagagcagtcagacaagaaatgaaataagataaacaaaagggatccacttcagaaggaagaagtagcatttctctatttgcagatgacatgatccaatatgtagaaaaccccaaagattacacacaaaagcactgttagaattatgaatgaattcggcaaagttgcagaatacaaaatcagcatacaaaaatcagtagcatttgtatagaaaaataataacctagctggaaaataaatcagtaaaacaatcccatttatgatagcatcaaaaaagatattttggaacaaatttaacaaaggaggtaaatgatatgtacaccaaaaactataaaacattaaggaaagaaatggaaaaaggcacaaataaatgaaaagatatttcatgttcattaggaagaattagtattgttaaaatgtccatactacccaaagtaatatacagatttaacacaatccctattaaaatcttcaatagcaacaatagcaattttcacagaaattgggaaaatatcctaaaatgtttgtagaaccacaaaaaactccaagaagccaggaaaaaaagaaaaaaaaaaccactgagaaggaaaaacaaagttggaggaatcatacttcttgatttaaaattatattacaaagctatagatattaaagcagtatgatactggcataaaaacagaaccatagacccgtggaacagaacaaagagcccccaaataaattgaaacaaatatgcgcaactaatttttgacaaggtcaccaagaggacacaatggggaaaggacagtcccttcaataaaccgtgctgggaaaactgaattttcacatggaagataataaaattggatccttgtcttatacattaaaaaaaataataataactcaaaatggatgcaagccctaaatgtaaaacctgaaaccataaaactccaagaagaaaatgttgggaaaaatctccttgaccttggtcacagcaacactttttaaaatgttacccaaaagcttaaatgacaaaacaaaaataaataaatggactacacaaaaccataaagcttctgcacagccaaagaaacaatatcacaatgaaaaagcagcctatagagtggaaaaaaaaagtttgcaaatcacatctgataaggggttaatatccaaaatgtataaataactcttacaaatcaacagtaaaaataaggcaaataatcctcaaatgagcgaaggccgtaaacagacatttttcaaaacaacaaataaaaatgtccaacaggcaaatgagaaggtgttcagcatcactcctcaaatgggaaacgcaaaataaagccatcattgtaacctcctggcctgttcttcctgcccactgcacaaatgaagaccagggcattgcagtaaaccaagagtttaattaatgcgaggctggccacgcccgtggcagatggagttattaactcaaatcaacctcatggaaggcttgtaggttaagggattttcaaggacagtttgaggaaagtgtggggcgcctaggcaggctgcttgctgccaactgactaggatacaatcacagggtgtgggaaaggtccccctgtgcactgagtggtttctgagtggggccacaggagtgacagagtcatctattggggggtccacatggagccatgggtgtcagacatgcaaaaaacctgagaagatgcctcaaaaagccaatcgtaggttctactatagagatgctctctgcaggacctccggaataatggctgaccatcatgaatgtccacaccttagcagaattcaggctcctctcctccccctcaccaggtggtctctcattagctttacaaaggcagttgggtttgggggaaggcctattaattatcatttaaactatcaactaaatgtctcccaaagctagtttggcagcttgagggtaaaggcaaaatggcattggctggatcagatcttccactcccagaattttctcactgttaccatttatcaaaggtggtttcatcataagttaccacctcacacatggaaggacagctgtgtgaatggaaaaaaacaagttgggaccacaattccctaggccaaaagaaaaaaaaataagctgaaatctgagtcatgcaagaagttacctttccctttgttccgaagcagatagctacagataaaaggttaaatatctccacaggtagcaactcctcattcaccttatcttatgtaaagtgccagttttccctgttaaatattgaagctctcaaattcatctttggagaaaggcacagacagtttctgtaattctgttttgtttttttccttaaccttggcaaaataaccttctaaattgattgatacccatctcagatactttttggtttacagctattatccaaaaatcaagagatagcaagggttggtgaggttgtggacaaaagggaagccttgcacactgtagatgggaatgtggcttggtacagccattatgaaaaacagtacattaaaaatagaactaccatgtgacccaccaatcctcctgaggaaattccaaaggagacaaaatcaatgcctcgtaaggatgcctgcaactcccatgttcattgcagcatgattgacaatagccaagatacagaagcaacctaatggacaaatggatggcaaaaatgtgggggatatatatatatatatatatcttcaatgaaatattattcagccttaagaagaatgcaatcctgctatttgccacaatatagatatacccagaaaatattatactacgtaatataagtcagatgcagaaagaaaaatattgtattatctcacttaaatgtggaacttttttttttttcctaaagagctcagcctgggtgcggtggctcaggcctgtaatcccagcactttgggaggctgaagggggtggatcatttgagctcaggacttggagaccggtctggccaacatggtgaaaccccgtctctactaaaaatacaaaaattagccgggcatggtgatgtgcatttgtagtctcagctactctggaggctgaggtgggaggatcacttgaacccaggaggcagaggttgcagtgagccgagatcacgccactgcactccagcctgattgacagagtgagaccctgtctcaaaaaagtaaaaattaaaaataaaagctcaaatacacgtaggtgagagtgaaacagtggttatgggtggggggtgatggggagatataagtcaaatgatacaaaatagcagatatgtgggatgatcaagtctagagatctaatgcccaatatgaaaactaaagttaataaaattatactgtgttggaggctttgctaactaagtagattttagctgctcttgtcacaaaaaagtaactgagatgataaacaagttaatttgtttcactatagtaagcattctacgatgtatgtgtatcccatatcaacatgttgtaaacatcaaacatacatgataacattttttttaatgaaatggagaaactaggctataagcagactgttagagtaccacataatgatgtgtttgtgtctgaagtaagaaagggtgcaaaagaaagaagccatgagtgaaagaacacgtgcaggaaacaacgcatggaggaaagaactcatgcaggaaagaaggcatgcaggaaagaacacatgcaggaaagaatgcatgcaggaaagaacacctgcaggaaagaacgcatgcaggaaagaatgcatgcaggaaagaacgcatgcaggaaagaacacctgcaggaaagaacgcattcaggaaagaacacatgcaggaaagaacgcatgcaggaaagaaggcacgcaggaaagaacgcatgaggaaagaacgcatgcaggaaagaaagcaggcaggaaagaaagcaggcaggaaagaaggcatgcaggaaagaacgcatgcaggaaaggcacacaggaaagaacgcacacaggaaagaaggcacgcaggaaagaacgcctgcaggaaagaaggcacacaggaaagaacgcatgcaggaaagaacgcctgcaggagagaaggcacgcaggaaagaacgcatgcaggaaagaacatattcaggaaagaacgcctgcaggaaaaaacacatgcaggaaagaacatatgcaggaaataatgcctgcaggaaagaatgcatgcaggaaagaaggcaagcaggaaagaacatattcaggaaagaatgcctgcaggaaagaacacatgcaggaaagaatgcctgcaggaaagaacgcattcaggaaagaacacatgcaggaaagaacgcatgcaggaaagaaggcacacaggaaagaacgcatgaggaaagaacgcacgcaggaaagaaagcaggcaggaaagaaggcatgcaggaaagaacgcatgcaggaaaggcacacaggaaagaacgcacgcaggaaagaaggcacgcaggaaagaacgcctgcaggaaagaaggcacacaggaaagaacgtatgcaggaaagaacgcctgcaggagagaaggcacgcaggaaagaacatattcaggaaagaatgcctgcaggaaaaaacacatgcaggaaagaacatatgcaggaaataatgcctgcaggaaagaatgcatgcaggaaagaaggcaagcaggaaagaacatattcaggaaagaacgcctgcaggaaagaacgcatgcaggaaagaatgtattcaggaaagaacgcctgcaggaaagaaggcacgcaggaaagaaggcatgcaggaaagaacgcctgcaggaaagaaggcatgcaggaaagaacgcatgcaggaaagaacgcatgcaggaaagaatgcctgcaggaaagaacgcatgcaggaaagaacacatgcaggaaagaactcctacaggaaagaacgcatgcaggaaagagcgcatgcaggaaagaacacatgcaggaaagaatgcctgcaggaaagaacacatgcaggaaagaatgcctgcaggaaagaacgtattcaggaaagaacgcctgcaggaaagaaggcacgcaggaaagaaggcacgcaggaaaggcacacaggaaagaatgcacgcaggaaagaaggcacgcaggaaagaaggcacgcaggaaagaatgcctgcaggaaagaaggcacacaggaaagaatgcctgcaggaaagaacgcatgcaggaaagaacgcctgcagaagagaaggcacgcaggaaagaacgcatgcaggaaagaacgtatgcaggaaataatgcctgcaggaaagaatgcctgcaggaaagaaggcaagcaggaaagaacatattcaggaaagaacgcctgcaggaaagaacgcatgcaggaaagaacgcatgcaggaaagaacgcatgcaggaaagaacgcctgcaggaaagaaggcacacaggaaagaaggcacgcaggaaagaacgtatgcaggaaagaacgcctgcaggaaagaacgcatgcaggaaagaacgcatgcaggaaagaacgcctgcaggaaagaacgcctgcaggaaagaacgcctgcaggaaagaacgcctgcaggaaagaacacattcaggaaagaacgcctgcaggaaaggaggcacgcaggaaagaaggcacacaggaaagaacgtatgcaggaaagaaggcacacaggaaggaaggcacgcaggaaagaaggcacgcaggaaagaacatatgcaggaaagaacgcctgcaggaaagtatgcaggaaagaatgcatgcaggaaagaaggcatgcaggaaagaaggcatgcaggaaagaacgcttgcaggaaagaatgcctgcaggaaagaacgcatgcaggaaagaactcatgcaggaaagaaggcatgcacgaaaggcatgaatcaatgtattaggcttcatgatggaaaaggaagcatggtgcactgagggagtggagtgagggtgcctgaagcagccgggcctggggccatgagaacaggtgctgctcccagaggctgaggggagacttagtcagggaaagtgggggtccacacaggaaggcgtgcagacatggaggaggctcggcagccctaagcacccatgggccccacaccagggtgctgtcttacctcaaaggtgatggggtggcactgaagactcaggtacaggaaggggacatctcacaaagacatagagaaggggcaggaggtgccaaggcacccaccccaggagagaagcccctgtggctgccggaggaagcagcagcaggcccacaggccatggtccatcagtgggaatcaagccacacagcaggagggagagaagagctctgttgagaggcactgggaggctgagaggagctacccagaggccaggaccatgggccagggtgacggtgggcaaacctggactgggggcctgggttgttactattcactgtcacagggaacttggaggagaaggctgaggggtgtttaataagtgaccctcctacctgctgactttttcaacaatttatgtgaaacgtcacgtggaaaagcccaaaaagcctttggcaggaagtgtgaggctgtgttgagagacacacaccagaagcacagatgccccccatgcagagcaggccatgggaatcgagcaagtctaagtgggaaatgggaacgggactcaggaagaacaggtgcatattttggagcagttgtaagcttaccgtggggttgacgtggaggcatagattggttctcagcaattcccaaggtatattagtccattctcatgctgctacaaggacacactggagactaatttataaagaaaagaggtttaatcaactcacgctttaacatagctggggagggctcaggaaacttacaatcctggcagaaggtaaagaaggagcaaggcaccttcttcacaaggtggcaggaaggagaagtgcaagcaagggaaatgccagacactcataaaaccatcagatctcttgaaactcactctctatcatgagaacagcatgggggaaactgccccgcccccgtgatccagttacctccacttggtgccacccttgacatgtggggactatggggattacaattcaagattacaattcaaggtgagatttgggtggggacacatatcacaaggctaaagtatcatgttgaatatttaccctgaaaaacattgaccctaccctgtgagtaaggacaaatgattacacccttttgcagttagtataatgcttggtccaccgaaggccttcagtcacttcatacattccatcctcattgtctcttaggcaacctggagcacaacagtggcctgacacttaccagtggcatccaatgacagaccaactgaagcatgtggcatacatggaaagcagttttgaaattgaattctacatgaaactgagagatacccaactgtactttacaactggtatcatagataatgttttcagtatcttattaccataagtggtgatgaggtattgggctagaagaggtcaaggcaggctgctgttcggcagcagcagagagccaaccgcacaatcacacaccaagtctcatggtcgagagaccatggagaaaatataccccagctaagttacaccggtgtttctccaactgtggccacaattcatttgtgagttgtgataccagtctgaggaggcagtactaatgtcaataaaaagaagtagaatggaaagcatttgaggatgtcatacatattaagaaggtgttgttctgtgaaatgtttgattttatcacggtttcaaatctctataatatacataggatgtgcacacgggatcaagatgtaaaatctatttctcaccgtggagcagggttaaaacctgacagccaccatcctatttccatgtagaaagaaggtgacccccccacctctgagcaagaggatctggaggtaacaagacccattcgaggaatgaaaaagtaaaccaagaatccccggggtaccaggttggaacgaggccttttcttcagctgaaccctgaggtgctaagaggtcatgcccaacaaagggaacccaggaggtcctgacgttgttccctattttacttttgcctgaattacttcaggacaccctgtgcttcctttcccaacttactcatcaactgtgcaaaaatggccaaattgtgtaccctttccagcttctgtccaacatctgcagaatgaggctagtaacacccactttatacagttgtgaggaacagggacaatgtggcaccagccctgtgcagagacgctctcactcacttctttcttcctttatttcttcactctattattgatcaaatgtttacatataatgtaccttgtgtgagatattaaccacacagtggtgcgacatgatctctatccttttgtaaagacaaaaattgaccaaaataaatgcaaatgtgtgactgtgacaaaacctaattttgaaaattaaaattggagtactgaaaatttaaagtgcaattgaggaagtcaaaggtaaattttagaaaaccttccagaacatggagaagaaagagataaaaaaaaaaagcaaaaaaaaaaaaaaagctaaaaccaatggaagataaatttagacaatccaaatccatttagtagtagaaattcaaaaaaactaatagtgataaaggaaataaagagggggaaattaataaagaaagaagaaagttctcggagatgaacagttttcaggttgtatgggggcacgaatgtcaagcattaagaatgaaaaaaggttgacaaacctaaacacatcaaactcatcaaactccagaaaaccaacaggaagagaagaccctagacctgttcagagagaaaacccgtgcttctgagcttctgagcttcccaggggaaccaggattagactgcagactggcctggcaatggagtggaaccgttcataaacctgaacaccacgcatgcatagcatagaataaaatagcctcagggcctttgcaatcttgggtgagatcattatccccttagtgaaataaatatttctgacatgcagggccttagaacccttacgtggaggtccccattctgaaaaaaaatgcctggggctctgtgtccacaaactggagaagaaatccaaaagagaatggtgtgggacactcaaaccatgggattcataagaaacccaaaataaacaaccccctgtcctcaggtcatgtggagtcggctgtattgggagggcagaggagcggggcaggcatagcccctacacaccacacccaccctgtggtccctctgagacaggacctgcccagcccagggagaagtgcccgtcactcaggccaactcttcttgtcaagctctggagatggccacttgtgaatgcttggttttcaaaagcaaataaacagaaacaaattaggtctgagaccttgcttgcctaaaatagatttcccagaggaaatttctgcctctgactttaaatattttttttaaatgaactaggagccacaaaagggggattttggtaggttcttgacccccctgccctgggacaggagtctgtgcaccaggttgtggccgcagaggctcggaggacggactcgaacccctgccctgggacaggactctgtgcaccaggttgtggccacagaggctcaggggactgcctggctgccctgctcctgcccagggaggggagctgtaggttttgtgcagtactttgttctggagtcatgcacagccaccttctgattagaataacgtggacggatttcaggcaaggaacttctccatcacatcattattctttgttctgttggctctttaaggagcattgtctagcataaggttattgttcataaaatcccaccaatgagcatgctttatatgacaactttaataagaacctcacacgcatttgaatttatactatgaatatgaattgtagcatactttgcttgtcattcattaataactgtttaatttttagatatgagctagtcatatgtatgtttctgggtattattactaatattccattgatattagctgattgcaaaatgctttttaaagtaactatagctttataaaataatttactaaaaaagacaaacaccccacatatgtcacagcatgaaaactgagcatgttgccaatgtattaactcgttttcattttttttattttaatagattatgttgagttttccatttattgacctttggggtggtaaatttaaagatggccatggaatttcttttttatgcaaaaatacatttttatatttttaaattttctgttctttcatattttccatttgtctttacacccaaaataaattatttttctacatatttaagatttcaactgtgtcaattccagcttctgtctattctttctctccaccttgccttgagttgatgtagcgatatcttacccatctgttttatactgcattacccgtgtctagcagagtgccagagactcagccctcagtcaagggtgggcaaattaactggtcacattcatatgtagggagccagaattttctgtatgtgacctttgctgcttgtctagatcatcacatttagaaattagaaactgaaaatgtatattaataaattggtatccagtgatattaatatcactgcctactatcatttattgagcacttaatgataagccagacatttttgatatattatttaattcagacattgaaagtctaggaaattaatgcttatgaaacaacatgctcaaatcatgaagtagtaagtggtggtgctgttataacccattctgtctaatcgcacattgtttacgcgttgaagattttgcttgttgcttgggtcacatgtagagcatgtctgatcatttagaatctgtcttcacagggcagtgcgaacattttctttctctttttctttcttttctttttttttcccccagtgaatccatgttaaccactaggagcaggcacataagatccaaaggcgggtaggaattgtgtgggctctggggtctcgcataacagaggattctgtaagatagttcagagttcatggtaatgtttaggggagttatcgtatccaaaggaggggtaagagaagttcttttgttttaaactacaatgtagtagagaaaaaagatcaatctggtctaattcctttctccttcaagggactaatcaggatttttaaccttctgaggttcatatctaccattatgttcttgacaagacatacatgctccatcccttattaactgtgtgtatggacgaaattgttctctggggaaaattaagtacacaaggaaagggtttagggctcagtccctaatggtcagcagaagtggacaaggtgggttagtttccaggtcgaaggaaaagatttgcgaattctggggaaaatgtccctattatgactccctgtatttcttatttaactctacgctctggtttcctgttgctctaatgaggaattgcatagaaagtgcagcggcacttccatgatggttatctgcatcaagctgcatcatcgcagggctccgggctctctgctcacttgacctgttgaggttcaaaacagcccagagaggtttagtcctgtcaaccctggagagcaagaagcactgaatcctttggaatggaaatcataaggggacaattatccaatgccaccacccaaggctccccgaggacctagtggcgagactcaaattccctgacccgtgtctcagcgttgtgggtccttcctgagcatgtgtagggacaggccttaattcatggtgggaagaactatactggatctcaacacagataattcagtttcaattattatctcctgactaactggggagttctgagcactctctgatactctctgagtatcagtatctttattcataaaattcacataaagttcaattgatggccaaatgacataatgggtaagaaagtgttttgtaaggtttttagttctatgaattttaaggagactaggctggtcctctcaccccagaagtccctggagacatcacagaataaataagggtgacagcacgaatcctggtgtggagctcctccatgatgctgccacacgggctgagtctaccccgagtctgggaaggagggaggataaggctgtgtgcagggcttctggtccacaggaactgggagctcatggaaccatatcaggcagagcacagagctgacgtagctggcagagaacaagctgtcccagctggggcttgctcccaacaggagcctgggcaagggtcagagtccgaacagcaggcgtcaagcctaggagaataaactctaaaggggaatgcgttgctcatggacatgaaagagaacatttggttcctggaggaagctgctgtgtgcatgttgacggttgcaaagaggacgccctgtgtatgtctctccctaaggtggcgatgaattcatgaggtgctgtatattgctttttatattttacagatggagaaatcaaggcatagagagattaagtgactttgccacagtcacaagctggagaggaccaggagtagagcttagagcgagcccctgactctgggcctgcgtcctgccaggagtcacgctgcctccgttcctaggagagaagacttcctgtaaggtaaaggcggcccgtctacactcggttctgtgcagcccacactgaagcagggtggccctcactaggtaaaggcggcccgtctacactcggttctgtacagcccacactgaggcagggcggccctcactcactaggtaaaggcagcccgtctacactcggttctgtacagcccacactgaagcagggcggccctcactaggtaaaggcggcccgtctacactcggttctgtgcagcccacactgaggcagggcagccctcactcactaggtaaaggcagcccgtctacactcggttccatgcagtccacactgaagcagggcggccctcactcactaggtaaaggcggcccgtctacactcggttctgtgcagcccacactgaggcagggcggccctcgctcactaggtaaaggcggcccgtctacactcggttctgtgcagcccacactgaggtagggtggccctcactcactaggtaaaggcggcccatctacactcggttctgtgcagcccacactgaagcagggtggccctcactaggtaaaggcggcccgtctacactcggttctgtacagcccacactgaggcagggcggccctcactcactaggtaaaggcagcccgtctacactcggttctgtgcagcccacactgaggcagggcggccctcactcactaggtaaaggcggcccgtctacactcggctctgtgcagcccacactgaggcagggcagccctcactcactaggtaaaggcggcccatctatactcggttctgtgcagtccacactgaggcaagacggccctcactcactaggtaaaggtggcccgtctacactcggttctgtacagcccacactgaggcaagacggccctcactcagtaggtaaaggtggcctgtctacactcggttctgtacagtccacactgaggcagggcggcccccactgtagacggttaggttgtgtgctctctgcgtgtgagaaaagaactaaataaacagcagcactcacatctcctagcccggtttcctagcctcttccagaccacattgtccacaaaccacttccttatgtggtcaaaacaatcagcctgcacaccgcttcctccacctcagcctctccggcccttccctcttccactttccatcctgggaagatgcctcagctttttcttgtaaaccattccttcagatttccccctctcctcttccatatcagtcacttcttcctttctgatggctggattgaccccatcttggattctaagaaacagagggcagcttccttcctctctcttgtagctcttcacttgcctctgtcccctggggcagtcctaggcagagccgctgcccacctcgtcacctgcagcagccctgagaatcccactacacgctggcctcctcctgggactccccttgataaaggagcaccaagcccaggcagtgttgtctgggacggggatttcggcatcagctggtcccacgcccatcacccgggaacaaagggtctgtgcttcgaacccacacgggagggcctctctcatgctcaaccactacccggcagcagtggtcagcgagagaccacccactcacttccttcagtcctccccctacagcggctgtgctgacaacataatgttccttccttttcccttccaccccttctagaactttctcctctcttctgcaagaggcaggtgtttttttagggttttctcttattatttagaatgctcttgttgatgctttttttctttcctgctccttgaagggagggcagtgtgatattagcggtgcatttctctcatggtgaagggcactcccagcaggagagcgcagtgaggacgacagtctagtgaactcacagctaccgcactgggcacatagcagcgtcccctcacacgtgtggagccctgtgcattttccgggttcttccacacatgctagagtgttcacatccaccccgtcacataaacacacaggaaagacattcctgtggaatagttcgtgcagatgataaaatagatgcctgaaagctaaaacgacacagtaagtaggaaaaaaaaaaaactattccaagcccataccctgtctctaaacttcatgtttcccatttaataactttcagaacattttcatttctatgacttttctgtggaataacgtatttcctccccagtgaatacttaacatatgtcacagattccacattctatcacttgtagacacaggtttctctaagttttctgtctgttctttattcttttagtattttcctccccctaaaaaataagtagaataatttaaaaaaattaaaaagaatatgcaaactagaaaaatcattaagataatttcaaatacctgtataaatgggaagttccagtaatatttttctatggcaaaacatatttgaatttttaattttaaattttttttaccacattactaaaatctgaattagggagaagtaaagatagaaaatgctgaatataaaccagatgtagtctcagaacagccctatagatcagcaatacagaacactgtctattacttgttaaaatcagctcttcagtcacatttgtgttttttgtagctatcaaagagagcttttttcactagcaccgtagccacacatctgctgggacaggcattcatcagggagggagccgacacctctgagcatcaccaggagacagcacggcccaggggtggagtcagtggagtcagatgcccccaggaggactcgctgggaggagggggcagggcgtgaaccagggctgagccccccaggaggactcgctgggaggagggagcagggcctgaaccagggctgagccccccaggaggactcgctgggaggagggagcagggcgtgaaccagggctgagccccccaggaggactcgctgggaggagggagcagggcctgaaccagggctgagcctggtgagggcaccggaaggaacaggcccgtcaggggctcggccactcaccccaaaatgcaaggcttagtgagaaagtcacatgcaggccacggagactgggattcttttcaaatgactgaatgaccgaaaacgtttatgtatacatgggaaaaaataccatgagcaaaatagaaaaacaacaaaacaatatcaacaataagctgtaagaaaatactggtgacagataaggtgggcaaaggggttagcaccgcagtgtacagacagctattatgaatcaatgtgaaaaatgtgaaaagaaagaagaaaaacaggcaaaggatatgaatcacaatttcacagacgaggagctgtggacggtgagggtgtgagagaacgcttaccctccctgggggccaggaaatgacgagacacgtggctttactcaaccaaagccaaggacggaataaaattaaaggtgaccagcgcttccagaaaccagcatgatcacatgttactaaaaagggcgtggaatgttttcttttttaatggtaaagtgacgatatctttttagaaaactctattctggaaatacatgcaaaatacatgtaatcatttttgtaaattatttttgtagtgaaataaaacaacataagccttgttagtaaaggaacttggagggctggctggataaattatagtaggtatattctgaggaatactatgcagccattcaaaaagatgagttcaatggatagacattagcctagagagatggctgtgatttttttttaagtgaaaaatagcaagtacaaaaaagttttgtaaacagagcctgattttgtaaacaataaatatacaaagagcctgctctgtgtattcattccattgtggagtggagtgaaggttggtttcctccagtaagaaaattggctgtgggaagagagacagcagcggctgcccaatccccacctggcggacccctgtgtgcctgtttgtacttcaacccgataatgtaaccgcccaaggggttcaccttgcctgctgcccagacagagctgattcaccaagacgggggaattgcaatagagaaagagtaattcactcagggcatctgtgtgggaggctggagtttcattattactccagtcagtctcccccgagcattcaaggagcagagtttttaaggataacttggtgggtagggggaagccagtgagccaggagtgctgattggtcagggatgagatcatagggaggtggagctgtcttcttgcgctcagtcagttcctgggttggggccataagatcagatgagccagtttattgatccgggtggtgccagctgatccatcaggtgcagggtctgcaaaatatcagaacactggtcttaggagcagcttagggagggtcagaatcttgtagcctccagctgcatgactcctaaatcataattttaaatcttatggctaatgttagttccacaagggcaatgtagtccccaggcaagaaggaggtctgctttgggaaagggccgttatcatctttgtttaaactgtaaactaagtttctcccaaagctaattcagcctttgcccaggaatgaatatggacagcttggatgttaaaagcaagatggagtgggttaagtcagatctctttcactgtgtcagtcataattttgcaaaggcaagtaaggaaaaggaggcattattgctagacttggggtaatcagcagagaaccactctgggttcttatgcccgagaattcccggacagaaggcatcacagcggggcatgggggatagacaggaaagcaggggaggggagcacctggggactccagcaatgctccctcttggtaggatcaggcatggaggagggtggtgtccaggcagatgcaaggaaacgggaaaaaatggcaacagccaaaaccagaatgtgataaattatttgataggggaaagggggaaaaactagccaagtattattttaaagcttcggaagggaagaacaatcacctcatacattcaggaactaactatggagaacgtggaccgacgctgggttgtcatgaggccccacctcacaagctcttacagccagtgaactgtgcagaaaaaccgatgtctaataaataaatttgcaaaacggtgaggaaggagaaaggagacagcagtgcctaactgtgcgataggaattaggggcgtggttaagggaaaaccctaagatgaacttgatgtgacagaggcagcaaggagtgctgaccggagaggttagggctgaaaacgccagttcgaatccttctttgtggagcaggagaggcagctatgatgtcctctgagaggtgaaaggaccaggatagagctctgagagccagtgtggtgaacccgagagatggaaatttgggggaacgtgatccagagaatcctagtcttcgctgatggagaggaattgacaagactgtggatttgggggatgggtcagtggtgttctttgaaagaaggatgttaaaagtgatagccaacagggtcctgactgcatgagagagggcaggttagccgttggagggtggaggggtctgagctgaaggaaagcaggaggcgaaccaggcgagagggatggacagacacactggaaagaaggatgggagagagtgggtcctcagaggtcagctttaagaaaaggatctaggtcaggcgcagtggctcacacctaaaattccagaacttttggaggctgaggcagaggatcactcgaggccaggagtttgagaccagcctggacaacatggtggcaaaaaatacacagattagccagacatggtgtgcacctgtaatcccagagtctcaggggctgaggggaaaggccacttgggtctaggaggtccaaggctgcggcgagccatgatcgtgtcactgaaactccagccagagtagcagagtctccaaaaagaaaagaaaaagatacagcgagaccctcacaagagggggcggcggcaggggctgatgtggaagcgtaggtgggatccaacaggagccccggatccaccctgtgatttggggccacgattcctggcagcgagcagagatttcaatggaaacttcttactcggaagcaggctggaaggggatattgaatgagagacgtagttgagaccagcggaggggctggcttcaatggctcctctgctcttccttgtaaagagaacagcaagcttgctgcctgagaggggacaagatgggaagtgcaggttgcaagggagagcagtctccatcagccctgggatgagcttagcccacaaaggaagctggcacggcaggaggacccagatggccgcctgtgaggctgcacagcagattcctgggctctgttccaacacatcccagagcagtgtgcaccagggcatgcgccagccttgcttcttcacatggtattgtcctggctgagttgtggcaatggacgctgagggctctagacgactgggcctgttccagagcaccttagaaggcagggctggtcctggcagtccacacagaactgccgttcttttccccagaactctctccaagccgctcccttctttggcttctcaacatctctgggaatatgtgggtgctgttgcccacatgtgtcatcgagacacccctggccatggagcttagataacttgcctgaactcatacagctaagaggagacaaaggcagggtgtgaccctgggaggttgagctccttaccccactcttccccactgccctccatggcacccgcagtggtttttctattttggtgctgagttcatcctgtcttgggttacagcttggtgcttgagtatctgtcttcctcgtgatttcctgagggtctcttatttacaagaaaccatgccacaaattgaggaaccacagaattcaagaatgaattgaaaaagccctcaccctcaggaagtgtgcactgctgtgtagctatgtgtgagtttataaataggtacaatagaggatagagggtgaggagccctcactggtggtacagggagaactgtgagttcccacaagagatggcgtccgcccaggaatggggagcatcagctacacctcctagatcaggactgtgtcccttgaccacaccgtttatcctgcaagacactgattttacaggtgccaaaaggccagagatgatttttatttcatactatacttgtgtgaaaaagcataaactaccagccattaaaattatccttagtctaagtggtttttgttgttgtttggttttttttgagacggagtttcactcttgctgcccaggctggagtgcaatggtggatctcagctcactgcaacccccgcctcccaggtttaagcaattctcctgtctcagcctccagagtagctgggattacagacacccgccaccatgcccagctaacttttgtatttttggtagagacggggttttcaccatgttagccaggctggtctcgaactcctgacctcaggtgatccacctaccttggcctcccaaagtgctgggattacaggtgtgagccaccacacctggcccctagtctaagttttttgaatgttcattacttacctaatatttatgatgtttccccctataggtaggaaacgtttccctttattttactcattttctttcctgcgtagagcatctgtgactcttaactaaattatttccgtattgtcaagaaggtgtgtccaaccttcatgcgatccttaatcaaaccttgttatttgtatttagtacaactcagcaaatatttatccagccactgccctgtgccaagtgccatgctgagggctgcagaatgagaagatgtagggtgcactctcgcttctgtcctgggattgccgggctgcagctcctgggctgggtttctcctggcatgcagagagccgcctcttctagcaatgacccagttccccaggcttcaggactgcagctcctgagaagacactctcagctgctcccttgcctggcacagggaacttaggagtccaaatcctgttaaaaatgaagaattagttgaattaaaggagactgtgaagagtccaagaaaaatattctcatctagaaaagaaagttgtgttcccacctgacacacacacacacacgcactttttagattttgtaaatgcaactaaacgtttggctgtaggagtcctggagactgtactctggggccaaagtaccagcatactagttcagggacatgaaaggctaatataatatttggtattatgagaaggtaatcaacagtacccagaggacttcatcttaccctacataagaagggctatgcagttatctgtaacatggattccacaagcatttgtttcttatccctttgggaaaacttacaacacccagacatggaaataagaagaaagcaccaagcatatcctcagcatcggctatgtacccagccaggcgcagtggctcatgcctgtaatcacagcactttgggaggctgatgtgggtggatcacttgagctcaggagttggagagcatctgctatgcaccaagctctgtaaaaggttcttacctaagattcttttattcagtcctctccaccacccaatgcggtaagcagggattttacacatgaaaatactcagattcataaaggtgattgtgcccagcataagcaggtttgtgtatggagccagcactggcactgcaggctgtcaccccgtcatgcacatgtatgctgctgctgccccgcacggtgcacaggccacagtgtcttccaaagccatccagtgaaggggctgccactgacaaggaggagttcgagaatatgaagacactgaaatctggagagccagcagagtagacggaggatactgcccactacagggccctggaaagcacatgcagagatgttcagagccacgtatcatcacgggcccaccttccacccacccagcatggtcaggcagccctgctgtgtgcccggcgctccgcaggaatgggaggtgcaggcgggaatgtggcacatctccaccccggaggtgcagctgggctggcaggagggttggaatgtggcaccgtttccaccctgtaggtgcagctgggctggcgggagggtgggaatgtggcaccgtttctaccctgtaggtgcagctgggctggcgggagggtggaggtctcacaagcacatgaagataagaccagagttattttaaaggcatgtgcaaagtctatggaaacttgtttggagcaactttcaggaagatcaaagaacaaattactccaagagcagagatgaaacgcaaagaaattattaaacattgaccaaaagctcacgtgctagaggacagcttcagggggagttggtacattctgaacctttgccacatacagttccagtatctacccaggacccatgaacgtcctgatgagccatattctgagtcttgaggcccagcatgggaatgtcactcctgtaacaattacataccccagaagcatcaactgaggtctggcttctccaggatgctccagaggtcctgggacttcaacgtctgctctttctcttagactcagtcatcctcatgggcagagagcaggggacccagggagcacctgcactccccacgcagcctcagctcactgttgctaggtccagcttcagaaccagcttggaacagatggagagcagcagacgtgaatccctgaagcaggtgggcaggaggcataagcccagaaaggaatgggcatgagggccccagacttgaaagctgtggtgtggggtagcacatgcccctcccatgggaacgctgcccctcccatgggaacactggctgcccctcccatggaaacgctgcacctccactccggccatctgaggccaagagaaatttagagcaatgctttcagatcatcatatttttccagaaagaaaaaaacaaaaaacagaaaaaaaaaaacaaaaaaaacagaaatcaaggttttgatataaagcctggagatttttagatgttagtccaatttgttaagcaccaagaacccgatggaacagttctaagtggctgggtatgagcccctggccatgagactgttcgggtaccccccagccctaaaattctgattctttgaattttctcccagaacttgctggcaagataaagtaatggagaagtcataagaaacacattcaagtttagaaaatcatattttaaaatgaaaataaggatctattttcttatttttatgctcagggctgaaacaacatctattttaccaacaacaacaacaaaaatagttaaattcttgaagggcacctgacttgatgtttcctctgaagttctggaaggggtgccttcctgcccagccattccttgatgtaaaagtaggtatcacgctgtgattggaaatgcaaccattacatctgaaagaggctccagctcatcgggtgtcagctcttagtgtgaacaacaaagcttcaccactgcttgcacagcatctgacgacccccttggcctgagatgaggcctccaaagtgaagtgaggcctctctcttcctggcccctagcgcttccccaaaagttcttcttgtgggtattttggggcttctctgctgttatcgtacatgacgtaaattgggcaacctgtttttcatggatataaaactgctagaccatccttttttgaataaaatcaaatgtaaattattttatgaaagcatcaccactgcctcgattaccctgtagacatcttcgaagcctttgagacttggttcaggtttggtttagtttcaaatgttccattagcttcccggctcaaacatgatgggaggaaacccttcttgggccagggaatcccaggattttcccagagcaaataccctgaggctttttttgaagctctgaaaggctccttgctgacttctggcttaacgtccagtgatcccaggccgcctgaccagcattccattgacgtggcattcccaccatgcatgtggaaatagaggcgtaggtgtcttctggctgcatgtggagtggatatttctttgaaactttttatttgtattgtgagaattttttaaaactgtaataaaattattaacaatgtagctgaccaagagatgcattagtacaatgtaattagtttattcattcactcacttaactgaaatttacaggcatctaccatgggccaggcacttttccgtcaggacgtccacctgcctgaaagataggatcctatattttgacaacttgcttttcctgtattcaaaaggctagtggctgagtgcacttcctatggctgtcctcccacctctgttgggtccagctcccagctctgcaccctcacaacacacacagatctgagggagaggctgggggcacccattgaggcacaggctggtgtggtgtccttggtgccgtgctcgaattagtgctatcctgggtggtcgcactctcacaagttggctctgtcaaaatgatggagctcccctctagggggcctattacaagacatctttattgcaacctgtcatcattttgattgctattttcttaggatttgtagcgtgatttttaaagtgtttgtctcaaactaggcatagaagtctattaagcattcaaactatgccatttagaaggatttatttttagggtttcatgataatacgtgttgttgtcattctctgtttaaacatttttgaaggatgactagaaaatataagttatgattcttgctaatcttcatagatgtatttttaggagcccaaacttgctggagtcagaattgagacgtggaggtattttctatgacgtagggttttagaaggctgaccagctcccagctgccttggaaagagtaattcctaggaagaagtgctgttgggaaaacacctggatatggctagacatgcacacctgcactgccttctgccaggacttccagtttctcttcaacattccttccccgagccttccttacccctcacagaggctaggactgatctctggctcctgccctccctcctatctcctcttcttgatgctgctgacaagcaaagaattgaccaagcgaattgagcagcaggagctgaaaggcagggtctggctggttggcaaaatggaaattgcttcctggttagtggaggagtgactgtggcagggagggaggcctggagctcaggttctggtgtcaaagtgggagctgtccgtaacccagcctgcagtccaagcccccatgtcctgttcctgcaagaggactctgtcggggaggggagagcaggtccctgtggctagagactcgggttaggaggaccttgctggtctctggcagacctgggacccaaagtgagctcctcctgggttcacagttatggcctaatgtggtacttgacatcagaaagcagccactgaggactccaagggattttactgagtttatgaaattttcgtgcatttaaaatattagttcttggccaggcacggtggcttgcacctgtaataccagcactttgggaggctgaggcaggtggatcacgaagtcaggagattgagaccatcctggctaacacggtgaaaccctgtctctactaaaagtacaaaaaattagccgggcatggtggcgggcgcctgtagtcccagctactcgggaggctgaggcaggagaatggtgtgaacccaggaggcggagcttgtagtgagcccagatagcgccactgcactccagcctgggccacagagcaagactctgtctcaaaaaaaaaaaaaaaaaaaaaattagttcttggccaggtaccatggctcacaccagggatcccagaactttggaaggcagaggcagtaggatcacttgagtccaggagttcaagaccagcctgggaaacatagtgagatcctggctctacaaataattgaaaagattagccaggcatggtggcacacacctgtagtccagccactctggaagtggagttcgagggtgcagcaagctatgattgtgccactgtactccagcctgggtgacaaagtgataccctgcccctaaatatatgtatcaaatatatatacattataatctcttcactgaggctcaacttgaggaaagcatcccttttattggaaggaaaagagaaggaagatcatagtactaaaataaatcctgagtccaaatgtaaagttttcatattaggaaataattcacctgctctctcttcatgaatcactcctgacagctttattggctcaaaatagattccttaaattcaagacttttctttaagtataaaacaaattttaaatcttagaaaacgtccttattttaaaaataaatattagacttcaaaataaaaagaattactgctaaagtggagttttaagggtgattttctaaatgtaaattactggagaggtaatcagaaacccaagcagtgataactgaggtgaactttctccagttccaaggaagatcagagctgatgtcttagaaaacgcgactgagccattcacgggttcagtaagtgaagctcgcagttccagccctgggaccaccagaagaatgaattcaaatgaacggtttaaacgcctgaggctgccaatgacagtcgccagtggtgggcaggccctgggtggaagcaagcccaagcattcttttcaggcgggtaggagagaagggcagggcaggatggaggggctggggagtcctgaagaaacaaagtgtgagagtgccggcaagggccagctgccttaggaccacacaccatcaggtgcacacattagaaaatgaaaacctcctggcatttcagaccatacgttttatgctttctgcttaatttgaatctttctggcaattggcacttattaaacagctatgtaaatgtaaaatttaaaacagcttttgaaacccttcagatttgggtttcattggctgaaagggaaagaaaggggaaccccatctgtttagtgtctgctccatgtggggtgctgtgcttggcatctttcataaattatctcctgtaatgctcatagcaaaggcccttgttcagcagaggaaaacacactgtagagccaccataatccaaacaggattgcactggaaggaaccgacggaggagggaacagagagtctgacccaactgtggcaggaatttcacattcagcaagaggaatattttagtgtagggagggaatatgatttatttaataactgattactggaagaattagctatctgactggaaaaaaaataagtttgcccctatatgcataaaaaatactgaaaggatgaagaatttaattgtaaaaataaaacaattcttatccttatccaaccatatgagcagttagctaataaggccaagtttttctatttaatgcccacaaaggaaaactagctttactgcacttctgctcacaggtgctcccctaaactacagcaagagaaatcataaatgtgggtttattcacgagatgctggataagggtaagcaagctgggtgatgactgagtgtgactggcccctgttctgctggaaactttgagaattctgtgccctactgaagggagctcatagccaagctcggagtgtgtctctcccaccccagccccagctttgtctctcctggaacacacctgtctctccaagcctttgggtctttacacgtcctgttccctctgtgaggaacacaccctcaccacagtttttctttttaacctgaaacatccagttaacttttaacattcagcccaaatatgagttcctccaggaaatttctttcttcttcctaatcctcatccaatggaatgatggaatggaatccatggaatccaatggaagcctcatccaaacttccactacacccccggagaatgtttctcaacttataggccttcattaaatgttttaattcaattttgaattccttaaagaatacgattttaccccattatctctgcatccccagacctgtgacaaaggcaggggaccctgggaaatgccatttctcgtggatgtgaatggcctgtgacaagggcaggggaccccgggaaatgccctttctcatggatgtgaatgctgtttttgccattgctttaggcttcttgactctcagttcatctctgcctcatgtcactttggccctagatcactttgctagaattttctggtgttttgaagtgttttcatgttgaatagcaatttcagagcattgatgtgttcctcatggtgctatttagttaaatgtcaaatccacgtgatgtggccccagagtttcatatcccaggtatatctttaaatcacaggaaagggcagaaaacccaaaagctgcctgatgagccattgtgttgtgtggattcttccatcagaaagttttttaaacccatttctttctttcccagacaattatgttcccgaattggctgacgatgggactaagccacagatgctgttgaggccactgcccaagccctttcttcttaggcgactgccagtctcctcccagcttgctcccaactgcactgcctgccccctccatgccctctctcaagctgccgttaacttgtttttttctaaaacatgtttgcgactcgtcctccccatgctcaagaaaggccagcagctgtctattcagctggaccagcggggcctcccggtacatcccttccaacactgcacgtggccctggctcaggcccgtcgtctgcaccgtctgatgtcgtctttccaatattccacttcaggcacctccttgacctgcagcattcccagcaaatggactcattcattcattcattcactcaataactgcatatcaagcctctagatgccagtcatagagacagtctcttttccttcctttcacacctacacaaacaattctcatggatcacagctttccccgagcatctttccttggcttccacttcccattggcccctcctttgctgaagtttttgttttggtattaaatctggcacatcattatgtccatatatagcccattaagagatttttaagctcattaaatgagcttatgtttttattacatgtatgattttatcccccgataccataatactcatccatagtattcatcaataaatagctgctggttagttgctataaacattaaatcaggcactgtccatgtggatttctgatgcctttcatactgtacctgttgagttgtgccttgctagtttatttcagcggcagatctaccctgttcttttctggagtgtgcctcgaatagagccacaggcatctaatgagtcttcttcactcagtcccgatgttcttcctctaaaccatggaggaagtggctttggtgtgccctgtgagccggtgtagaggccattcaatggggctttggccagcttctattgctcatctcttcttagctcccccgtcgtcttgagtagagttctcctgctatccagtttgccatgtgcaaacacttcccatactgtgggaatgtttggtgaacaaacatactcgtatatatttaccacgcaacagcatgctcctgaggcttagtggaaacaaagacagacatgtgatttttggtccttactccaaaaccttcaactcaaaccatcttgggtaactcaggtggtctgaattttagttttctcatgtattaaataggtataataaaaatactttccttacaaaattgttgtgaagatcccacaaagtaatatataaaagcatttgtaatgtctcaagtataagatgtgtcagttcctatgagtggaaggtctagatgcctcaaaggaaaccaagcaatttagataaatgtggaggacaattgcattccaggaactaaacaacattgagagcgcgcccctgatggtaaaacgtgttcttccactgtacctacagcctcttgtcttaaccgcttaatcagattaaaactttcagttacaaggagaatctaaatattatatatatatgtgtgtgtgtatatatagatataaatataaactatatattatatataatgtatatataatatttagattctccttgtaactgaaaggtatatatatacaaaatatatatgttatatatataaatatttgtttttatatatacataagatatataaaaatacatatatattatatatatttaccttcttataaacctaatggctgttatattcttagtacaaagcacaactcagaagcacacagatgtgtctccatcaaattcttgaaaagagagtaaatagatggtacttcaagattcatcaaaatctaccccattatagaggacaagggcctcctgattaaatattccctacaaggttaaggtctgtttataattgtttgagtaatacatttagattgcctggtcttaccccctgcccttgtagagggcttcccttcatggagggaaacaggattaaagccccattaatagaatgccagggagagtgagccgcccctgcagggctggcctgcacaggcaggataagcacattgatggctgctaatctatccccagatggaggtggacaccgaggagaagcggcatcgcacgcggtccaaaggggttcgaggtatgtccgcgcttccctgcatcctgaggccggctcagggtcaccttcatcctgcggaactgaggtcgattctgaccccactttcatgccacccttttggtaattttctgtggaagagggtcgcttgtgatagatggtaaatttttatctatttccatctctctgcagttcccgtggaaccagccatacaagagctgttcaggttagtgccatgtgggtaaaatgcatccccattaacagtttggaaaattcacgccttctaatgggcacactgcaccttccagctcatcggcagcttgctcacgccctgctgcactgatgaaattaattcccccgagacttgctcgtaaaaagcctccccgaatttccccctcctttggattgtgtgatttctctcctctgtctgagccgccctccttctctctgctgccacggaagctttccgtctcacctgcctgcctgcggcaccgtgtaatccattctttcctgttgcagctgtcccacccctggctgtgacggcagtggtcatgtcagtggcaaatatgcaagacacagaaggtaatgcctgcatttttttttccacaatgtgctgtctaaagtgacttatttggggacccagtcctgatgatgaactgtgtgagcaggtgttcttggaaagcaatacacattatgccttctttttcttctcacactggaactcagtctttgtctcttgaaagggttctcaaaacataagccgttcgatctcgtgggcagaataggtgacactccttaggatgacacaaattcaggccagccttaagctcatgttcccatctgcatatgtggtgctcagcacacggccacctaagaacttcccactgctcaccgaggagcccaatttctccttcctcacgtcctcattctgggagtggcaggatggtaaacaatgaacggtcaattaaaatgtgacctgctgacctgtctgtagactccatttccagcatttaacggggttcatcctgggaaactaagcccattcttacatctggacggctgcagggtgaggtcaggtcaagtgaaggtcagggcatatcaagcttgcaagactttggaactgcagtgattacattaatcttataaataccagcatttcaggtctgcgacagggatggggtggaaaacctttagaaactaaggggaaggtgatgattgctcaaaatgtgtcatggcagaattatatgttacatgcccgtggctgactgtcaggtacacatcagtcctttagatgtttttctggtaagcattttttccctaagctattcatgaagatgtgtctttcaatagaaaggtttcaattatagtgaggtaaaagagtttacaggctaaagtatgttttacttttacaaattagattgcaaagaccaaggtcattccagcctaacaaaccctcagtgagcagacccaggtcacaaaactgattctaaagcgggtgcatctgccgcacatctgggaggcctctcctcacggccttgcattccatttcctttttagtgaaacattagcttacgagtgacatccagcaattattttgattgttctttagtaaaatcaaaggaaaaattacaaattactcccaaatccccattctagcatttgtggaggcaagaatgtctaatgagagaccccacgaaacaattgtctgacttcctctgttacagatcaaaggaattgtgggctatttttcagataattttgcaatttcaattattaaatttagtcaattacattatgattgttattgtataaaatagtaaattattgaattacataattgaaataagtagtttacttaaagtattattttatgaagaaatatatatgtcagcatttaatctaaaagtctaaaacactgcattgtttatgttttcaaaagaagttagtcacccatgagaaaaattcattttcccctaatcatctcttcattagtcagtagttaaactttatcacactgttatataaaaattaaatttggctaaaaagtttcttaaaatgtttattctaatttttatgtgtacatagtaggtgtatatacttagggggtacatgagatattttgatacaggcatacaatgtgaaataatcacattgtgaaagatggaatcttcatcccctcaagcatttatcctttgtgttacaaacaatctaaatatcctcttttacatatttttaaaggtacaattataaaaagttgtaatgaggtgtgagctagatataattttatagccatagttttgcaggaaaaatcgtgacgtttccaaataatttcaagcattcatatgcttaaccaaggtgcatttcactaagaaatgaatttatgtgtcccatgtaatgtgtgtgtggatctgttcatgagatctctttccctgcttcagaaatgttccctagagtttgatttgaaaacaagttgggctttttcttccttcggaaacttgccactgactcattagtgcagaagtgcctgagtctcagaggaacccattcgctgggatgttagggaggagtcatggaagctctcgggccaagagctgtttccaataaacttttgcttaattttttaaaaatcatcatttttaccatggctcatatggtatgtaattattagaacaccaaatattttaatgcactcagttatctagaacatctaatgtggtatagttgaaaaagaactatttcccggttacttggcccagatgctagcttccactacatcactaatggaccagtagctctggacaacttacgtaacgtctacagccttcagtttcctctgttctaaaataagagggttgcagactttattatgtaaaacggtgcaaaaatgttgtcactgtgtgagccttctcttaagaggactctcactgagcgttttctaagccttattatttgatgtctatgtatcaagaaaaattttaatttcttaaacttaagaagtgtcccttgatgtattaggtaagactcatggatatattaacatctatgactattgctgttttaaatttggaaattttccgttatatctgcctggttttttgtttttttgatatggagtctcactctgttgcccaggctggagtgcagtggcacaatcttggctcactgcaacctctgtctcctgggttcaaggtattctcatgcctcagcctccagagtagctgggattacaggcacccgccaccacacccagctaatttttgcatttttagtagagacagggtttcaccacattggccaggctggtctcgaactcctgatctccggtgatccgcccgcctcggcctcccaaagtactgggattataggcgtgagccacctcgcctggccctggcattgtttttttactggttttgaaagatttgctgactatgaaagctatcccttcctgacagctattcttgcccattcatgccggcacaccctctgtgaacacagctgtgatgctggcatttgctgtcaggttcctgatgggaataggacaccaggcttcttctaaataggacaaaagagtagaagcctccgttttggttctgatgaaattacatgtctttttttttttttttttttggtcttttaacaataaatgtttccaatgaatgtgtttatgttaaggttacaagttcattttgctcatacactgcatcagcaatagccaagtaaaaagttgtatttcagtactttgaggtgttgatgtattggaacttgccaaaaacaacttgaggtagatgtagggcatcagcaatgtaaaaaatcaatttttcttttttaggaaaggaataccaagtaataaaatgatgccagccatttagtttagttttgttttgagacagagtctcactctgtcactcatgctggagtgcagtggcacaatctaagctcactgaaacctctgtctcccaggttcaagtgattctcctgcctcagcttcacaagtagctgggattacaagtgtgcgccaccacgcccagctaatttttgtatttttagtagaggtggggtttcaccatgttggccagggtgctctcgaactcctggcctcaagtgatccacccgcctcagcctcccaaagtgctgggatcacaggcgcatgccaccacacccagatcatttttgtatttttagtagagatggggtttcacaatgttggccaggatggtctcgaactcctaacttcaagtgatctgcccacctcagcctcccaaaatgctgggattacaggcatgagccatcatgcccagcctgccatttagtctttaattttcaacataagagatttttaaggaaatcaaatgtttctcacaattgtagtttacaattttattgctttgtaggacagacgctatggtagtttctgggggccatacgtcaccctctctgccacagctgcgggatctgctgtgggtctcagaaagctgtgggatctggcagtgggatctggcagtctgtttggtgagccacgcctcctcagtggtgttctgggtctctttgaaagtggctggagtggattttttttttagtgtgattgttgtatagttacgggcttgtacgaaattgagaatagaggaggatcaaccagtgcttaatacctgggaaagaaaataattttaaaaaggagtttatgatttaaaactctggttaaaattttttggtaggagtaaggttataatatttattttattggatgttctacattaatttccaaatcctgtctttgaacaaaagataatctctgtagttatttactggtgttaatagtttatgaagaatttgaaataactgataagcctatgtacaactacaatggtaaaccttaaatcaaaatataaatttggaacaacataaggaaaatgatcacctaattttactgaaaactcaggatacatcgggggtcttaatgtggtgttacattttgttctgggtctcttggctaccaaggaaccagtgagaaaggcgaaggacagagttccaggatctgataaaagcattaagtcagctccttagagacgcagacactcttggcagcgaaggaaaactgtttccatcccacacattgcccagcagggatccaagcttactcaacatttttgggccctgatacaggtcatcaggccagacctcctaggaagctaacaaatatgacaaatatttatcttcagaaacgtcattattagccagtcacctgaatttgccttttgcttttcccaactgaggtttttgtcttgtgatattagcatataaatgacaaaaacacggtgaattttataagcagggctagaagtaatgcttacatcacgagtgaacgtgctcatgtggtctttcctgcacatggtcacctgtgtttctgcgcccattgttagatggctgcacacgtggctcagcccattcagctgctccgagcacctccatgttccccacaccacactcagaggtggccgggggcactggtgcctcaaacctggtgtccagccaccaagctcacaaagcaaacctcagtcatcctaagtgagtatcccaagatttagtttcggtccccaatatcaaggaagagtaagtccctgtgttgcagtctcccaactgtgcaagtcagcctggtgtggcctccaggcatttaaaacatggaagacagaagctgtcccggtgtaccgtccgctattgttttgtggatagatggaaggaaaacagtggcctactaggaagtcaccaaccttgacattgaggaagctgctgcatattcttctcctcaccctcgtagcagtttgctggctgggaaggccccgtggagataagtggggtgaatctgcccaaagtgcgtggtttgagcaacgctgcattggtgtgggaggcctggggagctgcatctgctgctactgagctcattgcctaatgcagacacctgagcaggggaagcatcacggggtgaggcctggaggctcagcatttcctggcagcatcctcacaccaaagcctgctatctcctgaagggcagggatacattgaaagaaaccacaccttcctctctgtctgtgtaggtgattgtttagtggggctcaagtacctgctaaagagacgttgttattcatccagaatatttcatgaactgatgctggcattccagctaaaatatcgcatgtcaacatgtctgcaataatctatttttgaacatttgactaagatgaaaaattctagtgccttatattcaggttttttttggctttgcatgttgatataaaatactgtttgtgttaaaaacaaagtgcaagttagtggttagaatggaatctatagaaacgaaatttaatcatcaaaataatggtcaacttgctgttctgaaatcctttttcctaaaatttcccaataaaaattagaaataggaataatcaaaatttgttaatatttattacagattactattaactgattacagaaatttgaattttaaccttccttgcaacagtgatacacatgctaagacatttggaatgaattggacacacttatttccaaatggtgatttttgtataagctgccaattcaccagagagagagagaggaaattcctagtaaggcctcattcctcacatgtctgttttgtgatccctctgaatttatttctgaaatgtaatggattttattcccatttaaccttcactggactgttttaatgatttgtttgttgaacttagggttccaaccctgcaatttagcatcagagtctttgtacactcaataaacacccgaaagttaggtgatgggtattggtagtacattcaaatccttcccaatgtagggtacactgagtcaaatcatttcatttgaaacttaaaaattaaaatctccaagtgatggcttttccttttcattagaacatgactggggtccctctggcttgcggcacacaccctcactcagaccccctctccattccgcacgcctcttgcctgccagtgtgggtgccatggcacagcgtggtgaataattgcctgtcttcacaggaggctgttctggagctaaagtcaagggcttgcttcctgatgtatgcacgcctcatttggagtctgccaacagcctaggggctgtattattcatgccttgacagagagcactcactaaaagccctggaacagagccaggtgctggctgagagatgtggagcattgcaacttgcaactgagaggagcatctataatccaaaaataaataaaaaaagaagaaacagagaggaagacagagagaaaaataggagttcctatatctcccctttaccagtttcacatagatagaaatttcatttgcattaaaataaaatatcctaaaaataattgcatttttttctaaccacgcttgaaagtttaacacaattttccacatttaattgcaaaactgattttaattagtaaggccctgcatgtgaaaaatgaagatccacttgggtgcgtggaatacattgcagtgtctgctgaatgctctaattaacgtgtggctgctgtacaatggggtacactgtgggatatttatgaaaaattctgtgcacgcagcctccaaaccaggctatctgtgctttactccatgaatccgtgagaataaatagctctccttcattctttatgagacacattgtgtacgcctcacccccacaccctccccgtaagctttatgcacgcccgtccttgtactattcatcactgatattataaatcagaagatagggcatgcatattataacattagtttgatagcatggcatagttgcacatggagccaagattttgaggtctaggggtttacttgggtgaagaagagaatcaaacaggtgacgtccaggcttgctgttgctcagaggcctgagtacccataggatttgcagacacaaaattcaggcctgagtacccataggatttgcagacacaaaattcaggcctcctcttttgttttttcttttgttttgtttagttttttgagatggagtctcgctctgtcgcccaggctggagtgcagtggcacgatctcagctcactgcaacttccgcctcccaggttcaagcaattctcctgcctcagcctcctgagtagctgggactacaggtgcatgccaccacgcctggctaatttttgtatttttagtagagatggggtttcaccatgttggccaggttggtcttgaactcctgacctcaggtgatctgcctgcctcagcctcccaaagtgctgggattacaagcatgagccactgtgcccggcccaaagccttctcttttgggtggtggttgcagtcaacctttattgtcacagtaagtcttctgtgtacaaaatgaacacctggccatcatcctaaagaaagtagtttgcctggtgcctgtctgtagtgcgtcagccccaggagacacacctctgggcatggcctgtgttgttgtattgtgaatgcaacatgattaattcggtggatttaatacatgcaaagcatgtaatgcatcttagagcatgattttatttattttaatttttttaaagggacagagtctcaccccgttcccccaggctggagtgcagtggcctgatcatagctcactgcagcctagaactcctgggttcaagtgatcctcccacctcagtctctcagaatgctgggcttacagcttatttttgacatttggtaaaaggagatatattttttaaataattccaattcaaggagaaggaacatagttattttcagatagggcactgaaaacaataagtatactgatgaacagtctgtaatgtatatgacctgtattggtcaaggccagatttcacaattataatcttgttctgatttcttgaactaataattaaaaaatatacaatttgggaacttgggaacatcaacagaatacacagaagaaatttgcgtgcagtacagctgttgtctgaggtttacccactgaaacaccacagttcagttctcaccaccctcatccatgtggggattctagaaaaggcagggcagccgctatggagatcttgaagtgtggagagagggagtcctgatgtgacagtggcccagctgtgcaattccccgcagccacaaagcacaaccacagagcccccgggaaccctgagccagctctctgccctgtgtgcctggagcctctgccgaccacgggatgcccctctcatggacaccatgagctcctctgtggagatctctgtccattgcaactactcaggggtgtgcaccccactcattagagaagcaaggatggctggtgagatgggggctggggctgaaagtatgagagtcctctcaccacacccatctaagctggctcagaagactatcctgggtacagtgagggcctggaatctgcactcacggcaaatacttctggagtagccaggttcatgagcatcgctgggacccggctcttcgagtcccctatctggggctgtccacctgctcttattaccagtgtcactcacaggcacaacttgaggagagcgggcagtaatcatgaggaccctcctgagtccggctctgggaagtggatgtttcttctgtcccctctggcctgccccaaagagaacagcgctttcagggttagaccccaaaataggactgaaacgccaatttccatattctcttcctgccaaaattagtaaagatttagaggaaagaaacaatcccctggtcataacgttgcttcaataagatactggtgttttcatctggaagattcagtgtgacttaggatgctgctgcctgcagtacctggaaacccacctcaaactggcctgaacaacaccgaatcactgtctttcctgaactgcatgttgagaggaagtgccgaggatgacttaactcaggccttctgctccatcctcctgcacctcctgctgtgttcacctctgttgtgggagaaggctgtggccactcctggctggacagctgccctcagtgtccagagagggctgcaggaaggcctttctggaagctccctgaagaaaagaggatttacagagataccaacaaccagggtcccacagccattcctgagtgccactgacaagcaagtcagacatcctcagaacctttaagccccgtccagagtgggaggcggggccgccttcctagagccggggttccccaagtggggttccctgatccagaacatcagcgtcacctgggaccagctaagtgagaagctaaggctggcaccggcaatctgggttttagccacccctccagagggttgattctgatgctgcctgagtttgagaatcgtggccaacaaacaggcctggactcctaatgagacagcatttttagataatgggaacaggaggaatttattctgggtgagcaactcacacacagagccaacggcatagacaaatctgaagaccagcacgcattctgcctgcagctcacagacctggggtccgcataacggtggtggggcgttcccacagctcctcccacctgcccgcatcccccgccggggcccagcatcactgtagtcctgcttccagtgccttcacagggtgagaaaaagccagtggtgctggagggtgatttctaatcagggacttctgtttcacttctgttcataccgtggactgatgtagctggcaagcaaggcagtatttaagaactgtgcaggaggctatatttttctgagaaagggacagccgctttggagtggggtgaggactatggggcagcagcttctctggactcagcctggcctgctctggggtgccccagaagcacctagggggccaggcctctgctgcacacgcaggaggggcccagaggctctgggtcactcagagccgcccccgcccacctgccatccacatatccccagtggacaggatggggtctgagagagcaaggcactgtggccgcctggctgtgtgtgccgtgcagcctctgcctaaagagagcccagtgaggagccaaccacaaaggcgacccagagaccctgtaggatcctagggccctcttttacccttattcagaaaggactgcctgggggcctggcaggctctgtgtgagccttcgcaagcctctggttgcatccttaagataaacgcaccctctgtctcctgctgagggaaactgagctccccctacataatacaacagattttaaaagatccgttccttgtaattcggtagccactctgcagggccgtgaatattatctaatgcactacttgacatcgccagacacaggcttcctatacacgtggatgcatttcctgaaactctagggaggagaggagggggaaaatgaacatcttggaagaaattttattcataaataatacatagcaattcagcgatgcctggatcaccttgttattccctcgaccaatcctgcggcttctcacgcttctgaatgaagtgcagacgctctggggagccaggaagggaagcgggcatgcggagagggcagagggtagtgaatcctaatggctgcatttatcgtcaggaaggctggagagtccagagctttagtccaacctcaacggggataagatctgagagcagagagtggtgctgctagaggggcccagctgcgggccctggggctgggcttccctgagcaccctggacacagcctccttgccactccttgccaggtgggtggagttgactgtgtccaggaatgcagatcttgggcctctcctctcttttctgccccctcctcccctcctggggtgcagtgagcagggagcagtgcaggggcccgaggaagctcctctcctcccaggctccctgaggacacacagacagcaggactctttgcggaagtggagtctaggctcctgccctcccctgcaggaggcccttctggtaataacagcaacgtcccagaagcactcgctgttcccaggcagggctcggggcctgcggcctcgctgcacctcgtctcgcctgcgcagcaaaacaccccctctttggccacaccctccccccatcctcttccaccctggaacgaccttttcttcctccagctccagtcaggcctgaagtccctgctgcagctgcgcagaaggcactcatcacattattagaataaggtgcacctgctttgagtgactaatgaactgaactttccctgaggccagtatggttttggcagagaagcttcttaaattaacccaaattgatttctaataaaggaggaaagggggaggatgtgaaggcgcagcaaaggagattccggggctgaaccagtgagtcagggccctttagcacgcgttcaccccgggccgtctcccagagggcgcatctgggtacatccccaaatgcagggaactctgaagcctggacaggccaggtgggtactgccccagggacgcaaccccactcacagcacagggctcatagggaagagggcaccaaccatggggcttttcagtatttgaaacactttagaacctgaaaagctaaaaaggagtttgcttcttaaatgttcttcactgattctcccagaggatattattggcaatagaaaccaaaagaaatacattggctcaaaggctgctgaggattaaagcgaggactagaaatgatgaaagaacccataatgcagatgacagcctgttattagtatctgttgtcacaattcatccgtgtaaccaaaagccacttgtacccccaaaactatgaaataaaattaattttaaaaaagaaaaaaagttactggtggtcgttgcttcccagtatcaacacatctagctaaaaagtgagaaaaaaaataatctattgtttcaaagtcacaatgtgccattcgtccagggcattggtaaccactgctagatttttcctctgattttttaagacagttttgctcttcttttctgaattagtctcatatgatcgatgtaaatttttttgtattttgtattctttttttttttcacttaacattataacatgagcttgtttccaaatacccattaaatgttttagttttaattttcatggctggctttcatcctgtggctgtaatgttatttatgcaattcttttattgttcaaatgtatttagttttcataaaacatctccatattgtgcataaagtgggaaaagtatctttgcagacaatgtttgtgtcttttcgtttcttccctgggatgaatgaccaggaggagaattgctggggtgagggaggggagggcatggagggttctgtttccagaagagcctctctccaggaagatcagacctgtttacacccacatcaatggaatcaaaggatgtccctgttatcctactgtagatcatagagaatataacgattttcaaattgcttccttcttattcaaaaccggaattgtcttgtttttaaaacgatcgtttttaaaggagtgatcattatatttaacaatgcctttgctagaaaattctggaagaaagagtggtgagtaagtcaagcgatgcctgtttcttcctgtgaatgatctcgctcactcagcgttagaggagccccctgcctcccaggctaatcctgggcatggtttttgccatagctgaataaaggaataggccaccaggcagaggtgatgcttcctgccaggcagaaattagaaagcactgatctcatgcccctctaggggtgtcagggcctcttgttcccagcacaggagcctgaaaggggagctaggtggccagaccccagagccagcaggcagagccgcagtgcaggccctagggcgtcgtgaagcaggcagtcctggtgccctcacagggccacccggcacgtaactgtctcacacgggtgcttggcagcctcggatctgtgagcagttgctctgcatgccaggcaaagcctttccctgagtcccttgtccgctgcccagacagggccactgaaaagcagcagcaagctctgggcatctgtgcatccccctgtccggctctcctgaatcctgaatcagcccgcggtgcccacatgcattcgtgaggccttgggtttaaggtcaggatgatggcggggccttcatctgcccagtcaccagctatgatgccaaaaggcagagggatggcctactctcttctctggcttcccgcgtgtgaaaaagggacatgccagggcaggggcgatgggacccctctgtctccagcctaccccatccctgataaactccaggttcctccaaacaaagcgttcatcttttgcaagtcacagagtgcctgggtcctcctctttcctgcctggtccctgcaagtcacagagtctgagtcctcctcttccctgcctggtccctgcaagtcacagagtctgggtcctcctcttccctgcctggtccctgcaagtcacagagtgcctgggtcctcctcttccctgcctggtccctgcaagtcacagagtctgggtcctcctcttccctgcctgatccttgcaagtcacagagtctgggtccccctcttccctgcctggtccctgcaagtcacagagtgcctgggtcctcctcttccctgcctgatccctgcaagtcacagagtgcctgggtcctcctcttccctgcctggtccctgcaagtcacagagtgcctgggtccccctcttccctgcctgatccctgggtcttgggaacagtccccaactgtgcatagtagtgctgctggtgaccggaatactctggtgaatttaattttctgggcactgatgatttgagagctctcacagccattttcaccccaggcaaatggagaatggctctcctagaacagtgaggattgcttggtgagtgctgcttgtggcgatttcctgtacccacggctgtcagtcttccttgcccgtgaccccaagctccttgtcagcaggggccttgtcccagacacctcagacctgcctctggaagcctttccggaagcacagacacctgtttagtgagtgttccatgacagggaaactgtgcaggctggagataaggagggctctgaggatcactctttgtacccaaagccctgaaatttatattattcttaggtccttaatgcagtctgttgttttttaaatagtatctaaaaatgtataataacacaaaataaatctagttaagattttttttaagtagaaaattttacccttgtttttctttggatcaaagaataaaaataaacaattcaaagtattttggaggcgttttcttagagcaactttcgccattacaggcacaccctgtttattgcacgttgctttattgcagtttgcagtgaagttctgatttgtacaaactgaaggtttgtggcaaccctgaccatacaagtccatcaatgccgtttttctaacagcacgtgctcactcagtgtctctgtaccacgtttcaataattctcgcaatatttcaaaccttttcattattgttatgtctgttatggcgtctgtggtcagtaatctttgatggtaccactgtgattgtttggggacaccaggaaccgcgcccgtgtaagacagtaaacttaatccgtaaatgctgtgtgttccaactgctctgccaaccagccagtccaccacctctccctgctcctcaggccttcctattccctgagacacaataatattgaaattaggccaattaacaactctacaatggcctctaagtgttcaagtgaagagaagagtcacacatctctcactttaaatcaaaagctggaaatgcttaagcttagagaggaaggcgtgccaaaagccaatattggccaaaagttaggccatttgtgccaaacagccgacttgtgaatgtgaagggaaggttcttagaggaaattaaattgctactttagggaatacacaaatgataagaaagtgagagagcctattgctgagtaagtttgagcagtctagatagaagatcaaaccagccacagcattctctaaagccagaggctactcagaacaaggctgtaactctcttcagttctgtgaaggtaaggcaaggaagatgtagaagaaaagtgtaaaactagcagaggtgggtttatgaggtttcagggaagaatctgtctccataacttaaaagtacaaggtaaagtagcaagtgctgatggagaagctatagcaagttactcagaacctctagctaagatcattaatgaaggtagctacactaaatcacagatcttcaatgtggacaaaacagccttctattggaagaagatggcatctaggaattccatagctggagaggaaaagtcaatatctgggttcaaagcttcaaaggacaggctgtctctcttgttctgagctaatggagttggtgactttaaactgaagcttatgctcatttacattctgaaaattctaaggcccttaagaattatactaaatctactccacctgtgctttataaataaaagaacaaagcctggatgacagcacatttgtttacagcatggtttagtaaatatgttaagtccactgttgagacctacttcccaagggggaaaaaaaattttctttcatttcttactgctcatgggcaatgcacctgggcacccaagagcactggtggagatgcacaaggaggtgaatgttggctttatgcctgcagacacaacatccattctgcagcccatgggtcaggattaattttgactttcgagccttattatttaagaaacatatttcatgaggctacatctgccatagagagtgattcctctgatggacctggacatagtaaattgaaaatcttatgggaaggattcaccattccagttgccattaagtacattcgtgattcatggcaggagatcagaatgtcaacattaacaagaatttggaatacattgattgcaaccctcatggacgactttgaggggttcaagacttcagcagaggaagtcactgcagatgtggtggaaatagcaagagaactggaattagaagtgttgcttcttagggctgagcaaagcaggtggtttcttgagataaaatcaactcctggtgaagatgctgtgaacattgttgaaatgacaacataggatttagaatattccataaacctaggtgataaagcagtggcaggatttgagaggactgactccaattttgaaagaagttctactgtgggtaaaatgctatcaaatagcaccatgtgctacagagaaatctttcttgaaaggaagtctcgatcgatgtgagaaacttccttgtcttattttaagaaatttccacagccaccccaggcttcagcaaccaccactcagatcagtcagcagccatcagcatcaaggcaagaccctccgccagcaaaaagattaggacgccctgaaggctcggttgatcgttctcattttttagcaataaaatatttttaaattaaggtatatactttgatttttagacataacactatttcacatttaatattccataactttttgtcaaatatttatgtatttatttaaacacctactcaacaattgatttttgtgcctctctggggttaggaactgtgcaaacactggtgatagacacagtctactttagattaacattctagcaatagaaaaatgcatgcaaggtattagtacattataaccttatatcttaaaaattaacaggaatgatggacaatgcaattcatatcttattaatgtgtaatagatgtatgtagtttcatagtacatgtgataatttagtacattcatgtaattcgtggagatcaagtcagtgtacttgggatatacatcaccttaaatatttgtctttatgctagaaacatccaaattattctcttctagctattttgaaatacacaatacattattgtaaactacagtcaccctactgacctatctaaccttagttcatatttcttctgtcaaaccgtatatttgtacccattactcagcttcctttatattgtgctgggaaaccaaaacatctgtgtgagttgcttgattgcagtgttcacttcattgcagtgtttggaaccacgtctccgaggcctgcctgtactcaagttctaggtctggatcattgtataaaagtgcctttcaattttaaaatcatagacatttaggcctgaagtggctattaaaagagtttgtgtagcaagagcctgggagtcctttcatatttttctgcctacctctaacctgccagtgtgggtgcacgaagcccgatggcagaggcccagcacacgcgtcttatgcacagccaggcaaaggtgctgtcagttctgagcaagaactgctttagacaccagccctgccttctagagacacacaggctaaccagggacagatacagctcactgtggcacaggtgatcttgcatgcctgggaatgttcagtgagaccaagaaggagtgggtaaatagtgggctggacttccaagtcaataccttttttaaatttttatttttgtttaattttatagattgaggggcacaagtgtggttttgtgacacggatacattgcatggtggtgaagtctggcttttagtgtaaccgtcacctgcgtactgtacattgtacctgtcaggtaactcatccagctgttttatttcagaaattacaatatttggtagggaatcacatacagccaggtttgaaatgatcacaggctactgtggtcaggtagaagatgatatgatactacagattgctaaaaatgtattccgcgatactaattgttgagtgctaactgcacgcacagctctctttcagaaacagtgtttagggacaaggagatggctccctgccttggcagcatgtgtgatgtcatctgtgcaacatggacagtcacagatgcacacatgcactggaagttcagggacatgcacaggagggtccagggaggcgggtgcactgcgggagaagccccagggacatgagcacccagagaagcctctgagctgcaggtgacatgcaaggaagggtccagggaggcaggtgcattgtgagagaagccccagggacatgagcacccgagagaagcctctagctgcaggtgacatgcaaggaagggtccagggaggtgatgcattgtgggagaagcccagggacatgggcatcctggagaagcctcctgagctgcaggtgaggttttcccgtgcgacctctgctaatgtggctgaaacactcagcaggagactaagacgagtctgggatggcaaacagaatattggcagtatcagtcttattttccttcatgccacttacaaatgcattacactaagcacgttgactttaatttaataaatggcttggacacaaaaatttcaaacttgacattttgaaaaaactggaagttagaatacttttatttagtcccagctttggctttagctagaagtagggcctgggacaaggggcttcaccgtcccccgccctgtccttggtattttcatgtgtgtaaagtgcggatgagcaccaggattcttccaggtctagtccacattctgcattcttcagttgccatgtgatgttttactttacacaaggaatcatcacttttcctcagaggccatatcctttttctgcatgtaaagccttgtatgtcgtctttccactgctgtacagtttctgcctgtgtagacaatttcttcccaggtagattgtaccagctccccagaagacagataaatcctctgaggtttcatctcccgtgtgctccatcttacaatacagctcatgggggccagtctttaaatgcttcctggaaaatgttactacctatgaaataaaaagataataaatagtaggacaaatgactgaaaatatataaataagatcatttgctgcatgccaatggatggcactaggtcttcttctatctaaatgtataattcataataagatatgatggctttgccttcatggaagccctcttgattacatcctaatattcatggcctccacaccgtatgtggctgcactgtggacagaggaccgtgtcccatgcgggaagagagctgattcaaagaatgtgcagcatctctatctgagcacaaatgtgtcatggtgcactgagagctgtaaaggaggtgtgtgaggggcagagggatggagcgggggcatagctccattctctgcaggtagccaggggcttcccaagggaggagaccctcctgctgacctttgaaggagctatagaattgactgggaggaggtgtgtgggattccaggctgagggaggaccttgcatgaaggcacggaggcataagaaaacatctcatgtccacaaatccatgccagccaatcagatgcttctctgagtgcccagatgtaccagatgctggactgtgacccctgaagtcacagccctgtctctactctccaggagggactttcacatccagacggtctgagaggtcacaggcctgtctccgctctccaggagggactttcacatccagacggtctgagtttggtcttctccgaaggagcagatgttcgttcctggctgtatcttaaggcacgtggaccaggaagcccaggagcatgatctggaaagagcagatccgcatggcttctcaaactctccaccttaacattgtgtccagccttctcgtggcaggtttcattttgttttttttcacagctatgagatgatctgacacctattgattgttgatgtcatcatgcattctattagcatttatcaaacaccaagacgctgacatccccagagggattcaagctccccaccgattcttttttgtgactgatgttttataatttatgagactgacctatttccaaatgaaatccaagaggaagccccttgcaataagagctgttgaaggaaacactggggaatcctacagagaatcctagaatgaggggcctctgcagtcgggtgggccggctgagcccccacctctcatagcatagtgaacagccggaaaaccagagaatcctagaagaaggggcctctgcagtcggttgggccagagaatcctagaagaaggggcctctgcagttgggtgggccggagaatcctagaagaaggggcctctgcagtcgggtgggccggctgagcccccacctctcacagtgaacagcccccatggaaccgggatcacgagtgtagaaagcaggcagcacagagcggctctgacggagggcagcagctcctggagccctggccagcttgcccagaggaccctgagacacctcttcaaggccccccgattccagaaaacagctgaggccgcttgaggatctgatgagccctttcctatgacaaatgagtcacctaacacctgtagtgataaagcaaccctatctgggttccatctgcagtggccacatcctcgtcctcccgctccctgggttccatctgcagtggccacatcctcatcctccaactccctggtttccatctgcagtggccacctcctcttcctctggttctctgggttccatctgcagtagccacctcctcatcctccggctctctgggttccatctgcagtggccacatcctcgtcctccagctgtctgggttccatctgcagtagccacctcctcttcctccagctccctcagcaagttttctgcgcagacatgaaggaagcaatattgcatttctctaaaacagaaaaaaaaaatgttctgcaactcagaccttagcgacaagtgcagtgaccaggcatggctgcatttgaagacactccagcaaaaacgcatgcattttccactgggcaaggaggggaagcattgggggcatgcgtgagcttccctctgccttatcagacactccctgcttggggcccagctggaaatgggttgaagccttttcagcaaaacagctcgtcgttcaccttaaatgagtgatatggtcattaaaacaaaaacaaaaaataaataacacactgaggacctattgtgtgccaggtgtgcactgcaggatgatttttctctggtgctccctggagactgggaggcttctgaggaatcagcagagagaaataaatgctcggcgaccttcatctcagaagctggtgccaaggaggaaggaagagctgcccactgctgcacctctgtaattcatagatgacagatagattgatagattatagatgataacgatagatagatgacagctgatagatgattagatagatagatagataatagatagatagatggatgataggtgattgatagatggggagagggagagatgatagagtggggaagattgatagaaagatgacagaggtaggtgagtgggagctaagctatgaagacgcaaaggcgtaagaacaatctaatgagctttgggaactctgagcaggaggttgggagagtgggggagggggagggataaaagactacatattgggtacagcatatactgcttagataacaggtccactaaaatcccagaaatcagcatgaaagaacttaatgcacgtaaccaaaaccactcataccccaagaactattgaaaatttttttaaactttcaaaaaaagataacagagtagatggatggtagatgagatgacaggtgcatagatgatagatggatagacatgcactcacatctcatggcctcacactcaagccacgcgcccagtgaaccctatctcaatggagcaggtgcttgttgtgacatgcagcacccctccctgtgcccggcactctgccatacacctctggttagaaactggactgggcacaaccagtgtcccagccacatgaggcatcctcatggccctgaggaccccttcctgctcacacagagccacgggctgcagacagatggaatggagatactgaattagagaacacagactctagaaggaggaagcacaatggatattttgaacttgtcctcaagacacctttcctgtaagattctaccccatttccatctgaaacacatggatttttttttttgcttttcactagattactgtgtgagaagaactgcctgtccaaaaccagtattatctgtcacaagaaaatattatatctcttgtcaacttatatctcttgtcaacttgtcaacttgtcaagtttagaaagaagatagacaggtaatcatgatgatgatgatagatagatgatagatagataaatagatagctagataggtaggtaggtagatagatagatagatagatagatagatagatagatagatagatagaataggaaatatagaataggatagatgatagatagatagatagatagatagatagatagatagatagaataggaaatatagaataggacacatagaaagaataggaaatatagaataggatagatagatgataggtagatagatagatagatagatagatagatagatagacagacagatagaaagaataggaaatatagaataggatagatgatagatagatagatagaataggaaatatagaataggacacatagaataggaaatatagaataggatagatagatgatagataggtagatagacagatagaataggaaatatagaataggatagatagatgatagacagatagatagatagatagatagatagatagatagacagctaggtaaatgaacaggcagacagatagatggtaaaataggtagatagacataggtaggtagaaagacatgtagataagtcataggtaggtagatacaaagatggatagatagatgataggtagatagatagatagatacatagatacatagaactagggatgatgaagatctacagcttggaacatcatatccatgacaaacataacaaaagcagtcatattaagctctattaaatatacaacctaagctatatttccacatgtggtgactttagagtggggcagcatgcacaattaagaaatctcatgggttttccttggacaagtatttctaatggtcatttgaaaagtacataaataggataagaatagctgtgtccagccaagatattatcaaacaccatataggcatcccaggacagatgggttcagttataaggttatgcttcaacaaaaaagtgcagacatggcagcttgtaactgaccattgccacagaaattaaaattggggagataccatggagcaaacgttcttaatcctctttataataaccaagtcttaaggtttattatttgtagcctgatgcccattaaactattgagcaactttggaaatctatgtggagcaacagcttgtattttgcttgcactaacttgctagaaaatgcatatttaataagcttaatgatctctctagagaggcatattttgcctggatagagtgtagtgtggtgtgtatgtataatattttacatataatatatttatatgtgattgtaggcatgatcataattctttgagctaagagtgttcaaatgtatatctccatcatcaaagtaaaaatagagatatctaatcattcaagtaccagaattttacatatttcacaattgaataatttcttaccaaccacatcaagacaaagtcctctgtcctgaacatctaaagaaggggcatctttagccatttttttttttctgcattttcttataacttttccctggtgcaaacatgtagctcgtagaatcatattttttttttttttgagatggactctctgtctgttgcccaagctggagtgtgcagtggcttgatcttggctctgcctcctgggttcaagagattctcctgcctcagcctcctgagtagctgggattacaggtgcatgccacgacgcccggctaactttttttctttctttctttctttcttttctttctttctctctctctctttttctctttctctctctcactttctctttctttctttctttttttattaagtagagacagggtttcaccatgtttggcctggctggtctcaaacatctgacctcaggtgatccacccatctcggcctcccaaagtgctgggattacaggagtgagccactgcactcagccagaatcatacatttttataaagcttgtttctcactttttcaaatcaattgtaattactatcattcaaggtggtagtactgctgtaacttcaggggtccctggaaaagagaatggcaccagtgctatcccatgagtctttgaggacccctgacagtggaaagtggaacagccacttgctgctgatgttgtcccggtggttgctgtgaacacagcacaccaagcagagaatctcttcacaactgcactaaatgcaggcccatcgtctgtgctgctgtgctgacgttcagtgtgtcctagcaccttcctgatgtagagcactggtgtggacgtatgcatggtcacaaagacaacactgaaaatgtcattgggatggactgactgcacgtgtggtgtttgttttcggcaatatcctctctggacacgttattctacgtgactgtggctggggcgtcaaatgggcagtggccatggctggagcatctaacgggcagtgagtgccagcagcagtggctacgcagcctcgcgtttgccgtatgttttctgactcacggtgacttcagcgtttgtgttggcctggcaggggaggtgcttgcttagagggtggaacgtctagctctgtacaacctgaggctttgactttgtgcatgccactttattttctaggtgaaaagatggattaagtgattttcaagctttctccctccaccagatttctcctgtcctgagggtgttgcactagtaagtagagtcccactcactagcttgtagcaaactggacactccagggagccccgtcaaccttctcaggtttttcactaaaatggaacatcacttaaagagcaccctggtaacctgaatatattcatacagcagcttagttggccaatctcactgccatgaggtaggtggttagaatacttctgtggtaacattatcaacattctagtcttgcaagtggcaagggtggtgagttctgttttggcagaaaagaggcagtatgatttcgtgaaaagcagatgctgatagaaacacaccgaagcactggcagaccagtcaatccactcagtccgtggaaacagaggtactgaacacccacccctttgcttcgcacaatgggacttggaataattaattagatggcaaagcctctaaaaccaaaaagaaaacagctaaattgagacaataagataagcacacatggaaaatcaagagcaacgcgaggtggttgacacttagatggtaaatgtctagcgacacagagttgctaacaacacatgaccctgaattccaggatgagcaggaatgacatgatggagaagggggaacttgagatgggtcttaaaggatcagtaggagagaaaattccagcaagaagaatcataaatgagcatagagctgtgggatgagaatgatggaaaatgggcaacagttgtgaagggtgactgtggacacgcagtggaatctcacatgctacagcaaaggggtgaccaaatagtttaacttcttaaaaattaagtagacgctgggcgtggtggcccatgcctgtaataccagcactttgggaggccaaggcagatggatcacttgagcccaggagttcaagaccagcctaggcaacatggcaaaactccatctctacaaaaaatacaaaaattagctgagcttggtagtatatccctgtggtcctagctactctgtaggctgaggtgagaggatcacctgagcctgtggaggtgggtggaaggaaagaggaaagaggaaggaaggaaggaaggaaaagaaaagaaaagaaagaaagagaaaggaaggaaggagggagggagggagggaggaaggagggaagggaaggaaggagggaagggaaggaagggagaggaagggaaagaaggagggaagggaaggaaggagggaagggaaagaaggaggtaagggaaggcaaaggtaagggaaggagggagggagagaggaagggagggagggagagaaggagggaagggaggaaaggagggaagggagggaaggagggaagggagggaagggaaggaaggagggaagggaaggaaggagggaagggaaggaagaaaggaaggaaggaggacaaaggagcattgttggtgctgatggctgggggtggtgtgccgtggcacacaagggttcgcattagttcaagtctttcagctttaaaggaacagaggcacacttgggaattgggaactggaattccaagaagaaaaaatagacatataagaaacaatcccagctgtcggagaaccacgtctcctggaaagctggtttggaaaacgtgcatgcgagcctcccatttgcactttatctacctccaagatgcgcgtccacatgcattgacaaatggtcaaagcccgagaggtacctttactctcattattgagttcaaaagaactagtgttctggaattgaaagagattaaatttagtgattattgtaactttatttgaatcttgaattactattcaagacaataaatatttaataactggctacatcatttaaagtgactttaaaaagataaaaaaacaactccctgcattccagaaactgagattatttttaaattccctaagaggttcaagtaaacattttaaacaattatttgttgaatgtttttcatgtatagaacgtgtctgtcaagtttaagaaaatacatagttttcaaatcagctatgcctttgtaacaatacagagaaaaaataactttaaaaaatgttaaaatatatttaatgtaatattttaaaaggaaggaagtatgtagttaaaactgaattggttttattagtatatacgtttggttggaaatgctagttatttaattgcatagttcaatgatttcaactatttctgacatctttttaagtgcttttatgtattctagaaacgtataagagtaacgctttaaagggctagtggtgagaaaggatatcaactgttcttaagacatgagaaaggaaataagaaaaggagaactcagatttgggaagcacccccgcttgctagtcgttgggtgtttcatgtggactgtttttcgtgtgctgccctaagtgtgtagcatgggcactacccttcatctcacagatggatagactgaggctgaggtaaatacatctcccgcggttaaacaggggcagatcctggagcgacttggtgaggtgcacagaccttgtgctgatattactaacatttacgtggctctggttgctgttcatggaccactcagatctgggtgatgaccccagccttctctctttcctgtggatgtgaccgaaggtctgtggttgtgtctcctgggctagcccatgttctctgtttcctgtggatatgactgagggtctgtgggttgtgtctcctgggccagcctcatgctccctggacccatcccctgacctcttcatctctgtcccctctgctggccccttcttccctccccagtccccaaacccctgtgtccctaagggttcagggtggagccctcactcttcccaggaaactgcctctttccccaccatgtctacaacatccacccactgactgccccaaaccaacacttcagcccttctagaggtcacctaagctgagacacctcaaatttagcaaccacagagaagtatggtatttctgcatctgaaaaagaagagattatagagaatcacctgtaagcctctgttcccaaccaaaaccaagccagcaaagacctgagtctcccgtgtcttccgtaccagtgcacacacctccacctgccagttacctgagctggcaaccaggccgcgtcccacatgtatcccctcacctcactcctgcatgtcctacctgtaccttcccaggccaacctatgacctgacattgctccttaaatgaccttccaccatctagctctcctttcctccacctcattctcacaccacagccacagtgatggttttgcaggcttgagtcaactgtgtagaagtaatcccactgtctacactgtccggagctcccacggctcctaggaggaacagcacctgggaggccctgactgcctgcaccctcacacctccagcctctgaccacctcctgcccatgcagcctccctgaactcgccctctgggtccctctgtctctctgcatctctctgtgtctctgtctcagtctcctccctgtcccacatccatcttggtcccctgtgaagcctcctctgtcctctctggcagggtaactgtctgtgtctctgtgtctgtgtctctgtctcagtctcactccctgtcccacacccatcttggtcccctgtgaagcctcctctgtcctctctggcagggtaactgtgtctcggtgtcccatgaggttgggagtaggtctgtattgctcagtgacatgctttccaaataaaggaataaatcaatcatgcaatgtattcactcagcacatatttatgtggcaccttcttactatgtaacaggcattagggaaaaatagatattcttatttagtgagatccttaccatggcccaataagaaacagggttggattaatatcccccttcagagatcagaaaatcaggacatggagaaggggtttgcaaacctcctccactgttactcagctctgtgattttacacaagtgactcaaaaaatctctgtccctcaaagttaggaattacagcagaatctacatcacagggtcaccgagagggtttaatgaatttgtgtatatagagattttagaaagtgccaagcacacaggaagcactttctaagcagtgctggtattaactgagctggttgaaaaccggtgctccagaattatattcaaatgcagtttaaatatgttaaaaattattccaaaataagtgttttaacattgacccaatggaggctattcaagcaatacaagaaaaataccatctctaaaagaggtggttgtggggaatcactgtcaggcctctgagccgactggtcaatcaccctgacgttccgagccccgctctctggtgggagaggcccacgcacaggacacttcccaccctcacctcgttcctctctccacggcggtgataacagcagttgggagcagagcacacgctgccaagtttggttttcagttacttgagaccttatccctgtttatattaaaattggataaacaaaacattcaataaaagacctttatacatgacatggaagtgcgagaatgcactacataatgttgtatgtgtatgagtttgtgagggaaagccatggccagcaactggtttctagaataaccagatgcaaaaaactggaagttgttgacaccgagttaaccacaaaagaactgtgaaagctacaacagcaaaaagacatcgtgaggcatccgcatgggcccaggaggcatggcccaggctggcttggagggggtgggggtgacgggatgccaggcctccatgtgtaaccctgcgtaacctaaatagggtgaaaacatggaaaggccaggttttctcatttctaatccagcatgcgtttgccttttcactctacccaaagtgtcttggacttccactcctgtcgctggctgctgctgaattgtgagaagtccaaggataagacagcatggttttctgtgagatgtggccactgctagcttccctgccttgcttctgcattgagaatcatgttatggacacactctggaaaaatgacgggaggggtattttgtcaacagagaactattgagctaccgtgatcttactagtgatcatatttacgacttctttgaagtttcaactgtgtgaaaaaagagacagtgcattatttttggaatcttaaaatatcatcatcctaaaaatatcctaaagatataaaaatatctttttagatttatatcataaaaagagatataaatctaggagaggatatgtgagtaaacatcattctgtcagtgcattgtggatgttgaactcagtcttgcagaatgatgttcaaatacaaagggctgcctttgtgcctcagaggtttgcagtagccagctgcggagccatggaggtgaccagagtgcacagcatctctgaggcactgacagggtgagctgaggtcctgggctgagcccttcactggtgttgctgggcggcaccaccagtgcccccacatcctcctctctttccagatcaccgccccatcagcagacacgctgttcacagaatacgagggcaggaggatacacactccccaaactcatgtcccagaattgctttccaaggcctccatttgaaatattctaaacctttggagaccaagagggctgtgttgatttaagcagggcctcgagccacgtggagttgaacacagatgtaatggaatgtgcctggtggttgaatgtgttgccaccatggaagtagataccaggaactgcagtaggagaatggatcagagagagaagggacagagggtacttgtttgtagttggggatacgactgtattcacgctttacattaacaaatagagagcaaatcgtgagcaatgaaccatgtcaaatggcaggaagcactggaagtttgacgccagatgattccaaaagttgctacgctgaatccaagagcttgcaaaatgtagggataggaaagtaaaaccaattcaagtgaaaatagaagactagaaggtactgaaacgtacacttcatcagaaagttcccaccacgggaagggaatcatttaggaaatttaaaacatgtaaagctttagagagtaaaggaacagccgacgcttctatcacatcgataggtaaactaaggcccagccggagtccgggtgctcaaagaggtgttaacaacaccaagcctggagctcacgcccttggtcgtgtggtgtgctctacacatcaccaccctggatacgctcaggctgtttgtgaaatgtttcacatattaaaccaaaccctgcttgataggattataccaatattgtcctggcagagaccagatgaactcctcacttttcttttccatgtgtacttgactttccacacacactcaccttctccaactatcttgatcaactattttttttctactcttgcttatttattgtccctcttcctccactaccttcccatgcccagcaagttctaatggagtaggagccatggcagctgccaggagatggaaaagcaatgaaagtgggcgggccctctgcaagggagccagccagctgcaggtgcaggggagttcagaggacatgtgagcaggaggcagcccgcctcccacgcctcgatggcccagacatgttctccaaggttgggactcagacacccaccacagcaatgccctacggcccagaccccatcctctcaaacgtcctcctagccggatacattgtcctccaaactctcagctgtcccaggtgatcatgagtgaagcccagttgtgctcacttctaactgcagcatccattctaaggaaaatctccactcccctcctctaaacctcatggggccaacatcgcacagtctgaacaacaagtgagccatcttgaaaaggagggcggctgtgcgtgtgaatgagcagggagaaaatgaaacaggagccccaccttacccccagtcacctcactgaatagcaccaagccaagtggggtgacatcacttcccagcaatcgggactcatagatggtcacggtgggcctagttatctgttttagtgaatggtgctgtgcaggtggcctcagtgcagaacagactgtgtcagacaaacatattgatgcactgatgaaggagaaggaagctgggaaaagctccggtcattatgacccgcgacaccaagggcaggctctggaggagccatccgtgcacagctgcatctattatctgctaactgaacaaacacagaaggtatccaccagaacaagtctactcagatacaggtggccctgcgaggaggttggttggtgttgggcttagacttgacaggttgtccggtggtgattcagcatgaaggtgtggctggctctgagattattatctcagattatcccctcacaaatgaaaatataaaaggaatcccagaaatctgtttatttcatatttgaaatgttatgtagactatagatgaattttttttcttgaattatctggtgattaaaattgttattcttgttttgcttattatgtttttaagggatgataacgtttcaccctagtgtttcagggctgatagagacttagaagtcatctaactgccctcatcttacagacttaaaaagtggcatccaaattgatgaagggactccctgagtcacgcagcaaggtggcaatgaagtccctcagctcttgcccctaccccatgcttgtgtcttcctgggcagcggtccccatcctttctggcaccagggaccagtttcatggaagacagcttttccatggtttgggggtggagaggatgtaattcaagtgcattatattttttgtgcactttatttttattactacagtgtaatatatgatgaaataagtttacaactcaccataatgtagaatcagtgggagcttgtttttctgcaactagatggtcccatctgggtgtgatgggagacagtgacagatcatcaggcattagattctcataaggagcacacaacctacatccctcacatacacagttctcagttctcagtagggttcaagctcccatgagaatctgatgtggctgctgatctgacaggaggcagagctcaggtggtcatgcgagcaatagggagcagctgtaaatacagaagaagcttcgctcgcttgcctgccgccccctcctgctgtgtggcccagttcctaacaggccacaaaccacaacctatcaagaaaaactggcttcctaagaaacataaaattgtttctcttccctttcgctagtgcaattggtctaaatcgttttagaagtattgatagaagaaacaaacaggacaatcattagtttccaaaactttaaggagcgacatgtttgttggataattggatacctgaataaaaataaaaaatagcaaaagtttcttgttattatcactattacacagcagttcctatcattcatggagtacctagcaggtgccagattcagtactaacctctttacatatatatatattttttcatttcatccttaatgcagccatgtgagattagcatttttctgactttacagctgatgatgttaatgtataaggttgaacatctgtccaaagtcagttgaccaacaagacctgccatgggcaatgcaagctcctcctggtccacacacactgtgtcctgctctcacgctctctcccagcaccttctcacccagggtctgactgtaccaaggagctccctcacggcccttggtcctcctggcctctctcatctgtctcatgatctgggcaccctcctcagctcactttctcatcccagtccccacctgaacatggcgctggctgtcttctgctccccgcatctctagcctgcacctcctctcttctgtcctccgcttcgcacctatccaacatgcattttaattgcattattgagtgcttgaaagaactcgtatcactccctgtttcctgggtcaaaatccagagtcccatcattcatccacgaagttgattggaccccgccggactctccactctgacctccacctcctggcccagccccgctctatgctccagcctttggggtttgcttttgttttagttttctgagcccctggtgttcttacatatgttcatgtctttcgcagattgttttaattgggatgtattgaaatgctttgtttccctcccagacatcctttacatatctgtgaaagctcatcagcagcctcacctcttcctgaaagccttgctagcacccgtgcatgcctgccctctgtgtacaggacatagagccctctgcacgttttcattatgggatttatcacacttcatcctttcattccgcaaatgcctattgagtgtctatgacatgccaggtgtttggtgcatggtgtacacaggagtgagaggttctaaaatggtatttgtgacttgtctaaatcccttgttagagcataaagccttggtgtgaagatctgtgccactcatctctgaactccagcatagcccatgacccaaaatagaggagttgcccaaatagtacacactggtcagggtcatgactgaatgatcattcactaccccagatccaaagccaagctagtcaaggtgtgcaggagcccccctgcagaataatgggccagtgagagaggccacacctctcaccctgcagaataatgggccagtgagagaggccacacatctcaccctgcagaataatgggccaatgagagaggccacacatctcgttctgcataaatggagtatttgcctgcggtagtttgcctctatgtctcccctaacccacctatttttttgtagtatatatattatttctacaacaaaagtgaatttgtaatgtagctttgaaaatcattctttctcaatgagaacacttggaaacaggatggggaaaatcacacactggggcctgtcgtggggtcggggaagcggggagggatagcattaggagatatatctaatgtaatataccaacatggcacacatatacatatgtaacaaacctgcatgttgtgcacatgtaccctggaacttaaagtataataataataaaaaaaagaaaatcgttgtttctcaaggaaagattgtgagcttctgctgtaaggaagggtctcatccaagcctgggccaatttcagcgtgatttagtggtgattaccgctaacactgaagttgttttctggaatgctggcgtgggactaataacatctaagactgaggaagttctgcagaactttgaatgatgcagttgctttcatacaacattgacaagccctagggctcatcttgtttcaggaggttatcaagtctaaagatataatttaatccataaaatatacaaatccaaatatatccaaagctctttcacgacatagacatttttatattttacataaatatatatgtaaatataatgtgattaaaataaatcttgcttcagatgtatattatacatagtatatatttggtaaaatgtttcataaatttgtattgtcaattacatgttatacacattatgcaaaccaatctcatgaattttcgtaggatctctggaattataggaacgaggaactaggagacttggactaaatgtgaatggtaactagacaaatgtgagcggtatttatttgcactatcacttcattaacagatttcagcacacttcggggaacatgtatgttatgtctctctggtgtttgtgctgatgacattcatgataagcctttaagtaccttgatcaaggcccccattggtctgattttaaaagacagtaacacagatattttttttctctctctcccctgccttctctatttttttaattagtgtatatggttgtcccttggcgaaaaaaagaaaaacacaagataaacagccccaggaacctgctcctaaacgaaagccatttgccgtgaaagcagacagctcctcagtggatgagtgtgacgacagtgatgggactgaggacatggatgagaaggaggaggatgagggggaggagtactccgaggacaatgatgagccaggggatgaggacgaggaggacgaggagggggaccgggaggaggaggaggagatcgaggaggaggatgaggacgatgacgaggatggagaagatgtggaggatgaagaagaggaagaggaggaggaggaggaggaggaagaggaagaagaaaacggtaatctttaaaatattagcaaagtaacaagtcgtgatttgggtccactgttcaaggtgaattgccggctgttactacgaatgactggcatataaagaaattgttcttcttggtcaatactgagaaaattaacctcttatatgaactgaacacttctgttaaagaattcttcagattctctgttacacttcagattttatgtcagtctaatttttattcagtttggttgtcagtaatttactgagatatttatggtgtacttttttgattagcttaacaaaatgtatcaaggaagttaagttagccgacctggtctttaattttacattttcctgaatgctgtatccatgagatacaatgattgggcaaagggcaaaacagtgttgttggaatggcttagcccaggtacctcctcaggggagttggaagtcctgcctaatgactggtacatcaaccagcaaagtgggttttgtctgtagattgccaaagctttgcttgagtgatggtcacataattgggatgaaaggaagtagtattgctacaagataatcagccggtcatctgcttccatatgtgagagctgtttctgatctggggtttccggtgctctgagacatgccagggagaaggccgccatgctgtgtgttgggaatgttcccggcagtgcgtttacggtgacatggctttcatgtccagtgttctgttactatccgacgcacaataccacttcagaactaaccctttcatagaagtcatttcttctgaggaaagaggtgggagttttgtggttttgtttgtttgtttgcttgtttgtttttttgcaaagcctagctatcatctttattggcttagggttttcctcatagaaatgcccaaacatgttgtaagtgaagggaattttctttcttgcccctctcccttgggctcaaaagttcttcaagaatctgattaccaggagaactaatttctggacacaaagggtagttgtttcagccagtgggtagggcctccatacatcagggagatgtgagttgcttgttgctaatctcatgtgcaggcttaaattaccactcctccttcagaagtcagaggagtttgtactaggaaacctgaattttatgaaataatcctagattgttacagtggcttaagattcctatgcaaacaatccatcacttacttacatgtacatatatacacaggcacagatagatatacagaacatagatagatatgtatatatacacatagatgcatatgtacacacacatagatagatatgtatatacacatagatgcatatgcacacacacatgcattacataaattaaaattagtctcccaagattttttgtctcgctatggtagaatgctgggtagagaaggcctatcagaacacctatcaacagacttaccatcatcgctattaaatctaccagggacacaaggcaccagtgtcattcatgagatgctaagaattaaaataatagatttgtgtagtaaaatatttggaaagtagatcaacctggcaaattatttctggacactgtattaagtgagtgtcattttgagtgactcattaattgtggaggctgattaatgatttgtaacttgcccagggcttactagaaagatggtatacaatgtggctctttcacgttctcacccgtttggaaagcaggaggcattcatgtttggtgcgacggattaagataggaaatctgtaaataggtatcgtttacaccaggggccttaaccaggttttaagttttgctcttcattttctagaattaaaaattcaattttagtttatttatggtcaaatgtaaatatttctttaaaaataaaaagtgatgtactttgaaaggtagtcagaagccttattgaaatagctttagaatgtgactgcatagggtttgtctattctcacttgaacacttaggatataattgtttttaaacgctggaaagcaaactagaattaaagacatttttgccagaaaaatgcaagtaaatgggcacccagtggatgtgtgacagcaccgccaaaggagcgactggctgatcgtgcctcaggacccaggatttctaactctgcggccagacctggcatggtgcccaccactcatgtggtcagcaaatgctgagtccagagcacggaagacaggaggtgctgaaagcaaacacttgtgaagaggtagcaggaccatgaaagaattcatagttaattgtggggtgcctggtttcagaattcatgttcagcagctggctccctaaggaaataacttctattatcacctatgacaggacttttaaaggaatcaagtgagctactcaggaaggtgcagccacagggagatgttgagagataacctacctgctagcagtgtgagacaggtgcacccagtttactgagcatcctggcagggtgcagccacagggagatgttgagagataacctacctgctaccagtgtgagacaggtgcacccagtttactgagcatcctggcagggtgcagccacagagagatgttgtgagataacctacctgctagcagtgtgagacaggtgcacccagtttactaagcatcctggcagggtgcagccacagtgagatgttgtgagataacctacctgctaccagtgtgagacaggtgcacccagtttactgagcatcctggcagggtgcagccacagggagatgttgagagataacctacctgctagcagtgtgagacaggtgcacccagtttactgaacatcctggcagggtgcagccacagggagatgttgagagataacctacctgctaccagtgtgagacaggtgcacccagtttactgagcatcctggcagtagagcgtgatactccactccctttcagagagcctctcatgagaatcccagatcccaggcagccacttagaaacaacagcatttgcatgcccttgcggggcccttccaccaggtttccattgccacagattctctggagggacaccgaaggcttgtttgatttctaaggcaaacaaatgcatttctcctaagacataatcacctgagaggcctgactcctggagacacgctcacgaaggctttctctgggagaaggacgtctccattggaggagccccacgtgggtgtttcaacaccccatttagccaacgtcacctgcaggtactccagctggatggaatatcttctagtctcttataccccatcagggtcagaaatctccaagcagcttctatatcaaaggaacaggataactgttgatagaacagtcattttacgtgatcaaactcctagttacgtttaatgtattaaaaggaggctttgaaaggcatacatcagcccatctcctgtttgaatgttctcacttgttgagcacgttactcacttgttacctcactgttaaatgtagtgccaaaatcactatcaacaaatgtaaatgtctgccatgacagcagcatctttaatgtgagatgtgcagcgtaagtacgggagattccatacggtgcctaccagagacgtccttttgtcctcccttccagtggcttggcagaaaccatgcactccctaaaagctggggggtcccattcctctgatcgctggagttctgggtcagcatcccgaggctggcctttcatgttccttgggtgacactcttagtgactgctatgtccctgggccagcaaccgattcccctgcagttgattgtgctccttttctaacacagagaagcacagacgagacctgagattaaaaggaagccacgtggccagagcacagagcggagtgtgactcccgcgcccatcctgcgtggcacagggtggccgtctgagtgcagaaaccagggcgtcgtgacggaactgctgggacaaggtcatgctggcctcagccttgcgagtagagagaaagtctcaggcgatttatcccggctggatgccattatttgttcatccagtcgggtattttcacctctatagtaaactgaaatgtggactttactaagaggttttgtttcagataaaacaaatgtatacaaacccccagattattacaataggaacccacaggttatagaaggactattgtttataatttaagattaagtatttattttaatttcaaggatcctccagcattgttgcttatatgaatcaaaatagtcctaataatgtaagtttccaataggcatatttaatcacattattgaatttgatcttcacattgattgcataagatgggtagggcagaagctcttttactctcatcatacaaattagaaactgaggctaattaagattatattattttctgtaggtgggggataggtaatcaaacactttgcatggttttccttgtaatggaactcgtgttctcctgatcaccttctgcttatttgaacaacaggggataatacctgagaaactcatttcagattaagttcatatttaattaagcaaagttatatttattatacgtagacctaccataggctggtcttttgcatgaagaattttgttttcagaatacatcattacagtctaagtctgcaccaattaaaaatccccttgttatcctaaagttaagaaagttattgttcaatggccatagatttttctattatcagatctttttatgttatgataaatattttttggattcatgtgatttgagaaatatatagtaaatggatatataatacctagcaaggtatggtttatgttcatactccagtccactaaaatatctctaaatcaatgtatacacacacatacatatattctttatagcagacattgcatcttcccttagacaggaatcagcatttcctgaggaagagcctagcaatgtgctttctagactaaagaaagcttgcgtgtgtgcagctgcctttagcacatagatgttgctttaaatgctctgtttctggaatactttggagaatatatgaggttctttcttcattactctttactgaatctcagggctgccttgccacttgatcacggggctaaatccggtgacacgcaggtgtcttccttttctaaagtcttcctggcttcctgtatcgcgttctccagatcagtgacccaaaggtgtgcggtggtgtcctgggctgctggcctctgaggaggaggggctgcttgagaggaaatctgtgtggtcaccttagggccttctccacgtgcgatctgatggccgcggacattagggccttctcgacttgccatctgatggctgtggacgttagggccttctcgacttgtgatctgatggctgtggacattagggccttctcgatgtgcgatctgatggccgcggatgttagggccttctcagtgtgcgatctgatggctgtggacattagggccttctcgacttgcgatctgatggctgtggacattagggccttctcactgtgcgatctgatggctgcggacattagggccttctcgatgtgcaatctgatggccgcggacgttagggccttctcgacgtacgatctgatggctgcggacgttagggccttctcgatgtacgatctgatggccgcagacgttagggctttctcgctgtgcgatctgatggccgcggacattagggccttctcgctgtgcgatctgatggctgcagacattaggaccttcttgatgtgcgatctgatggccgcggacgttaggaacttcttgatgtgcgaaatgatggctgcagctgctctgggcaaggcatggaggccgccctgaggcagagtcgatgtgggggtcaggggagtcgaacaggaagcaggggctgcttttgttggaggagtgtgccctgactcttcagccagctgtgggatcaccatggccagtaatctgtgcctgttccattctagtatcaggctctgtcctcactgtaaatcagtcctgtgcatgggacaattttctaacggggtgtttccactccccaccttcttttttaaagggaattcaaggcagaactcatgctataaaaattccttctcacagaaacatttcttttctcatggtaaagttcccagggtgtgttttctttcaaacaggatgaggtgctagccccaagttgctagagcatcctggtatttgtggaagacaaattttcataggcttgagttttcacaggaggacagcatggagggggtgaggggtctgctgtgtggcctctgaactccccagcttccctgcaggacaccattctccatattgattagccaattatcctctcctgtctttctcagggaaatatccctgatgaggaaagcaagttgaaacgcagacagactgtgaaaagcagaattagccaaccagttttcactgcagtcagcagaaaaggcaatgagttctgagaccaacatagaaacaaagatcatatgtttggtatgcgaggcttcaaccagaggaagactgtggacacagttgggagaaagaatatgatgatttggtatcatcttaaaactaacctctccctgcatccacggaggcatttttaggacatggcatgtgcagctacgttgaagtacatggcactgcatcttgggaatgagtaatcatagaattagacatttttaggtgtcaatatatgattttaaaaaacctaaactctcttcatgcaaactgtgctaaattatagaaatataatttatcctatttttcataaaccttcaggtactttgatacaaagcaaaaatctggctgtaaatatcatgccatgtacatttaagatgcaggtagaggacgggtgtggtggctcacgcctgtaatcccagcactttgggaggctgagggggacagatcacctgaggtcaggagtttgagaccagcttggccaacaggccaaaaccctgtctctactaaaaatacaaaaattagccgggtgtggtggcacatgcctgcaatcccagctacttgggaggctgaggcagaataattgcttgaacctacttgggaggcggaggttgctgtgagccgagatcacagccttgcactccagcctgggtgacaagagcaaaactccatcttgaaaaacaaaaaaaagatgcaggtggatgcataaagtcctggggaaactccttttagcatgataatgaaaacagaaaatgtaagatagtggggtcgaatatgtttctgttcaatttgcttataaagtccactctaagaaaataacagtttatctgctatgccttgtgaatttaggtttcattccaagttctggtttatccacgggtagatggagttgaggaatgaggtgtgtttccagctctggctgtgtcacatgtcctaagcgagtcacctagcttcactggacctcagtttcacttaagattaggataatagtacgtgcccttccttcacttcgctgtcttattttgaagcttaaagaagttgcagaatataaaaacgattgagagatgggaagcagttcagaaccataacatcacaattgtgattaaggacaatttcaatatgatattatgctcccacccatttattcatgctcttctgtaaccctgaacctaacatccatgaccccctccccacacgcagcaagtatatcatgtatattaaggctgcaagagtttaaaagattcagaatatcatgacagctcatttcaaaacacggtgtgttttttttctctgtgcccagaagggcactgggttgcatgcagacacaaaactaaacagagtcaccattttctggaagaaatacataatacagtatggaagaggtgtgtatataaaaaatacaaagcatggttctttacagggggcagaattagaagtcataaactgaggtggaggctttaagtatttgatttgaaaataaaaacatacatttctgaatactgaggctcactaaacttcagattgctaagaaagtggtcatgttgtctctgcaagctctgccgaagcagatcagagtcttctctttgacacggatgaaatatggaagactagagacaaagagaaggaaccctgatgtcctctcaatttccctcccaatctagcacatttatgtgagcagccacctgtgtctcaaacccattctggaaaacagaagaaccagaattttcacagtcttatctctgctccccgggttccgagcactgacaataaaagcaatcactctggggacagggagtcttcacggtcatccaactgatccagaaagtctttgacctgtgcctgtgtgtgtgtgtgtgtgtgtgtgtgtgtgtgtgtgtgtgtgtacatgacagagacagggggtagggggaagagagagagaaagagagaatgagacagacagagagacagagacagtggtgtaattcgttcgaatgtttcagtctgtctctatctgagtagctgttgactccaaacagctcattctctgggtggaagaatgtgactcttatttttttaatcccttaatttatgtaagccagatacctaaaatgtcatcaaataaaaagaccctcaaagctttataaataaatgagacttcatgcattcaccttttagctcatagaaaggacagcattgaaatcactgtagcacacaagaacatgaaagcgctgtcccacatgtgtgctgctctgctggtgggccgtttatagaaaatacatgtcatatgaatacatatctataaattacatatatgaggttgtatatatatatatatatgttataaaaatcaaaatcaggcggggggctgtggcccacgcctgtaatcccagcactttggaggccaaggcgggaggatcacgaggtcaggagatcgagaccatcctggctaacacgatgaaaccccgtctctactaaaaatacaaaaaattagccaggcgtggtggcgggtgcctgtagtcccagctactccagaggctgaggcaggagcatggcgtgaacctgggaggcggagcttgcagtgagccgagatcgcaccactgcactccagcctgggcgacagagcaagactccatctcaaaaaaaaaaaaaaaaaaaaaaatcaaaattagagcccagctccctctgaacttccacctctgcatccatgctggccaacatggcaaaccctagaccaatgtgtttatttaaatgtaaataagttaaattcattacaactgaataatgttaaaaattcacttcctcgccacaccaatcgcatgtgggttggcctatgtggctcatggcactgtgctaggcagtgtccacacagaatgtcctgtcaccttctatagcacacctgggcactgggcaccctgtcctgggcctgttgccactgagctcagtgcagtctcttctcctgatgctccagaaaccccatctaaacatgcacacacgtgtgcttgaagagccacacgcaccacagtctcctgtgatctgttccagtctttggatgaggcaaatcacttcagaaaaaacttcccttacacattaagccactgggttcctctttctttgaatccaaaattgttcagtcttcggaagaattcagaaaataaatttttgttcagtgttcaaagtgaagcgacattaacaacttgaagccaaggcatcctcacccctctgcgtttttttctggcccaagttgtgttttcctcagcctaggtggtatttcttccattttggggctagaatctgtgtcgcctgaacttcctccgagtagaaacagagatacctagggaccaggtcttctctatcacctgggagccctggggtaatttccgtggctctctgagctctcacctgggttctctgcagaagggccctgtcatctcggtgggggctgtggaagctgcctggtccattagaccaacatgagttggattcctagatgtatgtcctagccatatgaccttgaactcctcctcagatccatcccttcatccacaggatgatgagaacagtgtgaggtgtgaagagtgtgtcactcagaggtcctccgtgagcctccagggagcctcccaggcacgctgacacaggcaacctggcttctgcctgctggtgccattgttctcctttagactgtgcatgtggttggcccaggcttccctggcttcagcagaaggcatccagggttgtgtcttgatgccaagttggtgtgtcccagcctcaacctcccagccctccacctgcccttccagcacactccaccagcacgtggctccactgctcctggagcttcaggcacacaaccctgggccttggcaccctctctttcctcccccagaacactctccctggcatagctcactttcccacctcttcagatctctgctcaagtggcaccttctcaatgaggacttgcccgaccccccatcccacgtactgtccgttgtcttttgattttgcttcatttttcgtggaacacacgtcactatgtggcatcacagtatttattactctctatttttacctctttcaccaactgcaatggaacagccatgactacaaggattctgtttctttggttcattgttcatctctaagtgtgacaataaacagctgttaaatgaataactattattctgttagttccctcctcctccccccagtgccatgcccagcagagcttggttgtgcaaaattgtgatcattacatttctcttggatctgataaaagggttgtgctacattgccctctccaaagactttgcagttttcagtttgatgaaagtatctaggcacctccatatctcacctaggtaaatacatggctcatggaatttcataaatgcctcctatcttaaatagacgttttcctccgtgcctcaattccctgtgtaagatcattcttctgagagacatgttgttgcagcttaatcagctgtgggggatcttccaaaacctgagccagtgcctctctaaggctgctattacctcacaccatcaatggccatgggagtgtaggcagtgtctggcctgcatgcttcctttcggtcgtcaagaaggcttttgggcagtgacaggaaccgagatgactttagaaatatgtgacttagtggggcatcctcacgtatgtgtgaaggggggacaggtgccttcctgggttccctgagccctgcactgagggcgtggacaggagtgaggtgatgcacgctcctttcctggagttgaggaaggcattgcacctgctgcacggagtagattgatttacagagacagaaagcaaaagacagcagccgatgcaaaggcacagggaaacaaacttcagtccagagaatcccttctattggtggataagtaggtcgagctcctcaacgcacagacatttatggtaatgagacggaggcccagaaataaccatacagagaacaacacacacaaaatggctgggagtgtattttgggtaattttcatataatgcaccaaaaccagctccccagtaattagcacccagaagaacaaagaagcgaccacacagaccctgcaaggcccagcagacgtgggcatcactgagggtggaggaagtacttggaaggcgcagcagacgtgggcatcgctgagggtggaggaagtacttgcaaggcgcagcagacgtgggcatcgctgaggatggaggaagtacttgcaaggcgcagcagacgtgggcatcgctgagggtggaggaagtacttgcaaggcgcagcagacatgggcatcgctgagggtggaggaagtgtctgcaaggcccagcagacgtgaggtattcaaagtgcgcactaggcatcctctctggcactggtatcaatctctccaggtgtgtctgcttctctgtctgccacggcagatgaggagcagagggaaggcccaacctgggaggggagatttcccccaggccggccccacccttctcctctctaagggatgagtggtgaactgctgtctcagcaggacccgaggccatgacaggccattttcccacatgcagggtgtgtgcagacaggaccatggacctgcacaatctccaaaagtcagaaaaaacagtggcaaaatgcagcacataaaccacaggtcctccggcccctctagtcagtgtatgcagtgcgggaagatggttactaagatgtagtatttctgcttttctttgttaaaacaaacatcctggggaattatgcttatgacctgggtgaaaactaatctgtacagcaaacccctgcaacacgcgtttacctataaaacaaacctgcacatggacccccgaacctaaaagtttaaaaacatgccagtcaatcctaaatatttttataagcaatagggaaatcatattccagacagcattcattttaaacaactcttaagagcaactttgagtattttatcagtatctgaaagcaaaattcagatacctcctcacctgtactcacagctcccagcagcccagcgctgtgccctcctcgtgcccagcagccccgacgcttctgcccgcaggacctgggcaaggcgtgtgtgccatcacagaggatctgatgtgggtacctcaccagtatttgaagcgttgtgattgcagggaggtcgttatggtaggaaaacaccctgtggtttagaagagaaagaaaaaaggagatcaaggtggaatcagattatgtctgcatttattgagcaaaagaggcaaatgagttatcagagaagagagggcccccacagggaccacaggggtgccttgagaggcaggtgtgccgctctgctccgtgatatagtgccactccagcagttcagtgaaagaatcggggcgcccagaagtgggctttccaatcaagtgacaggtattgaggaagagatctggaatgtgtcatgtagcacttagtgcaaaactcagtccctccgttccatccccagctgtagttctgtgtccttcctgagcgcttactcaaattaggggtctgaggaagggttcttcttgagtggagctgccttcgggcgggcctccttgtctctccagctgagggagcatgcaggacatgaagccgagatctgtctttctgactcgaagcagatgaatgcctgctaaacacggatcttcctatgtctcagaaaattatcttagagatgacactgcgttgtgaccctccgaatatgtcccggttttgaaaggtagaggaaaggcttgagatgtagcaaaaccaagatggcaattctagactcgtccctgtggaaggagtatgaatggcaagcaggtgacttcaactcccaggacctaagtttcttcacatattaaattttgaaggcatgatctcaataattctatctagcactaaaattcaaagaaaatggcaatggccggcactggagaaaatgtctgtgctaatctatactcaagatgaataagactagtgggagcttctgctgggagaattttaacctctgttaactcagaaatcactgaactgtgcatatggacagactattctgaaaatttcctatgatactggaaataagacacacagaagcactgctgagttagatgtagtagggaagcgtgacggtgatggctagagcggagccagggacagtgcggcctggcagggaagacacgtgcatcccactgtcaatgccgcgtcaccctccatgttcccctttcacctgcgttgaactgcagggctctgagttagagggcgcctcaggggtcttctagtgaagggcctcactggcagtagaggatgagggaggcagaggaggggtgcggggatctcgtgctggaagtgagaatagctgatcccggagccaggccatgtcctgtgctgccggcagctgaggggcgccgaggtcagcgccgcacctaggagaggtgcccgactgaaggccacccgggctgggaaagtgacttctcccctcttatgaaaggaaagagactgcagtgtctcagcatgcgcctggggcctttgaagcgagagggaaatgaactcacgcttctccgcctggtcctggccaggggagtagccaggggctccacataaacatgcgaccactgcctgcataagagtcagggggtccaggcctgtcctgtacccccagttccctccctgcacatccttatcctggctctcaactgtctcccaccctcctacccatgcagatccctcaggcttcccaggcacctggagtggcgaacccagtgtcttcctgaatatcagtccggagtcctggattttcctaattttctaatcttctttccacatcagaatggacccaaactccactcatcaggatcctggtggatggcaggctcactaagctggcagttccagcacagctctgagtggttggtgatacaaccaagccttcagtccataaatcaatgcagagtattgaaaggagaaaaaaaaactcggaagataaatgcaaaaatagcaacaaaaacattccgaatggtgaggcagaagggagcggcgttactctctactattaaagtgctgcatgtctggctaactagtgtagaacgtgcctcctgggaggccctggggtgagaactgtgcaggcctgcttgctctggaagtggaggcaacactgtggaatgttcaggactgtgctacacccagaactccaggtggctccagctctgctgtttcacagtgagtgatggggtaaactgtcagcctctgtggttctgtactgtcacctttcagagggagcagtaggtgccccagtgcctctcatagggtcatcaggggaccagactcaggtgagtcagactattctgtagtcaccaacttcatttcctctgcacagaaggaaatgtggtatatgaaacatttatgaccaggtgcagtagctaacacctgtaattccagcactatgggaggccgaggcaggcagatcactttgagacgagcctgggcaacacagtgaaactctgtctctacaaaaaatacaaaatttagccaggcgtggtgacacatgactgtagtcccagctactcaaaagctgaggcgggagggtcacttgagccagggggaatgaggctgcagtgagctgtgattgtgccactgcactccagcctgggcaacagagccagaccctgtctcaaacaaacaaaaagaaatatatagatggtttatgtggtttggttttttttccttatcattgcgattgctattaaaacaccatcatcttttcattagaatgaatgcattgtcatatttctgtatttataagtcaaaatatattttgatattgatttatttatgtaacaaaacaccacctctgtaaagccatagaaagcagtggtccttcattatttgaaactcactggagtgcacctgcagaccaggtctcctccgacccggggaagtctagggcgatttttgctttggagtacagtcccctcctgtggcttcctctatgttttctattcagctgtacgtttacttgcctgggtcctgtgtcagtgaccagaaagaacagtagctcaatcaggactagatgttgcaggaatcaaaagttgtgtatcttagggagagacactaagaagccaagcctgtatataaagttgtaatccagagttctgactctaccagactctagtgaggagggtggaggataaatggcccacagcaaccacgtttcttttgtttaagaagatgttttcattttctaattgtaactatggagcataaattgtttataacaatctgactcaaaagagataaaattcaaccctaaaacgtttcataaatctcactcatggaggtgttgaaatctcatgtgtaatgcaacagaagtcaggtttgtagaataactggctgataggaaggaagaagagcccatgagatcagccactgaatgggctctgtcttctgggctcaattttctcacctggagtagttgggccagctcttctctgatttccgtgccagtgcggtaactctgtgagtccacccagcggtcagccccaggctggcccccgctcacaggaggctcctgctcagagtctgttgctctgtggctttgctggatgacagatttaaaatagaaaaccaaaaaaagggagctgagaatgctttgttcttctctttaaacctccatctaaatatgtgtttttacttagaacataaacttgtcctttaagataatttcctgataaattgctcttttatcacacatacattctccctatttgatagaacaatagtcactatatagaaactagtaaaatggaggccaggctcagtggctcatgcctataatcccagcactttgggaggccgaggcaggaggatcacttgaggtcaggagttcaagaccagcctggccaacatggcaaaaccttgtctctacatggtggtgcacacctgcagtcccagctactcagcaggctgaagcaggagaattgcttgaacccaggaagcaaaggttgcagtgagctcagatcgcaccactgcactctagcctgcatgacagagtgagactccatctcaaaaaacaaaaacaaaaacaaaacctagtaaaatggcctcctgctttttgaggttggaatgttcattttgtggattgtttgtatcacattttcaaccccagactggcccagaaaattctgatctagttcccatagcccatgccatcatgtgactaatttcattattagcctcagaaaagcatacctggaagggagtgtgtacaaccagggagggaatcccaaaagctcactgtgaatgactttgaattccagatgaggctgatgcccagcagggattcagagcctgcttgttgatggattgactggctgttcccctccatgagcccacataattaggagctgacttcatttcacatgtgttttaaaagagttaaataccggtagcttgagaaattccattcacctgccaggctttgaggccacccacgccatcttcacccgccgtccccacatttgctgccgctgggagaggctcagatgacactgagcaggaggaactttgaagaagggtagaagcacacggcaggctctgtgctcagatgccaatatgctttccactgcctgtttccagatttcttctaccaacgggctgctctccccagcagtcggctctggggccaatgataagacagcaaactgcagtctttaggaggcatatcctgtgacatggttcttgtaggagatctgacaaagggccaggaagttttactatccccactgagctaattaagtcttggagacttgggtcaccagcatcacacaattagaaagcagccaagtcatgatgggcgccgagctgtagaacttctaatttcatatcaatgcggtatgaggacgaaccgtgccctcagtgtgctttgtgattagagtataaagctggagatgcatcggaggtggtccgcgttctgccggtctccagacggttcagggactttctccttggctgctctcagcttcacccgtcagcatggctgtgaccctgtgtgaagaggcttgtccatttttgttttaattttgtcgggggaaggtaacttatgaattgagtggagaaacagataaatgtctgattatcaaaaaggtgagatgtacttcttaactacgtgctgctgaagggagaatgtaggggggaacaaactgaagctaatcctgagatttggaatgtggagaatgaccaatgttgtacataacacatttgtaggaaggtgaggaagttcataaggtgggaaccaggacctgttccccctgcaggctttttgtggctgtagaagcagcaaggaggattagacaggctttttctttccttgttcaccactttcaaggtcttgcttcttttccaaattcttcaggaccacacaatgagttccataaaggaaatgtaggagaacatcatgaaaatagtgttgcttgactgtggtttcttctttgactcaactttcaaaatgctccaacatgtggcctgtgcttttttgttttcaaatcatagcttatcattcatctcgtggttgggtcttcatagacatagtgattctggctgttaaaacttacctattgtgcagaggtaacacagcttggttattctgaggaaacttctgtaatcacagcccatgaatataacaaagtgcataaattgagaggagaatatttccaaatattaattaaaatgggattgacttcaagtcctaaaagcttaaacactagggtatagcaaggggtatgttggagattaatacttccacaatgtttctgattcattcactagtttgattttctttctttttgctgctcttggggaatacttttatccttataataaagaagatgatttataggaattatccagaagaagggcaatatttgtttcacacaattagcgattctctatgtctaataaaaggtaaatttgatttgccgaagtttagaaaggtgtgtcagatcttaaatatttgttccttcagcgtgggataataaggatattattttctgttattgacatattgaactccaagtcttttttccaccaaccttttctgcataaaatccatagagaaaacaccagagcccccatatctcagtttttagtgtactggtattttgtagaggtcaatatacctcatttctttaaattgttaataaactttagacatttttcttactctggatttttaatcataaaaacaaagaacagatgtgaaaatggcatgcagttaaccaaatctaatctaagggtacagatacatttaggaacccttttattattactcatattttgcaatgtacatggaagcaatgacctagcatggtgattagaggtacaaatcccaaatgctctttgagtgtgaaacagaatatgtttgagataaaacataggggttttatgtaatttttaacatggtctttttaaagagtttttctaaatacgtttttgagattaagcatgacacttactcacacattatacccgctcaccaagcttttcctgaggctgtgagatggaggaatgtgccagctctgcctgtccagtcaaacactgtgcagtagctgtaccaacttacctcaaccccgccttttataggcctttggctgctgcacgctttctctctctctcactttcaaacctgtggagacacagacagaggaatcagatttactgtctaaacatttactatggaatttctgttgtttcactgtgtatcatgataaattgtcttgaaggtatggattcaaaagaactcttaattcagccccaacatgtgcttatgaatctgagctcccaatgcagccggcacccctgcctgactctcaggaacctgaggctgtcctctgtgttgcctacacgccactgtgaaaatagaccatttaaaagcaattgctgcaaacatctgcttcagagttggcaacaagtaaagttcatgaactcttagaaagcctagtaatgtgaggagcacagttaatacacatctggcgaggctatagataaagcaagccaatggagaaaataagtcattcttgaaatgtatgaaaaatacaaaattaatttttaaaatcatatttgccacattgactggtttatcttaagatccattaaagaaattaataattcacaacaagtattttaaatggccttctgctttttagcaacatccgttttctttatgtcaactttttcaacccagctgcaaatgggacttacagttctgtgagatgatagacggtttgacttgcagttaacgtgctatccatgctgttgcaactaagcttccagttctagccactttttccttttcttttcttttttgtcttttttattttctttgcagaagaccatcaaatgaattgtcacaatactcgaataatgcaagacacagaaaaggatgataacaataatgacgaatatgacaattacgatgaactggtggccaagtcattgttaaacctcggcaaaatcgctgaggatgcagcctaccgggccaggactgagtcagaaatgaacagcaatacctccaatagtctggaagacgatagtgacaaaaacgaaaacctgggtcggaaaagtgagttgagtttagacttagacagtgatgttgttagagaaacagtggactcccttaaactattagcccaaggacacggtgttgtgctctcagaaaacatgaatgacagaaattatgcagacagcatgtcgcagcaagacagtagaaatatgaattacgtcatgttggggaagcccatgaacaacggactcatggaaaagatggtggaggagagcgatgaggaggtgtgtctgagcagtctggagtgtttgaggaatcagtgcttcgacctggccaggaagctcagtgagaccaacccgcaggagaggaatccgcagcagaacatgaacatccgtcagcatgtccggccagaagaggacttccccggaaggacgccggacagaaactactcggacatgctgaacctcatgcggctggaggagcagttgagcccccggtcgagagtgtttgccagctgtgcgaaggaggatgggtgtcatgagcgggacgacgataccacctctgtgaactcggacaggtctgaagaggtgttcgacatgaccaaggggaacctgaccctgctggagaaagccatcgctttggaaacggaaagagcaaaggccatgagggagaagatggccatggaagctgggaggagggacaatatgaggtcatatgaggaccagtctccgagacaacttcccggggaggacagaaagcctaaatccagtgacagccatgtcaaaaagccatactatggtaaaggtaatatttctacctaacgtaagttgcctcatgaaaacatgagctagggtaaaggatgttggtggtagtctacagttaaagtgtgactcacactgaattatgtctctactgcacattcttagagttgattccagaaggatattttgtgattacgtttctgacaagcaaataaaatatttgtctgagaaatacataaagcagcttaacatcatattactagagcagatgaatagtaggatatttcagtgggaaatgcattccttgggaagacaggggtaaagcacagacacatcacttgatagaaaatattagggtaagcctgtgctattataaatgaaccacaatctatgctgagtggcaagggtttatgtaacaattagtcaatccgagataaagcacacattttataaattggattggggaaatggcatcatgatttgtaaaattatcagcaagtgacagttattgatgaaactgccctcgtagaaaacacccctgatagaaattgaacagtaactgaatgaccgataacataagataagggcagtgactgcacattaattatcttaagatagtaaggtaatggaaaccatttgctatgcaaggcatggtgtggcctcagctaagatcaatagcaatttctttaggatattcattccttttaactgattccattccattgtggaaacagttatggcgcttttctcaaatattaatttattataaaacactcaaaaactatccaatatgatagtttgagctgagttttcttttacgaaatatgtgggcacatgtttgcatatgtcaatgtatttagctatctttacatatatatgtatactatatgtatgtaagtagatcatgtgtatatgtatctccaacctgaatgattgtcttcatgtttgtaaagaagacggtgtccactttcaatatgaggcaggttctaattcagcctcatgcataaccttgactttgtggatatctccatcacaatattcttttagaactcagtaagaagcaatttaaaacatgaaattggcagttcattaaatccctctatgttagcacccaaaagatccttttatgttttttattacattctattcactacgaatcctgagtttcctcactgcgaacccaatagtgaggttcaggaatttacttgaaaatcagttgctgtataaatttcaagcaatcagaaaaactgcactttttcccactgtggcacagacgtgtattctcctctcaatgtgtgcacctaccttctgcggcaagctaggcatcgctacagccaaatgcaaactgtagaggtaccttagccagaggctcggggactctcggcaggtgcctgggcacagacagcgtttcagtcgcaaggtgaagctttgcccgttgcagtgttgttatgtagcgaagggattgttttttagaggaaagagaatcagtagactctctagctcagtagagcttcaggcctgatttgggcattttaaagactacggaacatagcatgcatgtttaaaattatagtgccatcatcgttaacaagatgggctaaaattatctattagaaatttttagttgaatttttgagaatcatacaggaatgaaacatttttattttggggaagaaatagtgtcttcttttcatgtgattgctcagttggacaaatatattttaggcttatgttttagactcccagatcctagatctgaggatggagtttgggcatgaagtaatgtagcgtgtgctgtgtcaagggaaggctgattgagcttaggcttatgttttagactcccggatcctaaatctgaggatggagtttgggcgtgaagtaatggagggtgtgctgtgtcaagagaaggcagattgagctttttgcaaattctgtgttgcggtggcttctttggtttcttggtccctttaagttcagcggctttatgcaaattttgactcgttttgttttttgttttgttgttttgttttgtttgcaagaaaatggaattcaaggtgcttgcttcccctgtataaatgggggttgggtgggaatgaacagtaagaactgagatgtgctttttccctcttgggaggaaaggttgcagatttggactttcctgtaagcagaaggccttgactccagtctcacccagctgttccaggtcttcctgctctgaccaaagctcatttccgtatctgtcagtgtcttccacattattccaaatgtccttcgagatgtctgtagttatattcagaaccaaatacatgcagccaagcaaggccaacaaagtggagcaaagaaactcccttaaaaaaatagtgcgggtggatcacgaggtcaggagatcgagaccatcctggctaacactgtctctactaaaaatacaaaaagtcagccgggcgtggtggtgggcgcctgtagtcccagctactcgggaggctgaggcaggagaatggcgtgaacctgggaggcggagcttgcagtgagccgagattgtgccactgaactccagcctgggggacagagcgagactccgtctcaaaaaataaaataatattaaattaaattaaattaaaactaaaattgtggtactatctcaccaacacagccaacagagaattcctgcaaccactagcatgtcaacaggctctattttcagacactctgttattttattaaaaatggagagaacacttgtattctcatttctacacaatcttctcaaactgatttaaattatcaacgagtaacatttccaaaatcttgagctaatgcaaaaggcctggatcatggacctcctctgtcatctacccaattgcctgctctaacagagggaagggagcaagctaaacagcgcactttttttttctgtaagttgttgcaaaaggtgtttggttaaattgttggtccctttgcttgcttggttattttgtgtttgcttgtatgtttgcttttgagattgcaagagaaaagaaaccaaggggaggtaacggtgaaggcaaatagcatgaccccacctcaaccaggacctcatgcatcgagaggagactatacccttgtcgtcttccaaaacccaaaatgctttggagccacattgttttcatgcaaatccctacttaatttcacaacactttcgatatctgtgaagtcatatattttgttaggtaatcctaagtgtcgtggtaaaatagggtcacttaaggacgaataatagatacaccttacacttttttgcaccagccactagccatttacatctagttcaaaatctcttatctcaagtttatgattgtcagtatttcttttgaaactgttactgtgcacttactactttatatttgtagtgatttatatctacagtaatttataccaacattattatgaaattactgaaaaggcaataaagtgctaggcatttttgtttgcaggtgtaagagaagtttcagtaatgtaattagaaattgaagccacaaccacataattttagatttgttctcaaagattcttcttgacataatggtaggaaagtaacggatgattgtacaaatggtatttccctcaacaccagtgctggcttaagagtttccagtacaggagaggcacattatgcagaataagatgctagctaaaaaagaaaaggggagtgtttttatatgaacatgatggcatttgtctattcctgctagtcctttgtctatttgaagttcacctgaacgaatgaaaagtccgtaaaagttcaaaaaattctaaatccagcttttattgatataaagtgaattcttaactgaaagtaaaacatgtattttctagcaatcatgattggcctgattaatggaatatcaaaaagaactaatccctaaagaaaatttaactattgcatttctggactaaataataataatcgctatctgttggtgatctgagcaactggttttcaaaaactggctaaaaatacagtgttttgcacacttagatttactgtttggtctgagctttactttagaaatattatctgaagttattatattgcatatttatgaactgtagtcaattctgggtatagaaataattttattagcaatatcattacatttctggcctctagtattgaatttttttttaaccgaagctctgccctaatttgcccttgactggtacttgcagagaagccgacagggctgtagaaacccattacttcttaattttgtgtatgcatgcacggcattctacgagccttcctctggttccaagtacagatgaagaaatcaaaacaaaaggctgctcccgtggcttctgaaacatgttgattacccgtcacctctgtcaggtgggctttccacctttttggtcatttgcttacagtgccttctgagagttcagtttattttcagaaaagcgctgaattggtgtgctacgaaacaatgtcacttgacctccggagagcaaatttcaatgtcagtaaaatcctgcagcttctagtgtatgcgatcagagcactcaataagaaagaaattcagctaaagagtttttgaatggaatgacactctctggttgaatttcatggaaaattgctgaatgatgatggcacagaatttcgttctctaagaaggtcactgtctcatcacgatttacgttgattcctttgagcaacacagcttatcatgtaacacacgggaaaataatgaatcagagttaaggtgaggggtaggcttttcttttctttagaataaaaattaaaatactttatgattcatgattatactgtgtaaggttgaaaaaagtcacccaaaaccaaagaactatctaagcaaaagtctgatgtcacagcctagcccccgacacctgctttatttctttctttagcaaggtttcttcagattgtgaaataatcacatttgtctttgattggtaaacatttattctcttggcacctgttgtcgcttttagatccctcaagaacagaaaagaaagagagcaagtgtccaacccccgggtgtgatggaaccggccacgtaactgggctgtacccacatcaccgcagcctgtccggatgcccgcacaaagatagggtccctccagaaagtaagtccacgtctcaccgctacccttgggggtgcaaacacccatgactctgtctctgtcatccctcttacctgacatcatctccattgtacggctcggtgcgacctgatttaactaggcccctacttaacttgatgggcaactgatccaggattcgtgggcatgccaatggcacagccccaggagagtggtgcaccatgaagcccaccgcccctaacaaagctcctgcacaggcctgggttctagtcctgagttcagctctgacctgctctgtgaccttgggcaggttgcttccaggcatcttttctcgtaattacagaattgaattcgatggcctctaagacgtcccttccagcatgaaactgccaggaatcccagaggagagaggccttgagacagacatttcttgcccaaatatctggatttctgtacatcatccaaatgcatatttagatctgaagttttattgcatttcacctgtaaagtctgtctcatgtcatagttgtctcgacatttcaacactataggttcttcaataaggaaggaggttgaaatcagatgggttttgatcttaagcattctttttaattaattaggttctgatcatgtggaataagtccatgaatatagctaaatttttttagaattgaaatgatatacatctttttttgtttatcctttcagcacataaagtatgccaataaattaaataccgcagctagaattgatggttcagggaaaagacacattctcagaaatgagtatatgagtttaaggttctggttttgagtctacggcatgggaagagtttcccttactgtctaagacacagtttctagtggggaacatgtcataacatggcttgagagatgacaagatgaccagttaactactttaaggcccttttgaggactgtcccattaaaatgggtaactttgagatacttgagagcaaaacctgtcagcacaaagaaacgttctcaggagcatttgggacttaggaagtttttgctgaacattttctagtgaaagatctttagatgcaattatggctccaggttttcaaatggctcctcaaaatagcaaacttgtgtgttttgtaaccatcttgtgaacaagcctgaagagccataaaaataaacaaatcagagcgagtggctccaatcccgtgtgttacatgagcaggaagacagcatggtttgacaacagcttccatgtacccagcacacacttggtgctgggacgcagctcacacccagcaaacacaagttcactgaacccgcaatcgacactgcagggcaacaccccccctttcattcggatgaggaagatgagagtcagagactctgccaccctttctttccagaggttagccaatgcctggcaaattgaggatatgccatatcttcttaaacaaatctgagcaggtactaacttactcaagtaagctccgggctaagatgtaaatccgtatccgactgacctctgagcctgtctgtctcctctgaaacctgggtttggtgttccagtttctgtctgaacacacgatgtgacacccagcaccttgcagctctctgtacttcatcttcctcatctgcaaagtgaggcaggaggaccaagctctagtgttttaagaagaaagagtttctttatgtgttttataagacctacattttcaccttcaaggtagattatcagctcctttttatggatgggaaattcttctgactccctgttttcacaggacaggcctaaatgaagtgggactgtggagtgggactggcaaggtgcccttcgcgccggctgcaggtgcctcccagggccagatcgctctcggaggcaaggagagtcagctctgacatgggcggcacaggtgcatgccagacaatacagaggaggcttctcagcctttgctcctgtgcgattctttataacaccacaagcatttactaaaacaattagagaattccatccatagaaggcttttaattttttttttctgggctagtttcccctaatcatcatttctgtccaactaaattccataaagaaaccagcagcacactgtgtcaggaccactgaggacacgccattgcccgagacactgtactggccctcagagagctcccagcccggctgagagaaggacatgggcatgaggccggggctctgcacgaggccggggctctgcacggtggggactccacagcatggtctaggcgggatggagaactgctcccagggcccccaaggccgccgtgaggtgatgctccagctgtcctgtgtgagaggcgaggaacccacagcattttctaaaggctgttgtaaaagtccacacaagagatcagggcatggaaaagacagtggttgtgggaatggaaaagctggggcagattcacgaaacatccagagataggcgggcaggctgtggagggcagcacacgtgaggagtaagagaagaggggagaccaagaggatgccagggattatagcctcggtgaacttaaggacgccagggccgataatctgtacagaaagctgagcagcagggccacatttggtggagaaccgggacttgtattcttcccacttgagttggaggagctgcatgatattctgcagggtttgggaaggtggctctggaggcctggggaggtcaggtgcagaggtggctacctggataccgtccttggagtagcattcgtggaaactgatggtggaattgcttagggaggaggcataaagcaggaatgaaggagggtccatacatgggaagtttggccatgaatgtatggtaagatgacgcacagaaacaggagcaggtggaggaaaatcagagaaacagaaaaccaggagaggaaggtgtttctgataaagccccgtgtgtctgagaggaagaactgcaggggtcacagggtttttttgtttttgttttcgtttttgttttttttttagacagagtctcgctctgtcgcccaggctggagtgcaatggcgtaatctcggctcactgcaacctccgccccgtgggatcaagtgatgctcctgcttcagcctcctgagtagctgggattacaggtgcatgccaccacggctggctaatttttgtatttttagtagagacggggtttcaccatattggtgaggctggtctcgaactcctgaccttgtgatccgcccgcctcagcctcccaaagtgctggaattacaggtgtgagccaccacgcccggaagggtttcttgagtaaaagcctcttgttgacgccgagagacagatgtgagaagaggagagagggataggagctgcacatgctgcagaagtttgagaaatgtgattgagatggatgaagtagcagcagagtgtagaccaaggatagcaagcacactccacctcaggaggattcaggggcgaggctgggagtgtgcattcccacacagcaggagagaggcgtaaagtgcacttgccatctggacctcaggtcagagtgacccccgtgtgccatccccagggaagactgcatgtgaaaagtttaccataaaaggaaaggaaaggtgcaggtacatgtcagaggggagcagtgtgaagagaagcattcgtgtgctgttgtcacacggtggtggacaaatgataaagaagaaagaatgaacgaagtaggtagatcgacatcctgcaggaaggaggaccacgcacatgcttcctggagaggcctccctgtagggaggagcagcacttcttcctctgggacagggaggaagggggcagggaactgtgcttggatcctctcagaaaggaaccctcctgtgaccccctccagccaggtgccagcacaagatgaaccaaaggtggactcactttgatcattcatttttctgacagcacttactaggacctaccacatccaggacaagccaggaactgtgggagcgataaagctaataccaaagcaaactctgctgaagggactgcccagcagtaagaagacagggtgtggactcagataacagcaacaccatgtggatgtgggattcagtgcccagcagactgcaggggaaagagagaggttgttctagagaaggaggaaaagtgtcaaaaatacaattacataactagagtaggcagatctgttttgaatagaccttccatgttcacctggcctcaggtaaaccttgctgtcagggaaagccaccaccccattcccctggagtttggagacagcgggctcagaggagcagagcatgatgcagacagggtccgtgtgggggtcccttcgtccctgctaaccttcccccagaacccagagtagtagagcgttcatgaaggaccagaaaagaaggaagacacaaataattcaggtccaacaccactgctgggaaaattcaagcagctctcccctgccgaccagccagtagcatccttgcaccacaaaaggtgtccatgcaagaggcctctcccgcttgttaatttcacagggtaaaaacgcagacgcttactcttctagctcatcctatttaaagaataataaagcacttgattcctaaaggaagagtgattatttaattcattttatttaaaattaaggtttgtggttctgtattcatctacccaccacacgttcataatgctgtgtgtttccaaagcacaggcatgtttttaaaatccccagcctctgtgttgttctatggctaatcaatactccatgcttgtgcatgggtaatatctgtgaggccctcgctcccctagcccatcaggaaagagtcagttctgtgttctctgaactccccagctcctggctccagcgcctctgctgtgtgaggcccttagcatagagtcccgtcaaccttctttctctggcctttcatgtagggtctgtagggtccagtcaaccttctttctctggcctttcgtgtagggtccgtagggtccagtcaaccttctttctcctcccatgtgtgttttcctggccatgcccatcacaaacgtttgtaggactgtctatcatgagcgacctggcctttgttaaatgactgcattttcatgtgccctaaccgtgcctctgttttaacactggctgttctctttgcctctccctgtcaagtccttgccatgcatgaaagtgtcctcaagtgccccactccgggctgcacggggcgcgggcatgtcaacagcaacaggaactcccaccgaaggtaagccacgcgtgggtcactggtgtgggagggagcaccggctgctctccatgccttctccttcctggggggcctaccacgctccatatggtgctccccaccgtgctccccaagtgcgggcacctccatataatgcacgggagtgaaagcactccacgcccttgtggtgcaaactggatggttttagttgccccacccaccttatcatagcagggtatagtatcaggagtggaaaccatgaccatttacaatggctggaaggaaggagaccaagccttcgctgtcctccgaggtgaagacagggctgtcctagtgttcattggacaggacgtggcctggaatgcagcacgcctgtacagtgtgtagcttggcttggctgcccttggaattctatggaaaccccaggtcacaagtatggacgtcttcagaaaacctgcagatgtttagcaggttggggggtggtctgtgggaggctggggtgccagggaaatagattctggactcctgctaaccaatggactcagaaccactcttttgtttgtgaaagatctgagttctcttttcctgtcctgtgcagacttgataagaactactcagctgcccataatattgcgttcttatctgataactttttttttcccagaggccaaaaagtgattcttttaaagtttgtcttacagtctatggttttatgagttcacgtaaaattgtatctaaaagaaggaaactgttacaagcttcactctaatttttgcttgtctgactggcaaacctggtcctttgtgttacatttataatgaaacaaatgaccactgtgccctccagagacattcaggtgtttaatctgcagaagcaggaaatgatcgataggttggagaggtgcgtgctgtgtgctgttcgatgcagcatccgcagcgtcagggcctccgtcaaacctcagcacaggcgtatttttgggatatgacacatatatggggtgagcgtctgtgcatatgagcagatacgtatgtagacacccacagagcagacacggtgatttcacataaagtgagcttgcacacaaaagagcccagctgctgtctcctccgtctagactaagcctgaactatttggctccacaaaacattttattgcagtcctagaaatcattctgctttcctctccactttcatttccctgcttgtggagaacaccaaagggctaaagtcagacaggccccccagacgccacagtcaatagcatttaggaaatcagcttggagctccatcttctggtaacagtcaattcattgccattctggggcttcaaaactcatcctacccaagctgttaattcttcatctccagaaatggaatctgtctacagttttcaccagctatgtcctcccgaatgcatgggagctgggatgctctcattgggaaggattgaatacacctcacacatagcactgccgccagcattctctgctggagaccagcagaaagcatgcacctggaaacatgactacctccccctctcccagtccacccatcaggactgcctgtgccaggtttgggaaactacccctccctcaccagctccacctgcatcagggtcttggtgctaagggaggattagtgtgctgtgaaggtgtttgaggcgggaccattcaacccgctttctgtgattgcagcctctccggatgcccgatcgctgcagcagagaaactggccaaggcacaggaaaagcaccagagctgcgacgtgtccaagtccagccaggcctcggaccgcgtgctcaggtacccagcaggagtgcaccatccgtgagctctatccatagtctgccccacacctcggagcgctggggacacccgctcagggcatgtccctacagcagcaggggcagggactggagggcggggctgtgctggaagccggggccaggacccctcactccaggccaggctgtgtgagggcaagggtgtcattcttcccctggtgtctgcggattcgctgtgacaatttacatgagagaattggaggaaatcatttctggttttgtttctggacctggtatttcatgagtctgagtgctagatgaaagggaagctttgaaaattactgagatgtccaaggtaattttgtcatattttgcaggatagggcctcacaccaactaaggctggtgctgatgtttctgacgatgccaggggtatgagcaccctgtgcacacgtgtggaagctctcgcgtgcaaaaccggcagagctccctcctgttacgcccaatgccctgaggtgtaggtgggagtaggtgttgtcacctccgtttggcaagtgagaaaatccagagtgcggaggttaaatgactgacccgaatgttacagtgggtcaatcagtgttacaatgtcgcagatcatccggctgaaaccactgttttattgaagttttgggaggataagctccccattcactcagcccttctatacagctttcattcttacgtgttgtttgaaatcctcatctacatgaaaactatgacaattgtcacatatcctgccttttcacacaacatcacagcagaaacacgcgtccttgtctctatgtaatcatcttaattgtcatcttcacagctacgtatattctactgttcagatgtacccctcagtgccaaaactaggttctagctttgaggcattcaggctgtttcctgcttttactattaaagagagggcaataatacacatttctttcatatatacagcactttgcttctgttatttctttggctactcagaaggctgaggtgggaggattgatttgagcccaggaggtcaaggctgctgtgagctgtgtgattgcaccaccatactctagcctagatgacagagcaagaacctgtctcaaaaaaataaaaaagtaaattatttatttaggataaatctcttggagcaaatcactgggcaaacaatatgaatatcctttttgttcttgagtattatttcataacatcccaagaagcttctaacgtagtaattaaactcccttcctccctgaatagaaaagttaaaatctttacagaaaattataaatatttatttaagcaaaaataagaaaacaaagccatctatgaccctactatcaagagataactcctcaataaattgtggcacagctacatctagagttttctgcatttggggtcctggcctgaagtgcccccagagcacccatctcaggaagccaccctttcagggaaatgcacccaccttccatatggcaagaccaaacactgaacaactcataggccaccctccctctccccatcagcccacagctaattattggcaacatgaaaaccacccccacccaataaaacagaccaacccgcggggctgcgtaatccagcaaggaatcgttattggtcaaaggagaatttgaaagttggtagggagaaatttgttgctgagggcttttatgaattttcttcagcctactttggccagacccccaagaagctggaagaactctagtatctggcctttcttggagtcaccaggtgactgcactgcccaccttcgggctgccctgctcccggggactgctctgcccacctacaactgcccacctttgggcttccctgctcccgggggctgcactgaccacctacgactgcccacctacaggctgccctgctctcgggggccagcacagagtggggatttcagggagaagctcatggcagctggagaccaggcatgcatgtaattgtgaataccactttgttcaaacacagcctccactccgatgttccggcctgaagccttctgtgctgctcctgtggcttcatatgcagcatccctgtttctggattggtgcaaagaaaaccccaccaaatgccaaccgagcagaggctgggagtaactactgtgcagctgcagccgttctcctctgtgcctctggctggaatgggaaccaggccaggacagggcttttaacaagaagaaagagacgctagtctcactgcagtgcgaggtctcgggccagcccagcaatgcacactgaccaaccacagccattcctggttgttcagggaggcgctgggtgctgggccctgcactggccctgcgtgagactcctgcgggctttccgcctccatggggcttacctggcatgctgggtgtgacagctggaggacaagtccctgtcccagcatgtctgtattccccacagggtctccatgtaggggtgctctttcagtggaaaaggaagagacaggaaggaagaaaagagaatgaagttaaacctacagtcatttaactagttacgattcaaaaagtctttaaataaatcgttcaatgaacaagagcctgagacttaagtaggtgcttccaatcctggccaagtctatagcctccttcccagtcccagacttgcagcctctgtcagggtgtggcgtatggccctctagctgaagcctctcctcccctcctacctccctctgatctggtcctgatctttttaaggcttggggattatgcttctcccagcctttggccttccccgccaggggaataaacagattgcccttgggctgatctggtcccaggctgcctgccagtctcttgctattccctgagggttctcctggcttttttgcctcctcacctttggatgctgagtttcttttcctggaatgttttcttaccacaccgccccctcccactccccgcacagatcttaaccttaaaaatcaacccattctgtaaaacttacttcaaacatccctttctccattcaaacataactgaattccatagcctggagtgttctctcttctccagaattctcatagcatttggacccttgaaatatgatcacatcacccatggtcttttgttttttttttttaattaaaaaaaaaatttttagagacagggtctcactctgtcacccaggctggagtacagtggcacaattatggctcactgtagccttgatgtcctgggctcaagcaatcctcccgcctcaaccacctgagtagctgggacaatgggcatgcaccaccacacctggctaatattttttttattattttttatttatttattattattattattattttggagagacagggtctccctatattgctctggtgggtctcaaactcctgggctcaagtgatcctcctggctcagcctctcaaagtgttgggattacaggcatgagccaccatgcccagcctgccccagcatcttttaaagcaaggcctacaggtttattcatttatgtaccatcatattatctgggaaaatgtctcaaggacaatagacagtcaattattacatgattttattgatttgacaagaagtaaatcggctaaattaatgaaatcgcaatacatgtattggtgatttggtaaataaattggatatttaaccaatatccaatttacatatatataattggatatatatccaatactgctataaaagtatagatatggctatcagtctaaaatctgactttcttttcttaaaaaattcagttatcaaaactttgtaactgcaccaaaaccaatataaatttatgaaataatcagagtaaaaagacattatctacatggatgcctattaagtcagaatttataacagcaacaaaatgaaaaagttggaaaatagttaaatagtataatattcattgatttcaatatcattctgctattaagaactgtttttaaagcctgagaaacaaaaagggaaattaaatctcatgtaaaatggaagcataaaatatgtaaaagtgtaagattctaactatttaaagtaaatataaaatgcattaagttaatcataaaaaatacaccaaaaccttaaaagtttttgtctctagaagatctgtaggcgattttttaaaaaatagcttttgtgtcttctaaatattttttcagtgaatcataaaaaagcaaaatataatcatgaaaataatcataaaaaagcaagacaatagttttaaacctgttacctgtaaggcaagtatagatgattttggtgtgcctgtgtgcatcacctttaggaagagagcaaggactcaagagaaaatatatttattcagacacacaagaatacttgtggaaaataagttaggaaaggaacaaatcaaaacccctcagatttccatccccagggagaacaatcaaaatattgtttgcacatcagttgccaaagagtttccttcctaaacagtacacgtttgtacctgctgatattataatttcatatatctgctaaaatttcacatttgtgctagaggtacaggcaatatttgcagatcttactgatactagtaatcaagaaataggatcttactcaaaaattactgtcttcctccaggtgtggttgctggcgcctgtaatcccagcactttgagaggccgaggcgggtggatcacctgaggtcaggagttggagaccagcctggccaacatggtgaaaccctgtctccactaaaaatagaaaaattagctgggcatggtggcgggagactgtaatcccagctactcaggaggctaaggcaggagaatcacttgaaccctggaggtggaggttgcattgagccgagaccatgccattgcactccagcctggcaacagagcaaaattccgtcttaaaaaaaaaaaaaattactgtccttcctaagctgactatgaacctaacactaatacatgaattcaccaccttttgttttttcctgcttggttgggtctttatttggaatacattttatataatttagaatgataaaaattcaacaagaaactctctgcttttaaaattcaatattttgttagctttatagtgtgtaaaatgatgctgatgtgaaaaggtctgtaagtatttttttgaaaaaggatcacttgatgccaagggttcaagaccagcctggccaacttggcaaaaccctgtctctactaaaaatacaaaacttagccaggcggtgggtggatcacgaggtcaggagatcgagaccatcatggctaacatggtgaaaccccgtctctactaaaaatacaaaaaaaaattagctgggcacagtggcaggtgcctgtagtcccagctactcgagaggctgaggcaggagaatggtgtaaacccgggaggcagagcttgcagtgagccgagatcgcaccactgcactccagcctgggggacagagcgagactctgtctcaaaaaaaaaaaaaattagccaggcgtggtggttcgtgatgtaatcccagctgcctgggaggctgaggcaggagaatcacttgagaaaaatacaaagatggcagatgagactgtaggatgttacgattaacagtgcatctatggccaggcgtggtggctcaagcctataatcccaggactttgggaggccaaggtgggtggataacttgaggtcaggagtttgagaccagcctggccaacatggtgaaaccctgtctccactgaaaatgcaaaaaaattagccaggtgtggtggtgcacgcctgtagtcccagctactcgggaggctgaggcaggagaatcgcttgaacccaggaggtgggggtggcagtgagctgagatcatgccactgcactccagcccagaccaccagaccgagactccatcacaacaacaacaacaaaaaaaagaatgtgtctgtatctgattctacaaaacctgaccagctcttcagtgtccaatccatgaagccttgagcccggtgagactgaggagctgtcgagggggaggacagaacgcaggacccttagtgcactgtgggaccctgcatggctgtgtcagaaaaaggacatctgtggagaaactggtcagatccaaatacagcctctggtttaggaaagaactccatactaatgttagtcgcctggttttgctcttgtctgacggttatgaagatggtcacattggtggaatttggtgtcagggtgtaaagaaaacctctgtacaacttttctgcaagtctaaagttatttcaagtataaagtctaaaaactcctcttatgagctagaccgatgaagaggtggacacacacacgcgcgcacgcgcacacacacacacacacacacacgacatggtgtctatgagtgagcaatgacccagtgtccttccttttaaatattttattccaaagacattaagaaatgactactagataaaaacgttgaatgcatattctagtacttgacaaggtacattaccacctagcctacctcattgtccagttaggtacattttgatctggttctgtctcagtctatgtccctaagagtatttctttacctcatcttactttttaagggggattttttatcgaggcaacatctttgtgtataattcggcaactctttgtaaccgttgcaaagaaatttcaggactggaattgtccccatcctcatatctcatgtcatcaccaagccaccagacctcttacaggaaagagggaaaaaaggacatatttaaagattttatttcttgtccttttttattgccgaagttgactgttaggcagtttatttgatgctatataattaaaagacattttgtcttttattcagaaaataaaaaagttgtagttttagtgcaaggttctgattgtttaacacatttaaaaaagtaagatattctagttttaatgtgaagctcgtcgtgtacaaagccacaggaaagcaagctgttgtttgttttcttgtttacttccaggccaatgtgctttgtgaagcagctggagattcctcagtatggctacagaaacaatgtccccacaactacgccgcgttccaacctggccaaggagctcgagaaatattccaagacctcgtttgaatacaacagttacgacaaccatacttatggcaagcgagccatagctcccaaggtgcaaaccagggatatatcccccaaaggatatgatgatggtaggaggtgcacactcttatacatgagagacacgttgccattgatgatgttgttgttgtgtatatcaatgtcctacaaattagttgagcggtggtggtcactcaatgggtaccaaaagaacaggactttcatagcacagcccaggagctgaaagcccctcaggtccacacagctgtaggtgagcaaaacttcaggggaaggaaggagatggtttcccctcaataattccgagacagcgcactcggctgctcgtggaatgtggagagggagaagctatggactggcttattgtcttttgtggtactgggaagacagtgcccttatgttatacgcttcctttaaataaatgcctctgagacagacagtgcaggggagagcaggcagccctgggctcccgggagctttgaggagctctgcacccatctccttggtgttctcagccttgcacgcacatgagaaccatctggggagattttttttcttaattctcatgcccaacctgccctcatgaccaataaaatcagaatccctggggtgctccctgcacgacactacggcacccttgagaagttcgccagtgattgccgggtagccagagctggtggcctccttgtcgcctcttcacagaagaccggcaccggagtccccctgtgactggggacgatggggcaaaacaaggcccagcctggggtgctgccggcagagccgtagcttcgtcccctgctggcttgtggcagctgtggcaccaacaaaatagagctcatgcaacaaacacagtgccacgggcttcatgggaaaggggtagtttattttgaccaatgcttatttgaaccactacctagagtatgaactagttaccatttcactacaaagctagttggtaagtagcttttcattagaggggaagactgtatttatttaattttatttatttatctaaccatgtgtctgctttaaattctaggctgtatagacgtaattgccaagttttaccaattgggacttggggtgtaaatgttctgatgatttagaagtcttatcatgatgctctctagcacaggggaaggaaatagttttttaaaaaaggtcatcaagcttttctttgaaaaagatacttggggctggctgcagtggttcatgcctgtaatcccagcactttgggaggctgaggcaggcggatcacttggtgtcaagagttcaagaccagcctggccaacatggcaaaaccctgtttctactaaaaatacaaaaattagccgggcatggtggctcatgcctataatcccagctgctcatattgtgctgctgctctccagcctggtggacagagcaagactctgtatcaaaaacaaagaaaaaggtacttagttaaaatcacagtacacatacacacacaatatttaaactgaatgcttggggacttcagaaaccatttttattattctacaggaattgctgcacatctttctaagctatggtatttcttgccttaataataatttatttgtatagtgaatgaaatttagtatttcttggaggtatcatatattggtcagaaacagacataaatggataaaaggagtgactgtagcgtataacagaaatagttctgttggtttgttttgttgtttgttttgtaataatttcaggtttcttgtcatctcatttgttcatctacaagtgaaggatcaaaagaaattaagttctcctaattgaaggctgcttatatgatttccaattcattgacgttctaccgggatttgatccattctttcactagatgttcatgtttacgcacctgtttttttgttgttcttgttccgtgtgggctgatttctttcttcagcttcattgttaaggtcagactccagcctgagaaggaaagggggcttctgggtgaagtcatgaccagcagagccgtctccaggtcacggtgcctttagggcacccgaagtcaaatccactgagcagattttcggtgtcattcttaggagccggatgctactggacaagttagcctagtgccatgggtttcttctggagcagagaggaagcaagagtgtcctctgctgaccttgcgaggctgcagtgaagatcagccgagacaggatgggtgtgaggacgcactctgtggcgccatcacatgttagttactggcattgatcatcgcattcccggcagaggccctcctgtggacactaaagctgagccatgctttgcagccgaccccctagaaacaagcatctattgagcagacaggctgaaagctgaatgttagggcttcaggaaaacagagcaaaggaaatgcagcctctcgccacagtgcagtgagaaaatgagccggccctccacttatttgtgtacaaattttagaggcgcaagtgttacacggatgtattgtgtgggcgtgaagtctgggcttttagtgacactctgcttccatttcactagactcatctgacagattttaaaagcctcctggccgggcgagggggctcacgcctgtaatcccagcactttgggaggccgaggtgggcggatcacgaggtcaggagatcaagaccatcctggctaacacggtgaaaccccgtctctactaaaaatacaaaaaattagccaggcgtggtggcgggtgcctgtagtcccagctgctcaggaggctgaggcaggagaatggcatgaacccgggaggcggagcttgcagtaagtggagatcatgccactgcactccagcctgggcaacagagcgagactccatcttcaagaaaaaaaaaaagcctcctggaaagtgcccactaggacaagactggctggtaggttgttgatggggtgtaatccaaggagatctggccccactcctggggaccaggtaggagattctgactgcagagtgactgctgtctacagttactcttcaatgtatctttgccaacacttgcttcaggtgcacaaagaattgagtcattgttcctaaaaagaggcagagaaatgggcctgtcgtaagggagaaaagtacagatcttagcaaccaaaggtcagggccatggagatacagaatgaaataaaacataggaccttccctacagccttggagaatcatctcttaaatcacaccagctgtgatcaaaccactcacaaaatcttcacttcaccagctgcatccttccagacacagcacaccagtgcttgctgtccatctgtcaatctgtgtctgtctatgtgtctgtctgtgtgtctgcctatccatctgtcagtctatcatgccttccctcaggatacacaagatagtgaaacacacactgctgcccagtgaagtgaggagtccctctgcctgcaggattagcgtgtgctttaccaaagtggcaaactttaggtaagatcgtagagtttgagcagaaatcatgcaaaagtagggaaacacacaggatggtgagcacagccagtggtctggaggccaggacggagacccgtgagaaggaagaacagggaaagctgcgggggctgctgaggaaggggcttcacgttgtctataggaaatagaaatccacgcaggctgacagaggggctgaggggaggaggactgagcatccacttgggtgtctgggccctgccctctcccgggaactccaagccacagcccacccaccctgttttgcatggtgagctaagaatggctttgacatttttaaagaattgcagaaaagcacaattgacaaataatattttctgatctataaaagctgtgtgaaattctgtttccatgccatgcatagggtgccgttggcacctggctgccctcagggcttggcgggcaggctgcggttgctcccacagtgcagggcagagccaagtggccacaaaaacaatcgcgcagttcccaaagccgaaacatttgctacaaaatcctctccagaaaaagttgccaacccctggcctattatatctccacctttgctgtgtctccaggcaacacaccccacccttgggggcctaatcctgtcaggttaccagcccccaaatgggctctgcccatgttctccttttgattattcccagcttccaaattctccagcgctcagaccttcctatcatcttggcacttcctcttctttgctccctgccctcctggccacacagacaactcccctgactgcctgggcagctgcagactcagctcattctctccttcatgactcctctggagtgcacctccctggccctctgtctccagccccaccacgcccgcctgcagagctcccttcttccctccacctgcccgacttccccatggcctctctacctgagcagaggccgctccctggtgaagttttctcctcctgcaggcagtccgcggcccttcctaccactctccagctgcctgcgtccatggagctcggtgccacactctgccctgcagcatggctgtgtcacctcttgggtaccacctgccaagacggcctgtcttcccacgggccgcaagctcctgctaggtcacaggccgggtctgcagattcgctccaccctctagggccagggcaggccaggcaggcagtagctgtgccaaggacactgaggaaaagagagcctgaaacctggacctcgacgccctttggacatcagctcaactctagcaagtagaccgtgtgccttggagatgtcatcccacaggctagaaagctccattctttcccatgtaagattagacgtccgtatttcaacttacttgaaacactagttggacgtgtgtaaagactatgagactcagtgccacagattaggacctgaatcaagttaggtctaaagatcactgggtcccagctagtggagacatctccatgatggacatcttgtgattgcatttgtctggttttcatggaaattcatattgtggagacatgtttatctattctctgcaagaaaaggtgaatacataaggcaataggcatttctagaacaaggcatgtacatttagtaagaatttcacaagcagagtaggtgaatgaaaaggtcctacctggaaggttttgtatttttttgttttgtttattattattacatcaacagctgtatttaatcacacaaatcctgtgtgcttttccttttttcctgcagtagaggaaatggaatagttgaagaggtatttttaggatggtttaagatccagcggctgctcctgtttgaaggcagctctggcatctagagttaaagctgctgcattgctcgtaacatacagtgatgttctgggcgcctggaagaacattaacacattcttgtctgctgatggactgaaaaaaaatttgatcaaaaaatagctctgggccggcgtggtggcttatgcctgtaatcccaggactttgggaggccaaggcaggcagatcacctgaagtcaggagtttgagatcagcctggccaacatggtgaaaccctgtctctactaaaaatacaaaaattagccgggcatggtcgtgggcgcctgtaatcccagctacttaggaggctgaggcaagagaatcacgtgagcctgagaggcagagattgcaatgagttgagatcatgccactgcactccagcctgggtgacagagtgagactccatctcaaaacaaacaaacaaacaaaaaaaaaaaaagttttgtttgcgaaaagaaaaagaaagtgcattctgtcattgtgaaactgctctcatcagaccaagcatcctctgtgctggaagagggggaacagagcaccctcaatttgaagcccctgctctgcagcgccccctgctgtcagggcactgagccgagcaatgctgattgtggtccaaaagatactggcatgaagggctgtgctgacattttacaaatagggataattattaggaccaatgaccttcctttcctgagcaattttaactgtaggccctcttatttttatttttgttttaattaaaacttttaaatgacatttttatattcagtaaaggatgcatgtgaaagtagatactgtcttagttgcccatttgagtgcagtgagttgataggcacatcaaaagactcttgacagttcagtcaccgactaaaattcggtaccatccacttggcgtcatctagttgtagcatcttatgaattaaatatctgggaaagtcaatgcatcgtcacatctacattttataacttcaggataatttaaggtgattcaagtaagatgagaggaagaaatgcagagagtcgttttagttaaaaattctttcaagtaaaatgttgtcacatagaggtagcatttttcttttttgtttcaacttttattttagatacagagggtacctgtgcatgttcattacacgggcatattgcacccaggtagtgaacacagtacccaagaggtatttctccaacccactcccctctctagtgtccacagtgtcgattgttcccatgtttatgtccctgtgtgctctatgtttagctcccacttacaagtaagaacatgtggtacaaagttttctgtccctgcattaattcatttaggtttgtggcctccagcaccatccatgttactgcaaatgacatgactttagactttattgtttttatggctgcatagtatcacagagtgtctatgtaccgcattttctttatctaatccaccactgatgggcgcctaggttgattctgtgcctctgctattgtgaagagcatggtgatgagcatacgagtgcatgtgtctttctggtacaacgatctattttcatttgggtaaatctcagtaacaggactgctgggtctaatggtagctctgttttaagtgctttgggaaaacttcaaactactgtccagtagctgaactaatttgcatttccaccaagaatgtataagtgttctcttttctccacagcctctccagcatctgctgtttttggctttttaataatagccattcagactggtatgagatgctgtctcactgtggttttgatttgcagttctctggtgattagtgatgttgagcattttatcacatggctgttggccacttgtatgtcttcttttgagaagtgtctgttcatgttctttgcccatttttaatggggttatttgtggtttgtttgttgaagtatttgttccttatagatgtcagatattaggcatttgtcatctgacatagtttgtgaatatcttctcctattctgtaggttatctgtctgctccgttgatagtttcttttgctgtgcagaagctcttttgtttaattaggtccctcttgtctatttttgtttttgttgcaattgcttttggagacctagtcaaaaaaaatatttgccaaggccagtgttgaaaagggtatttcctaggttttcttctcagatttttatagtttgacatcttacatttacatctttaatccatcttgttaatttttgtatatggcaaaagtatgggtctagtttcattcttctacaaatagctcagccattatcccagtaccatttccccactgcttgttctcattggccttatcaaagatcagatggttgtaggtgcgtggctttatttctgagtttcctattgtgttccattggtctgtgtgtctgcttttacaccagtaccaagctattttggttactgtagccttatcgtgtactttgaagtcaggtagagtgtaacctctggctttgttcattttgcttaggattgctttggctatttgggctcttttttgatttcatagaaattttagaatcattgtttttctaactctgtaaagaattacgttggtagtttgataggaatagaattgaatctgcagattgctttgggcagtatggccattttaacaatattgattcttccaattcatgaacatgagacatttttccatttatttgtgtcgtctctgatttctttcagcagtgttttgtagctctccttgtggacattgttcacctccttggtgagctgtgctcctaggtatttccttttctttgtggctactgtgaatgggattgcctgcttgattgatggtgagcctggatgttattggtgtatagagatgctggggtagcattttctaattgataagatactgaactctcccagacaaacacatcgttgatggcagtcgaggctctttgtggacgttgggcagcctcagtctccacatctgtgaagcaggcatgtggtagcatcttacagggtggtggaagtctagatgcaatcctgttggaggatgctgtgagcacagtgtagcaggagtcactgtgagaggggctcatgacgagaagtctctgggcgtcagcgggagctcctgccacacctccacacccacactcctgagcatcgccctcaccaacgctgagtgcaaggttgccagccgacctatgtcagctgccgttgtttgttgcattaacttgtgttattcctttaattttttttaggaattgaaattccctcatttcaaaacaaaagtgttattttttttaatttatgtgggcaatgtttttttttttcctaaaccagtggctagccctcactagtaaaaacaaaaccccatattattatttcatttctcctacaattattctactatttcttaacaaaattgtaaattatgtaaaatcacaacctttagttcatatccaaagtatcacaaactgcaaactggtttgtgacggttgcttagggtggatcaaggtgtgcactgcacagggcccgtgggggtgcccttacagcctctgctgtctccctctggttgactcctttgcagccccacggtggtctctctcaaaggccctggtgtgggccttgctcagaccagcagccactgcccaccccgccctgcactgctgggctccctagaggaggggcatcccaaagtagagagaagggaggggcacactgagggacactcagacacgcttctcagggacagctgtgccccaccagccatgggcccactctgagtggctttgctcattcagattagcaaaacacagtcataatatcaacagattactattgtatttcatgggttttgtgggtgcggatttgagcctctggctcatgcacaggaatctgggtgtaaagcggttacttgcttggggaattctctgtagcttttggcagaggctgagacgaagacagcctggccaactcccagcctgggcactgtcctcagtcttcctctgcagaggcctgtgcattacagaatcaccaataacacacctcttccccatgtcctgagagccttcagtcccaaaccaaaccttgtcaatgaggactccttcttttttccctttgtatccaaatccagggcaatttcttagcattgctcataatgaccgtatcagcaatgtgagaaagctttttgcttcacttagctttgttctcttcttcctctgtgggaaggagtccctggggaagcctggctccaggttcagagctgctgccgatggcacagaagacaccgcaggagccatgaccaactgcgaggtctccctttccttgtagcaacagacaaaaccatagtttccatcagaattaggcagcttggagctttgccgattaggactagggcagccctaagcaccaggagaacccgggctagagtgtctctagcctatcaccaagttctcccagctacactcacaacggtcccagggaagcaggcggggatctcttggggaagaaggtgcttcctaaagggaggggctcactgacggagggatttaggacatgggagagaccaggtccacctctgagtaactcttcactctgctggattccaagagaaatgtctggccatgcacaaatgaagtcctgtgacattaactggcagggataacaattagtaaagaaggacccatcggataaatcctggactgaaacattgtcatgtactaaaggagatttaaatagctctaacaaataacccttgcccctcagtgctggtttggctgttagtgagtgtggtggctcagaaaggattactgggcagtgggaatcgtgtcagtgagggtcagtgcagggaacagagaggccgtggctatgaaagaggcagctgcacacgtgccccgcgtgtctgccaccaccaagtggccactcaggtgtttcgacatttatcctgagcttattctctatgtgcatttccccgtttcactcccatggcctgtatcagaattctagaaaaaaaaggatgttggactcaccctatctggtctgcatgcccagccagaaatccacctcccaaagcacgtggtccccacaggcccagaaggtggctgccggggcccctctggctgaaaggaacagcccacctcttgacagataagggaccgcggatccaggttgggtcaccaaaagtgctcacgagccctcatgtgctgcggaggagccccactcacgcttagggcctcgactgggatttgactgggctggaattcccagtcacttccctacaccctgcggctcctaaaagctagccagccgtgtgtctgtctttcgagggaccaggtgaccgcctgtgctgggtgtgaggtgcagcctctccaacaggtcgatgaattatcctccagggcaaaaaaaaaaaaaaaaaggaaaaaggaaaaaagaagaaaaaagaaaggagccggaaagttttgttttgttttcgtttgcctgttgtttgttttctttacgcgtaagccccagcaccctgagggccgtcccacgcggctgtgtgtggctgaggccggggcgggcaggccctgccgtgtgctgtctgccgtgtgccctgcggccggggcctgagtcatccctgtccctgtctccccagcgaagcggtactgcaaggaccccagccccagcagcagcagcaccagcagctacgcgcccagcagcagcagcaacctgagctgcggcgggggcagcagcgccagcagcacgtgcagcaagagcagcttcgactacacgcacgacatggaggcggcccacatggcggccaccgccatcctcaacctgtccacgcgctgccgcgagatgccgcagaacctgagcaccaagccgcaggacctgtgcgccacgcgggtacgcgcgcctgggcaggtggagccacctggcgggtgggggaggccgggccgcggacccagccaccgagacacgcggcgctttcggggcagctgtatggggcaaacgccgtgatctcctaaaccattctcgccactgtgaacaattagtgcagcttcccttaacgcagcctgaacacaccattgtccaaagcgcatccattttctaaatcagaggcaagggtcagatcttgtagatgaacgtgcgtgaatggatccttctctccaggatccagaagcatttctgtaaacaaaggacaccacgtgggcctcctgtggtctccagtgaccgcacagagcatgcaaaacgaagcgtgggtctccttgaactttgacaggaagttctgctagcaccattgtcacgtgaaatgcagggatctgcctatggactcctgggtagcagggaaaggaagtaaaaatcagacttcacaccaagggatcagccgtgtatttacagccagcactcgtcagttccacattttcatggatgctatagtgctatgaaaggcataggaagagtgtctatttttaattttcttatcaattgaaccagtgcttatgctgggcaggagagagagcgtttaagatgcagcacagacctgggagacagctgcctcgccgaggccaccaggcggctggggagaaccaggcggtgccagggagcggtcagattgtgttctcagaggagacgctgagcagcggacatgttcacctcctctcctgataaacaaagggctctccactgtgtagcgctgcctggccatgtacctgagtggaccacactgacagtggttcttgtaaatatttgtagttggtatgaatgaagaaaggtcagtaatcttacgttttgcaaatgtttttttcttctatcagtatatttagtcctagatattggagaagagtcaggtgcatgcagttttcatggtgatcaaggttgcaaaaatgcaaggttagcatggaagagattctgtggcaaccacaaaaaaaataaaataaaaggcagagaccccttccaaattttgttgcactttcttaaaattaaactaagactgagagaataaatccaacattataaagcttaaattagtatcaaagcttcaaatcagagtacactttgacaaagagagttcaggcagaatgatactgtataatttatcaaggtaacagctccggggatggaggtctcattccaagcatcttccttctgctgttgcatccagaggagagagctgctagacccttgaggaggcagcagctttcagaccagctctgaaatcaaattttgctaaggagagtgtcactctttggggaaaaacatgcaggattgttaggggtattctgattttttttttttaactttctgtccatgtgtccattcttctgactctcttcctgagaggcaagtgctgcagaattattgatgcatttcaaagcatcatttaaaaaatgaaagagcctcaccctgtacctctttggggtttttttttaagccagtagactaaattgcaggtttgctgaaatctagagatcagacggtaatcactgtagtaaaggtatttttagctacaactgcagatcttctttcgtaaagtggaaaattatcttcattataaaagttcttattacagccaggcgcagtggctcacacctgtaatctcagcactttgaggggctgaggcggctggatcacttgaggtcaggagtttgagaccagcctggccaacatatagtgaaaccccatctctactaaaaaatacaaaaattagttgggcatggtggtgcaaacctgcagtcccagctacttgggaagctgagacaggagaattgcttgaacctgggaggtggaggttgcagtgagcccaggtcgtgccactgcactccagcctggataccagagcaagactctgtccctcaaaaaaaaaaaaaaaattgtattacaaggtaaattttagtttattctctttccttccttcatccttctaattcttttgttatcctcctccctaattcttgaactattagcatcaataaaaaagagaatttttaagctgatatatgtgtgtttatacacacacacacatgcacatacatgtatatgcacacatgcatacacacaaaatttttatctcttaggtatttgcaacggtaataaaattaaaattaagcactttgtaattttcttctgaacaaactctaaatcagagatacaataggacaaaaaggaaggagagagagaggatagacagtagataaatagggaaatggagggagggagggagagagggatggcgggatggatgcctggattctccaaccaattttgcagctaagcgtgggatagcaggaatgtaccaccagacaaggcctgtccgccttgggagtttaggccaaggaaacagcagcgagggattctgtgttgaacgctacactggctgacggcaggactgtaatctgggaggaaggactcgtggtgtcacaagatgccgggccaagcacagtcactatgtctttctaccgacagaaccctgacatggaggtggatgagaacgggaccctggacctcagcatgaacaagcagaggccgcgggacagctgctgccccatcctgacccctctggagcccatgtccccccagcagcaggcagtgatgaacaaccggtgtttccagctgggcgagggcgactgctgggacttgcccgtagactacaccaaaatgaaaccccggaggatagacgaggacgagtccaaagacattactgtatgtccttttcattgagcctgtgttgactgccagacttaaaaatggggccccagctgaaagaaaagccatttgcacatacgttatgagaaaatatattttctctttaaatatgacctttagctgaggaggacttagaaaacagtttttgttgacccagaagagatttgcgactaacattgattagagtgaaacaaagtattgactcttgtaaatgataaagtttattttctaacaaatatgttttgttacaaatgattactctaagaaaacgtataaatagcacctgagttcatttttctgggtgtcctgttgaaacaatacaggattttccttgcaggtagagaattctaataggagtcttagatagttaaatggttaactatgtgctattaattaactagcccttcgaaactaaggacagtgtcccttctctaagaaacctaagtactcaaaagagtttagccttgaataaactattttagtaccatcacctaagtctttgtttatgacagtattactaaaacatctatgtcaagaacatacttttgaagtagctacagtgttcaaattcaggttattaaaatagatataatgccctttaggctttgaaaagaaataaagaaaaatgttttctttatgtaccgactttaaagtcttatgacatcttctttcttcactgaaaaatgaaatgtgtttttagtacaatagagagaccaccatcgaagcactagtgtcttacagaaacaaggaaatggaaaaaaaagaaatattagccccatgtagaaattggcagagagggcacctgcttataagcctattatctgcattcttcaaattgatttcaatatccaggcattgtgaaaaagaaccaaatcagagtggcaagctaaatttctaagtatttttttctcccgcagtgttgaatcattactaccaaataaggcatggtggttgaatctccaaattcattttaattgaaagtaagccctcctaaaatgacagaagtgttttcatcctggatcatcatggaagacaaaccttcccatgtatctacacttaggaaagtgtctgctgagcattgccacctgtagaaacatctacgttactgcagttgaacacacaagggaaaaggaaatttacagttacattcctctaaattggtctccattaccttgaatcttaaagcatgtgcttgtaaaatactgaccaatggtgggggaaagctcagccctaagacactgtagttccagtgttgaatctttgcaggcaagtgttggataaagcagccacccacaggtgtgtgctgaatgctggatgaggaagaccaagttaaatgtagtctctggctaccagaccgtgtgtgtgtccatgtgatgagcacagccaggtgaatattgaataagggccctgaccactgacaggtgaccatcattttaggagtttagagcagtggaagaaaagttcaatatgcattttcagtaggggcgttatcaggaccaaaaggatcttaaaggtacagcagaaagaggtgtaagatgtagaggccaccccagagccacgaaccacctccctcagtctgtgtgccatgtgatcatccgtgtggctctgaagctgtgttttgcccacagccagaagacttggacccattccaggaggctctagaagaaagacggtatcccggggaggtgaccatcccaagtcccaaacccaagtaccctcagtgcaaggagagcaaaaaggacttaataacgtaagcatgctgtgaggtgaaattatgaatcttcttaatcttcccattctttggctgattttttaaaactggatctgtatatgccttgccgtttgagcatgcgacattcgcagcatataaatgtttccgactgctgggtcagtagagtgagcagctaaccgtgcacttgcctgttcccagtgacgctctgtcggatgggggcgtcattttcatttaacccgtgcattttgccgcttttcttcagggtgcttaaatccccttgcagacattgcagctaaactggaaacaatgaaacttttttaaaagttttttttttttttaaacatacttactattttggctgtttttgtttttgtttggtggcagatgtccaactccagggtgtgatgggagtggtcatgtgactggtaattacgcctcacacagaaggtgtgacttcatttttctcatggtggattctgtcttttcaatttattgttttcagcttacctcaacaatgctgtcaaagtaaaaatgttgaattctgtgtcaaccctttaagtgctatatgttgaccttcaaaagcatgctaatttatgtgttgtataatgtcttttattttcaaataaacgacctaaatttgtaaaattcttcttaagcatttaagccaaagagcacaaatgttttatcttatttttaaacaattgcttattaagaaatattttcttaaatttatattcgaaccgattcagaattaattacacaaaaaaaaattcaatatacagcacttgcccattgcttttctgcattaaactctttaatttcggtttttatgttgtgtttgtttgggagttacgcgcttcgcagttgactgacctgcctgtcccggcctgtcttacagtctgtctggctgccccctggcggacaaaagcattcgaagtatgctggccaccagctcccaagaactcaagtaagatttaatgacaataattctcttttaaaaatccatgcactcagtagttcacaaaaaaaaatgatatgtcatttgcaaagaaaaatgtctgttaaaaaacatggcctgtgcaccccagtgccttgatgtagacatgggattgaatcctcggaatttcagccacttttccacacaacccattctgccttttcccctgacatacctccagcttgttcatatcatatccttcctatctgggatatcctaaagcatgggtgttttctcttcagatatgcatgcatatggaagggaaattttacagttactcaaatttttagaaaatgactgtaaataatcaaaatttaatttttaaaagaaattcatagcagtatttacaatatggatacttaaatagcacttatgacaaaatctaccatcataatagctaatttcttaaatacactgtggtcttagtcatgaatactctttaggacagtgacaactcacggttcggggatccggagagtcatggaattcaaccagacacacatcattctagagttttacctccctcttctctatgcctataatttttaagcataaatctggcaaattggtgaaatacctacatttatactgcaacactgagattttcctccttcacatagacatctctagatgtaggtccagacaggtttggaagaagtgggtagaagtcacagggggagtctcaaagcctccgcaatccggggagagcatacgtgcaggtgcacacagggaaagagggtgagacctgggagatgctcacagcgagatgagagccaggagtccccagataatcgatttaaattatcggacaggccatatcattatgtcaaattgcttggttttccttttgtttggaaaaagcgttatccaggcaaagataatgctgcttttcaacccacatttgatctctttcccaatcatcccaccccacctcggcatccgaggaccctgacgatagaccaggactattgcaaagtgtaggcttctatttcacacccatgtcatcttttacaggatccctgtccaaggccctagggccctagatcacctgcttatgttcagtgacttcctgaactagctctttcgccacaagacccttggaactttcttcatggaatgtaaacgcctggagggcttcctcttacctaacggctgtaaagtctgtagcctcatccaaaacagtgcctcatggaaaagtagatttaggatctcaaaacggacagcattagcaagagcagttcaacccactttgttcaggcgtcttttgtatggctcgaaaccacatttccctcatggtcaaaacatgactaactccacttggaacttggccaatacatcagaacatggcagcattcctttgaatttcttgatgagggacactttgccaaagattggcacatctccagttccaacaggccagctgtagacaggaaaacagcctctgtaaaagttgcttctagtgttgcctctaactggtcagagactgcagggattcgttttctttggcttgcatcccttcacgttgggcttggcggcttatgttgatttgaaattccgagccaacttgctgtttctccagcatcggcactttcttcttctcttacttcatcttgcaagatggtgtgacggtccccacctttagcattttccgagggagccggttagctcttcatgccttccagggcagggtgcgcatgggcagcccctccttcctgtcttgtcctggaggggagactgtatcttacaggaggtggatggccttttgctaattttggttgatcgaaaagccacacatgtgtctaaacctatctttgcaaaaagtcaatcctattctgatagagcctttctgggaaatctgaacttgactgaatttcttaaattgtccctttctatgaatggatcttcaaaactaagaatttcaatcaagcatcttctataaaaacactaatgtttcaatgaccaaatgttgcttcatggtataaccacatgttataatttctttgctttaaccttgtaattggtgaccccttttatctgttacttgttggatctgggtcagcaagatctgttgagtgggtctctcaagcccaggagcatggactgagcccctcatgactcgcaacaactttctttagaataattcccgcatgagtccttttttatattctttgtgtatattttcaagggtttggttaatttgtcctgcagcagcatcgtccctgattaacatcgtgatattaagccattcactgtgtcctgtaacagtctctaatcgttcataaacacatagtagaaagtgggccccaattacccccaaaattattctctacaatacatgtcagctaacaaatggaactttctggaaattttcttcttgtcacttccaacactgaattgtgatatttggcctttaacaggacattcttgatcatggacaaaacaaattttccagataaactctcgctcttggatcctctaagctcttaaacttcctgagataacactttgcctggtcttacccaaagcagcaaacatgggacgttttgaaaagaaaatccatcacttcattgtctaattatgtataatatgtaaactgaaactggattaaaatttaacgtgcacctgaatcttactccaactctgggactgttgctttctttgctccctagcccatctggtgtgtcgaagacatagttcagaggctcagaagtcagggaggaagcccccagggtaaaagggacacttcgaggaggcagacggaggagggacacccagttccgaaagcctctgtgcctggcagacttttgcgcgtcgatgctttgaggtggagttcaccgtcaccttgtatgccctttctaggagtcgacctcacagggtcaccgtgagccctgcctggctgtgacgttcactgagaccacaggccaaaaagcgaaaaagaatacatttgtgcaaattagagttttggggggtgagaactctgcccaccatgagctctgattctcagaaaagtttcttctcgtgacatttcatttgctaggattccctgaaagaaacagcaggaaagagcttgcaaaacctatcagagctggtcagccttttctttttctttttcattttcttaaggaaccatattctcccagccaggaattatgtttttctgcttccagatatgtgtgccgttgttgacatgggcatggtgtaggtatgaccaatgtgagccaaatacaaactcatttcgatcacagagaattggctcttaagaggagccaacaaataggcttccattgatgcttcggttggccaaattaagattcctccttattatccatgcctttatcttataataccacgagtcccgacattagtgtaactccttgtaggaaaaagaaccttgggacacttgttagttttcctgatgtctcagcctggactgagtcatcacggcagtgagcagattgtacttttggtcccttggccttgcgatggtcccgtacgcgcagtagtccctaggcttgtatcctaggcattttcagcttgagcatacaggaattttagccacatctaacacatctttttaacctggttacatgcattttaaaatacatcataaatcaaagaattaacattttgaatgtaggtcaagatgttgctttttgctaaggctacttatttctagaccatcccgaggcttagattctccactgtaaacttaatgcaggcacagggagattatttaccaggctctcctggagggagatgtgagctttgctcaccccacagcttccattgttcgggtgcaggaaggtcatccgctttgactgctcaccaagttcttaggaataatcctcatttcggtaatcttttgctttcacagtttacaatagtcaatccacagaactctgtgaattacaactgccctcggctggggtctggtttctttaccaggaggccgtatttccttatcaggggaatgagttgacctctgtgtaaattcagctcttttaggacagaaagctgtgtgatttcagcctccacattgggaggagagctaatgtgtgatctcccacttcgaagcttgctcctgtagcacccttgtttctgttataaagaattgaaccattcggcagctgacttggctcacccgagagcacccgggtgcacgtgatcagccatgcgcgtgaatgggaatgtctcgggggagaagaggtgatggcctggggtttctcgggtgtgggtcactcccgtgcatagcgtccactggggctccagcaagcacggcccagggcacggggattgagctcctgccccagagccttccccagatctgtggtggtacccgcttgtgctgaaatactgcaggcttgtagggtgcctgacaatggacaaaatgcttctgcacagactgtcaccttcgtgaggaaagcggggaaggggtgcttagacccattttacggatgtgagaactgaggaacaggtggttggactgcccagttgagatgtagagacaatcgactgcaaggacaaagcctgtctcagaagctttcccacgcttcatgcctgctcctcaaaatcagggcaaagcccgagctcagaatcttccccacgcttcatgcctgctcctcaatcattaataacaccaccttcagtgtgctgctttgtgattgagaattaaaggtttacatttagcgatgactacagccatacacatgcacacacacacagagaatttatttttatttccacacttggccttgtgcagtttccctgtgacccgcacagggagctgagctgagacccgcccagtggtggccacctccccagcactgtgccacatccctggtggaaagctgacacgcccactcctcacaatcagctgaatgcattttcaacttgctcctccagggacccagtgctaccatttacattttcacatctgcaaatggtttataaagtttgcactacggcatttacaaaaaaaatcctacaaaatacagcctattggagttttattttatcataatgagtaggagaaattaaaatataggaaatacaattaagcataatacagtaaaacttctaaaacaagaatgtttcaaaatgacttcagacacacacacacacacacacacacacacacacacacacacacacacgaacctgcaaaccaacaataaaccacccaggtcttggttcacggagtttcttgttgagggaagatgagccagaaatgcctcggtctttccttctgtttctcaagtccactgtcagggcgagcccagcagcaggagcctccctaggcccagtggaagaggctacaagtggggagggtccctgctgcgaatctttcttcctgcctcctcctcctctcacagtaagcctgagacctggattattaagggagggacccaggcattggggtttgggctgaatctgacttcttttaactaactatactgacgcacaagccagccaaaaacaaaacaaccaccacatcgagaacctttagtgttcagctttttaaagggcttgatgaaacattcctaaagttctccagcaatatttgaaacgcagtgcaggtccgtctgtttatgcctcgccattgtcttggttttgatgaagaaaatattaaaattcactgagtaaaaactcagacttgggtaatacaaggaggcaagaggtggcaggatcagaggccagtggccaagatgctctgcttttcatggagaggttctttgtgcaaaagaaaacgcagaccatgggttttccagtcattggagatcactgtcaatctccctgtgcctcagtttccttccctgtgaagcgggacagtactggtagcaagcacacacctgacattcaatacctgttaccactgacaacaactgtgtacaaaaatccccacaaaatgaaacttttccatttttcatttatatttcattattcattcttctgaaaactaaatgaaacatgctgcatgtagacctgactgccccatctacagtcagttaagaaaataaagtctcatttaaaagtgttctagctactcaggaggctgaggcacaagaatcactggaacccgggaggcagaggtcgcagtgagccgagatcgcgccactgcactccagcctgtgtgacagagtgagagtctgtctcgaaaagtaaaaataaaaagagctttctccatcttaccttacctcattcattgctcaggccaagaatgtttttacctttgcagcctacactttggcagcgtcagcatattgtttgctgaagagagggtggcttctactgacattttattttatctttaatttgccatatttaccggcttcttgaccaaattgatctgtttgccttaagccatctaaaaggcagttttcaaggatggtggcttgattgaactcagaggtagggagctcgactctcccagggaattaaggtaaattcctaactgttcactgaagctggctttgtgatgtttttggtttttattgtgacaaattttggaacattttaaattcagaagaaaatcatgaggaagatttttaatgaaatgtttcttagcattccattctttcatttcaaaattatgaaacatttaatacaaacatcagaaactactgaattgtattgcatactttcaaacaaaaatcatgtcatcaaatcaaatgtaaaataatgcatcttatacaacctatttcaaaaatttttaaatacattgattttttaacttccggatgactttttaatatatacagtattcctgtcacacatgaacagaaggaagaatttattgtccttataattgtaagtactgaagttttaaagttatttaaaatatatatacacatatattactaaactataaatatatattattactttgcacacacacattttttgttattttttggtctaggtttcaaagatggacacatttcctttcatgagacatgttacattgtttgaggtctcttcatatttcacacctaattaaatttggcctcttctaatttggaggaattctgggctcctctggagtggctctgagaagtgagctttcttggacttcatgggcccccacatctgactctgggcagcaagaaggatgagaagccagcactctgtgatgggagagtctagtcagaatgaggaggttatgttgtcctttaattgtacatctgaggttttaatctagtaaacacttcactaatttatagttccctggagcaaaatgaatgaaattggaaataaagtagatgctccctttgggaaatgattgacaaggatttgggatttcctggccatttcaggagagactcgttctctcccaggcgctttcttgagtgaaaggctttgaaggaactcaagggccgttgggtgcacaggggccggggaagcaggaaagctcacagccacgtctgcaatttcaacctattgctgtgctctctcttacatgtgatctgtggccttccaggggtggtgactcagggaaattacttctcttctcttctcttgtattgtttttttgcatttttacagaaagaggtttgtttctgacactagtcaattccatttaatgacattttaaaagtccctaggttctacaggtgattacatgtttctattcatgaatgagagatggagacatctcgtctacctccaaagagaaattgagaatattataagaatgtaaagaggttggacatcccacacttacctgatgtttttaagaaaaagctttctaataattaaaataaaatgtgacttggttatggaaatgagagcctgaaatgcccgatggagctttctgggatgaagttgcctgttctgtgctgtcccacatgaaagtcacaagctgcttgaatgaggctgccgtggctaaggaagtgcattcttgatcgtatttcatcttcattaattcaaacttaaatgcccacatacaccaagcaggtgtacacactggacagtgcccaagagaaccttacacttattttatattgttctttgtgtggtttttactacacaaagaacaagagaaattatcttaattctaattagaattacattctaacaaacgtgtaggaatattccatttctgaaactgaacagtttatattttttaagcatctggcttatactactaagccactgacaaacagtttaataattttttattaatatactggtatctttttttgtttaatgcagtttgtagacagattaaatgtgaagtaaatgtcagtgttaccattttcagaatggaatacctgcaagctgcacggtgagatgagtgcaaacctcactgtttgggacgagcactggggcagcactcaatagaagttactggaaagactcagttacactattgtgaaaaaccatgcaacttgattactttcaagcatgggcagaaattcacatttagttaatcaggtgttatcaaagagagggccacaggccacctccttcagtgactaaataaacccgacgtaattaacacatacatggctaataattggggccttcaagttcttggaagcctgtttccacctgtatcttcgatatttctctcccaagcttgctgatgcattaattagcactacctgcagagaaaagcttagtccacggagggggaccccagcacttccctggtcccagttagttttcatgttgaattaggaagatgtcattatcatgcattttttttttctacaatttaggatacaaacaggtgacctattttaggcaatttttggtctcagagccaactgagagcaagcagagttcagcagaactgctcacagccatggccgcgcccggaacccctgcctgtcccagcacaggcgtgcgagcagccaggtcccattcctcagctctcaccgttcatgtccctctcccttggccaagtgctgatggcgttcatcatgcactcttactgaacaaggataaaaaatctacctgatatataaaagcacctgcttctggcacaaatgcatcctcttagcaaaggggagaaaatatcagtcgagcaaggaagtttttcaatgactttttggacataaacctaatataagctcaaaaaattgagaaagaaaagacttggaaaaaagaaaaaatatgtataaactcaccactctcacagatatgtttgcatttttgtgcaatcacaatgtgattgaaacctgcttttctgcttagcatataagtcatatatcttatttttaatcgctgcatcatatttcggggaaaatgtgtttttgcagcttccatcatagccaacaagtgataaaagtctccagcaccaggaatccaggcattctgaagcctgtgttctccatgagggctccttcctcacctatgcagctgcaaccacgggggtctccccagagctagggtgatgataggcagagcttagatgctgaagggctttgcggagtgggtttttctgctgcagggttataatttatcctacagaaccacggactgactgtgtggtgttctctgagctgtggtcctcccgtgggaccctggtcataaggagactcagcttgagtctccagcagggtgagcaagccatgtctgcgtcctcccctggtctgacatttggggagacggcggacacatagtcccagcatgcttagaagacatcgggatgccagcagaggaggggcagggagaaagttctagagcagcagagctgcataggcatcagatcacctgaggtcactggtcttggcaggactttagttctgtcctgagtgagacgttgcttctcaaatctccccgatgtcttgcagttagaggccagtccggagccctggcagtggggtgcagggctgggatgggaggcagcaggtgctgaggtttcaatggcggcacgcatagggtcagctgcggggactcagtgtgggcgaacagcatccaggagagtcacccagaggtccactctggccacgggccatggggaaaggttgccggggtgaggggtaggcgcgggctcaggagccccagatggacgggggggtcagggtccctgcaggagctgtgtggagagtggaggagagggatgtcgtgcatgtgtgggggtgctctgggggcctgttctcaggctggactcggagtcctgggcacggatggcacgaaggccacgcgtggacgcatcaccaggcagtaggtgttgacagacgaggatgccaagacccaccccttctcactctcccagactctggggctcaggcccacgccctgagtctgttgccacccccagcgagaggggcccacagaatccgattttctgggaattaaaataactacaaaatttggaaattccatcacaaagatttcttctccaaatgtgctactcacctgagagtacagcattcccctgcacatcactgaaaatacccgggaatcaggcggccaaagagactttcaatatcactgcagccctcaacctcaccgcagatgtgcacgtggacagaactgtactccagaaacccgaagtgtacatctttgttaagatataactactggggattatttaaataagattaaataatgcgtttttcctgtaacacatgaacagagagataggggcccactttcaagggtagagaagttcaccagcacagctgcactaagagtgcagagccctggggtgggagagggagcagcgagttaattcttcctcactggacccttgaacaaagcaggccgaggcttaggtgtggcatcactaggtcaagaaagaatcggaatgaaggtcttctagaggagatttctttcctggcaataatctgattatcaaacacgatctgcttccgctcatcgatccccggacatccacccttagtaaagtctggttgcctcctggcccagtgcttggggacagagacagaacggcagtgaggccgggagggaaactgaggcactcgccttctcctcagagaactgctttgattttgccttgaacaggaaggatgggacacattcagagatgtgcgaagtatttcaccacaaggcttgaagagagcgtaaggaatctgaaaatgtatatttctgtattcttaaagcaaccatttaaaatgtatgcatgtctcttggtgcaaggaccacgtcacgcccttccctcttggcccttggcaaggcaggcacactctcttgaaatggacttccttggcctccctgttttctgaaatccaggctgttcacccaggcccaacaccagcacaatgtgcgactctctaaaggtccagtttcccgcctcaggatgtcactgtgacctttccccgcagcgatcgcactcaccccggcagctctatgctcagtcagtatcttccgcctgcgccggaacatagaagccttggggtaggacgccaggcttccagatttgagcctctccctgatggcgcccctcagcacatgttgcccattgtttaaaatccaggcctttaagtaaaaaagctaatgaataaatgagaatatacttatctgcaccaaacagctctgtgaggaacgcaaggactctggagggaggaccacggatgggccagcagacgggccgccaggtgacctcagaaaggaggctgcctgtccaagctccgggctcttccttagtgaggggaggggctggcaagattgtcagaagttcacgcgagcctgaaaatcccgttgccctaggtggaaatggggcaggaggatggctgaggccagcatgtcacctttccatgaggacagctgtaagactggctgctggagttgcctgcaagtgggatcaggttgcagcatcacatggaggtggcaaacggcacgggcagagggacgtggctccctctggctctgccaccctgtgtccgacatcatcacctgcagcagggcctcagacgggggagcaggtgatggaggaaggacatccggcccagccgctggaccacaggttggtggaagccacatcattgcccattaggtacgcctggctgccccccatcatgccctgagcccacatggcccgtccacggccctccccacagcaggggagaggatcccagggtgcagctgagagataagtctggccagtgctaaagaaagtcagcagagtttgacaatcttaaccaacgtgaaaacacttaataaaataaggaaaacacagcacttttccccctgttacattagcttgtcttcacaaagcaggtgaccttccgtgcccatttcacagatggggaacctgaggcttcttgtggagaaatgacttgtatctttcctttgaaactcatattcacctcctacatttaaaattcatcttgggggaaaaaaaaaaaagagcgtttcctgttttccacacctgggttgtttgtggagggaaaggagaagaatattgggttgctgagaacatgggcattcatctcaggccggcacgcaaacccctggatctgtgtcctggctgccctctccttgccctctccctgtccttcccccgactgtagatttcctgtcactttcttcgtgccctgtcccatagaatccagtatctttgaccatccctcatagagtccggtatctttgaccatccctctccacccctctccatctgggtggtggtcattagatggaagacactgagccatcagaactcatcaggtgctgaattttcaggccaaatagctttgagtgtattctactctttagaacttgtctactctcaggaagtcaagatctatttgtcgagtttttctattcttattcctttgtttgttttatgttaaatctgtcatgttttcagctgaagctcacaggtgagggtcagagctctctgagcgctccccagcaggccagcaccctgagtctgggattggggctttctgtgcacccagaatggtgcctgatgcctgccagatgctgaacaaatcatcagtgaatttaattgaagcaaaaatctcagtcattcttattaatgctggcatttcaggagggcatctgtagcaattacaatgccatgtgcctgactgagtttgggttcaatcagctcttactatcaaataacatggcagtgacttgtggcctctccatgtacagcctcggaggcgctggcatctctctaagtatttctcatttttttctcatatcatgacaagagtttttgtcattgaaaaatgtctgcctttagcttttaattcccagggatatcaaatggagtaagattttaggtaaaataaaaatagtttaacatttgtttttaattttattatatttgagatccactattttctgtaaaaatgtatatattttaaaatatagtctgaatatttaaattgcattgataaagtttccttaaaggcctggaaacatttgaaaacctgggagggtctcaaaacatgctgtgaggccatgaccctggagagcggaccctctctccacccgtcagcagcacctgtgatttctatggcccctctgcaaaggccaaggcaggaggcaggagctggggcagtgattatgagcacagccttcaaagccagactgctggcttcactccctggcttggccacccacaggctgtgtgatcctcagcaagttgcttaacctctgttttccccatctacacagtgaggatcatgctggcccctacctgagaggtcatgattataaaattaaatgggctcatgtttgtaacgtgcttagaatagcacctggtggtgcccaaaataagctgtataagcatttattacagaaaagaattaaatcccagaaaagacaggtaagaaccagcccatgaatggcctggagttttgagactctgtggaggagggagggcatgtcagaaaaaagaggacaaagataattaacaaactaaaatttatcccacttccagcaaggaatgaaataaaacttcttatacttgaaattccaacaaccaagatcaaaatatttcaaagataaaagaattccatttttcgaatatatctttgccttattctaatatggtacaatttaaaaatattcagacttgtagatcaggctgaaaatcatcaaataaaaatgttgaccagcccacaagcccatggctgatctagtccacaccgctgccttctccctgtcctcaccactttccaaattctaaaccattttcctagctggcatattttggtcgtcttattctctgtcatttctttatttttcaaactgccttaattctggcttcagttctacctttcgttggatgacatgtgtgtgagggtgagaacgtgatggaaacggaggcacttttcatgccctggtggatgactgggggtcggaacatagctctccgagacaatgatggagacatccagaaatctcctcccttctgtttcccgttcatgtagattccaagccagaccagtccccaggcttcttggggcagcctcttttacagaagattagacttccacttccccaggtacacactagctccaccttcatgcggctgcaccagcatcaccttgatcagttacccatcaagtacaatgcgaggtgctccattgtctctacgaataatgcagctcatacaatgcgcctcctccagaatccatgtggcgcttccgagtttcatgtctcagcgatgacctctgttgcagcttcagcttggatggtcacctcttactatcagtgataacaattttggtttgaatcctgagctctcttatccatgctagtggcatcttatacttgcaaactcttcacttctttcagaatgttgtgttatcatttgacccacacaagaattttttcaacacatacttgtttaagccattcttattgtgccaggccctgaagaggctgaggactgaggtggcctgagagcctggggagcagctgggccgggcatctgccctgtgagatgaggggaggggcacagggaccctcgatccagacccttcacccctctagccacctgggcttctgcaagtcaattcaactttctgagcttcagttttcttatctagaaaaagcaacaataccctctgccctccggcttcactggactcatgtggggtcccacaggggcacgctgtgtccagctctctgcagaggactgcggctgcagggcatgaattggtatcccggttctccaggccagggaactgaggagcagagataggaggggccctcccggaattctccagcagcggcggcttccagccaggtctggaggcaaatcttcccacagagtcccctccatcagcgcacggagacacgtgatcttggcacacagagatttccgtagcacttcaagggttaaattagttgcctaagagtagaggttttactttagacatgtaaagtcacttgattttcaatccatcagaatcatgactttctgtgttagcagactctggaaaccaggaagggccacggattagaccgactctcagacccagctgcccctcctcagcttcttctgtctcacctgcatttcctgtccctttcctctccctctgcggggaatttgtgatccatttaaaattgttcgtggatcccgtgcaccagcacacagccccagcctagggcagggcgggtaaagcagaagaccagtgagaaacggatggtccagatgcccagtgggcagctcgcagagctgggtctccacacactgcaacctgcttccacacgtaggacactttagcagtaactttcagaaatgaatattgtacttccattaaaattgtaatgctgcttttcacagagacaagatttcaacccaatcttccgtaactggagtagcaaacaatgttgattaacatttttcagtgtgccataggctctgacaaatcacataaagagaaaacacagatcgtgtaaaatgtcccttttggagttctgcctacaacagcatgattcagagttcacgatggacttgcctggccaggtcttgtctacaggagaagaggaaaattctttccaaatgaggtctttggcccaaaatcaccaactgaaaagagacccctggtcactgaggcaagactgggccatttccacaagctcctagtgccagcagaccgaccctctatggccacctcaaccctatcctgtcctgctgtgtgtttgagaagtttccaggctgctgctctctggggcagagtcattcatgacctttccatagccacacagaacagggagggagctgaggaaggagaatgccagggaaagacctatcccccagcaccaagcaggctagaagtcctggactgagccttcagatcagcgtaatgggacagagagcttgaggactcctccccaaatccatgcagcttgggtgcactttggatttctgccaaagcaacaagctttctctgcaccgtgaaatgatttcaatgaatagtttcaatgcagaaattctcattactagagtcagcatcttcatgagtcaccatcagaactgacatcatgcaacaggtagaggagaagaatgccctctgagttcgacttctcggctctgaaaaatcgtctgacaaccctgatggctcatcaaccttacaaatggtcaatttttcaatgcaatggatgaaggctgtttatttttaatgtcgtttgaatttaaagcacttattaggtgactagcttgtttcctggtatggaaattggagatctgtgtggtatagtgagcagacactggccccagattcaaacagccttgggagctcctggcttgccacttgctgggaaacctgaacttagtacttggttttcttcaaacctcaacttctttctgaaactgggataatgataataatcatcttccaagtctaagatgaggactaacttagatgagttagcctgtaagtgcctgatactgtgtctggcaaaccgtaggtaatcactagataccacagaccagaacagagagaaacggcagcatgaagtcctgcctgcctcatcaccattccttccaccttagaactaaatgcttctccccgaaaccagggcgttctcatcatcttggagcctgtgaagtgtgtagggcacggagtcccatctctgttacaccgaccacatgcaggcacacacacaggctcacgcacatgcgtgcaccggcaccgtgcacaggacaaggagcctccagggaatgcagctggctactggggaggacttggagtgccaggtctcatgagacccccaactcagtgcccttcccaaccggctgcgccatcgtccctgaaccactttcttagatgaaatgtccagggcagttggacaacacaacccaggtccaggactgtgtgctttgtctctggtggaggtacagtggcacgtggaaaagaggataagtccgggactgtgtgctttgtctctggtggaggtacagtggcacgtggaaaagaggattgcagctaacacgtgattctggtttctgttttgactgtgcatggaccggtgaggcacagaccatgccctggtggccatgccaggaggcagtcctggctgaagctctagcacccatggcctgcggaagctcagtgacagctggtgtgtgttccaaaggttcctgggctgtatatccttatctctgctgagggctggttaagctgaacctggtgtcactgagaggccttcccctctcccgggagcccactcccatggccaccacacctgagggcatctcccctccctcctcggtgcctggcagcgctgcagtcaaggagctgatccaggctctcaggtttcctgcacacggtagaaccagcctgcaccgcagggaggaggggggaggagggagcctagcaaccgtgtctccatagcaacgctcgtctgcatcccccctgcctctcagccccagggcaggcccacgagtgccagagaaggggggcacagagaaggcagcctgaggaatggacccccttcccttcctaagccttcaaagagccttcctccctggctggggacgcctgccctgccttcggggccggggagagggggctctggagacctgctccttgccagtgctgataagacaggaaaattaaaaaccactgcaagcctctcatcctctaagatccttcccaattatcaagggtttcttccttccttccttccttcctcttctagaaaatcattcctattctttctttatagcttacataacaacagatcatttttaaaaggagattctttgcctaagaagcacatttttgatattatgcaagtgcaggttctatgaaaatacactctgagacagacacatttttaaatgattttcttaaacatcagagccaaggccgggcgcggtggctcacacctgtaatcccagcactttgggaggccaaggcgggcagatcacctgaggtcaggagttcaaaaccagcctggccaacctggtgaaaccccatctttactaaaaatgcaaaaattgggcatggtggtgcacgcctgtagtcccagctacttgggaggctgaggcaggggaatcacctgaacccaggaggcggaggtagcagtgagccaagatcacgccactgcactccagcctggtgacagagcaggactctgtcaaaaaaaaaagaaagaaaagcatagagccaaagttgcttcccattgaaggtttactaaataaagatagatatttctaacatgaaatttgccacagtcagcagccccaccctcccgccataagatgttcttttatttggaacagttttggggaaacaaattaatggagaatagctaatgtaatgaaggtaatgtgtgaacaatgaccttcatctacatattcacattaatgagcatatctatatctaatcggcaaactttcattgcatccagactgccatgagggggaattgcagacagaggcatatgcagcctccatcctctctggaggagagccagagagcgccccgaggtcccccacccccagaaacctgtggacgtggctgccaggaccactcttggcatctgccattcactgacttgactttctcctaatcctcctctgacagatgagcttcctctccccagccagaggcaaggaacacccttgagactgaagttgaggactttggattcaagttggtgattagtagtgcaggaaaacctgccagacgtctgaacccaacctccagggacgagacatgggataggcaggaggcaagggcgctgtggggcaccggggtgagagccaagacaatggggcctctgaaagatgctcatagcctgagtcctgtgtgcgaccctcggtttacttcccagcaagggtgaccctcggttcatttccagcaaggccccccttcatccacaccttcgcccaaggtctccctgacaggcgccctcaccccacacccttttctccactcagtgacttcctggggctgaagctgcttccctggcactgctgcactctgtgcttgctgtgagcaagactctgtctctctccctccgtctctctttctctctctctcccttcctccctccctctctcccccaaccctctctccctggctgcccctctccctctctcccccatccctctctagctgcctgctttactctctctctctctctctctcctccctctctctctctttctgtttctctctccctgcctttccccaccctctcactctctgcctgcctctgtctctcaccctttccctctctctttctctgcccatctctctctgccctccctctctgacggcctctctctctccccctccctctctctctccccccttctctgcctctctctctccccctccctctctctctctgcctctctccccctccctctctctctgcctctctctctccctccctctctgcctctctctctccctccctctccctctctctctgcctctctctctccctccctctccctctctctctgtctctctctctccctccctctccctctgcctctctctctccccctccctctccctctctctctgcctgcctctctctctctccccttccctctccctctctccttgcctctctctctcctcccaactctctctctccccttctctctctgcctgcctctctcctcccacctctcctccctctctctctctgcctctctctctctctcccactctctctctctgcctgcctccttctctctcctcccccacctctctgactgcctctctctctctcatcttcgtaaggccatcatgatccacacctatggaagctgtgggcagcaggcgacggggccagaggtgtctgtggagccttgatcctttgtccactcacaacaccccatggtcctgactctgcctagctctgacctctgttttaagtgatcttccttttttataaaaaagatccccttggccatggtctccacctcggcttgacctacctgcttccatctggcctgtacttcttcccacaaggcatctccaggccgcctcctggatgcttcgagctgctccatcgcaggcaacttcctttcgcacctttcagtccgcccctgctgcagcactgtcacagacagcccttggacactgtagctcggaggctaaacccagtgcctctgaggtgggacagcttgggttcaaagcccactccttgccatgggcaaattcctgaatgcctgtgcctatttcatctgaaacagggttggcagcagtagcctcttgctcaggggactgatgggaacagcaagtgagcaggcagcgtgtggaggaagatgttgtaaacacagtgctgctggctcttctcatggggtcgtctaacccaccacgcgccttgtgtactgagcatgtactaagtgctggctcttcttacccctgcagagctcacaggccttcttgctaacctgtgaaagtgcactagtccctatgtgatcacctgcaccaccacgcaaaagaaggctgccagcctccaggagatccgggacctctgtaacctggcctagctgcttaaaaaaaaaagaaaaaaaacaaggagggggagctaaaattctctgcactttatttagttctttagtcctcacaaggatcctaacgatgcggatgggcattatttttcctattttacagatgcagaaactaaggctcagaaaggttcagggacttgttctgaacacacgccacaccaagggaatggcagagcctcaggccaaacccggtctggctctctgactccggggctctttggccacacccctgagtgcctcagcctcaaagcccacaggaaccccgcacggccgcaggagcagggctgctggccaggtgtgcaagcagctgggctggagggggtgtccctcagccccgtcagccccctctcacatccagtgcaggtcccacctttgtctgcaccttccccaaagcaggcgctgagtccaccagcccccagcccagctctccacacagacgcccagggactcagtacccggggcagatgcggtagcctggagggttagcacgctgacacccacacgggcgcccttcccccgcctccccacaagagcacctggtggggacagcaccctggggcccatagagcagcatcctctggcagaagcctgatgacaggaaaagccagagcctaaatagagtggaagctcagcaatcgggcacaactaagccaggctgagccccagctcccagctgagagccaggaaagacacttggaacaggccaacccctctggcagcagccaccatccttcaccagctctgcgagcctggcatgtggctggctcctcagaacctgtagagcatgaaggctgccccgaagtggctgctgaggaggcttcaagcaggggccaagaacctcccacacctccttctgttctgggagacattgagggcagagatgttgtggaggggagcttcatgtgtggaggggcacccgtgcctcccatccgggctcagccctgccctcccagaccctgaataaacgagatgcctgaacacagagacagctctgcgcaggaggcaaagcgggagctcagcctggggacggcgactgggggacagggccagctctcccctggggagtgtccagcaaactttctgtggggccccatgttgaacgggagccaataggacagacagggctgcagacacgaagtcggcacatgcctagctgaagctgggaaggccggagctggcagggagggagcggcaagactgtggagggcctgctggagactggatgcacccatggcagggagggctgtggagactccgtggagggtgcagcccctaggcaggggtttccagaaggccccggacctgccaggtctgctgggggctttctttctgcgtgttggggaggacctcaaaccacatggccctcacactagagttgccctcccctgagcatcctgtcccctaagagccgtggaagcctcctggaattccctgaagaggcatctttgtttcccagagggaaggcacagcccggcctgtcaccatccacctgggccatgtcaggctgtgaagaaaacctgcagccgcagccctggggggcatgaaggccagtggcaggcgcccatccagccaccttgtgatgctcctgcacttctcagcagaccccagcggtccttgagctcctctcctgagggtgagctccaccacccaaggcagccgttctttcctccgtcaaccatggttagaggctcctcccgagagggagtcccaagacatttatgaatgttcagaacaagatttctttctgccttataacatctacttcccatctattttaaaggagtcatttgtttccctcctcttctctgagctaactatccccccaaatatccccaaatgccccccccttttttgtttctcaagtgacatggttcaagtccttccactgtcgccaccactgtcggaatacaatcggcacataccgtttctatccctcctggggtcgggctggagcgggacatgccatttctatccttccggggtttgggcctggagtgggacatgccgtttctatccttccgggggtcgggctggcgcgggacagtactctgcaagcgtggctgtcacactgctgtggcgtcatgtgaaaggaagtctgtggggatgaatgtcggaatctcaacacatctgagctcagtcttctcacccttgggtggattgcagttttcttgttgttttgctcttgtaagcacatcttcatttttttcatccagcctactttccctaacttactcttgaaacagattccagatgggaaagggcctgtgcttctcctgcaggtggccagcgtggactaagcctgctggcagcaccttggcttatagtcccaaaggccacaggatccgtgaaaacagcacactccacactcagttctcctgagttagggatctttggttaaggcacccaatagaaagtcgagagcctcaaggaagcaggccctgtttttctctccaagagttcagagcagggattgagccccaaagctaccaccatctccatggggtgcccagcatctcacatctggacacgctaccattcccagtgtccatctgggccagccctgtatccctggcctcctggatcattccagcgttgtgagcctcctgttggacaccagagtctccaggatctgtggtgtatttgtaatgcacctgcagcagctcctcctctcctctcctcctcctttctccttcttctcccatcttccctactcacctctctccttcttgattttccctctcccctgtccactcagccaattctcgtctttccccagggaacacacgtcactgattccagagccagaatatgagacggccacatccctgcagcgtttgcagcaggtgctccaacctctctctctgccctctttggccctctttgtaaccagagggaagacatgagaagcagaggacagtgtaatttttagcaactgctatggatggctacttcctgacacagaagtctagatacattttattttctttcctagaatcttcttcaatcttctcaattttatatgacctggaaagtccatgtgaactgatcaataaaaagcacaaagaggaacgaatgagcccttgagctttaaaaacaaatgaactcaccccatagatcacattatagattctagatttaggggtgggcattattgataacaagggaaccggcaagaagagtttagtgcagtcaaaacgcaccagaaggtaagagatggttcctgtaatctcagctttgttgctcctttttgaccttaaaggtacttaactctttacatctgtttccttgcctgcaaaataaagattttttgatttttttttaaaaacctcttgaaaaattaagtctgtgaaataatttgtaaatttgacaaatgaaacaaggtttgaaatcagggaaaaggcagattccgtggtagaaaggaagaatatgttccatttttaataaaataagaggctgaaagaggagaaaataaaccccaaaaaagttttaaaatcatacttataaacaagaggataggggcacgaggcagaatttgggaggaagaaagagaaaacatcaggtaacccccgagtgtgaaaaatctcagcgaattccaggattacacaggctgcaggcagatccaggattacacaggctgcaggcagatccaggattacacaggctgcaggaggatccaggattacacaggctgtaggaggatccaggattacacaggctgcaggcagatctaggattacacaggctgcaggcggatccaggattacacaggctgcaggcagatctaggattacacagtctgcaggcagatccaggattacacaggctggaggagtatccaggattacacaggctgcacacagatccaggattacataggctgcaggcagatccaggattacacaggccgtaggaggatccacgattacacaggctgtaggaagatccaggattacacaggctgcaggcagatctaggattacacaggctgcaggcagagcacagcgtctttaacacccccccaaaccccgattagaatacaaatcttttccctatgagagaagttaagggctacaaaaaaaaaaaaagattcacaaaccaggcaaacaagaaaaaatagcacaaaaataacacgaatgtaaaggatgaggatcaacatttctgctgaagaggaaaaacatgtacatcccctcctgtctaggtggctctagaaatccttcctttctcctgtcctggaagacctgcctttcctaaggcaagctgaagtctaccagcttttggaaactgatctgcttttgaattctctgaacctcccttatgtaactgaaaaggagtctaaaccctcccggagggagataggaagtggccgtccccatgccccagttcagcagtggaagaagtcgctgccctcaggacccctccaggcacacacaggagtctgtgtctgaccccacagaatggctctttcagttcctcagggcctcggggtcctcagatttaaaaaacaatatctgagctgtgttgagtttttggccattgtcgccgcttccctctgtgccctctggggctaggagtgagtgtgtgtgcacaagtgtgtgtgtgtgtgaggtgagcagtggtggtgctggccatgagcgtggtcgccgtggtggtgctggatcctccgtcttagtctcacaggcaatccagtgggttcttggtgttggaaaattggtgctgtcgaggcagtagcccttgcaaagaaccgctcccagcccccaccattaaccctccaggatgaatgactcctcatcccacagcgggttccttaccctaagggacaaacagtccttgcctctgagagtgataaggacaaaggactgtttgtgaaagcatctccagaccatctaataatggccgtgttgagagtaaggtagagatgctcagtcttacacatctcatcccggatcccaccgcccgaaaggaattccctgcaacaagctgcataaaatgtattttaaaacatgtttttactacatgtaaatggcattagctgccttagggctccgtgtaatcaactcaaggtgagtacctctcttgcgaccccaggccccagcatcccagccctgagtgaggtccctttgcatgtggaattgggggccccacctgcatcccgagcgtgtggtttgaatgcgtcaggccctggatgaaactcactcttccacgcgagggcgagaggctggggtggcgtttctgttgccttgcgtcagctgcaccagtcaccttttgtattttttttttgcatgggtcctccgagtccaaccccaatactggctccggcggccccagcctcttgcttagccgctccactgctgctggacgtgcatgtgctctggcagcagttcccatggacacatcccgttaagtgaatgggacgtcaggatgtgctaggtacgttctgccgcactggacaggagcctattgctggatgtacttggggcgcctttcggccctgcagcggttcgcagtgttggcaacgagggcagcatgatcaacacagagggataagtgaagagtcctaggctgcatggtcgggaaacagacaaactgcatgcagcatggacagtgacgctgccgtggcagcccctgggtgctccccaaacagccaaaccgcagcgagagaatccccagaaaacaagcccaggagtggagacagacctgtcaccagcgcggcccgggtcccctttcccagagcccctctcatccggcgcgctgtccccaacgctggggcagcatgcgtgcgtcctccagggtatcagggcaccagggccagggggcagggcggctggatgggacgtggtgcaggtgagaggctgacccagtgctaatataggcactggagccgcaagccacggtgtaaatcccctggccaatattcctgctgtcagcgggtgataccatctgcatgtcatccagataaacttaggtgtgttctggttactacagttattgggcatcatacaactaataatgcttcttcactcgcccagttgctattttgccagccataacttcacagttcttgcacactctcagccacaaggccctacaaccagaactttggtgtttcatttgcatgatgacccttgcacgttctgagcaacctggggcctagcccattccaaaatctcatctgcgtcatgaaaaagaaatttttaaaaaattatgataagggtacttttaaaattatttcccatgtattttttgttattttctagtgtaatttaaaaagaaaagtgctgggaaccaaaagaaagaaaggtgttttttgtttacaggttacatatatcagaaagcaagcattccacctaaatgccacaaatataggcaagtctacttcacactttgaaatgtgtaggttttcctaatactggaatatcctagacatcattttgtaaaaaaccctcacctgactttcaggaaaccaagccgaatgggagaccctctaagaatctcagggacaaagcctcccgggagacccagagtggctgaagcttagtgacaagagcaccctcccccaggctgtcagggtgtgtgtgcagcactcttgcagtatctggtacttccaagtagcaggcatgccgccgcaccctttcctaatgagaggctttgggaaagggaattcggagagggcaccgggcagggaggctgaggtgcctatgggggaggcagcagagactccacccgggagaaggtagcaaaaggtggcttggaaaatatcaacgccccatgcgggatcttgcactgctgtattagcgtgggagaaagtgcaaaatacgcatacttcacatggaattccaaaagaagacaaaatcactgaatgtcttacaaactgcagagtgatttacaagaattgcctttccgtgaattttaggaaatctctttaagaaattggccagaagtgatacaggatagttgtttcccagcatccctggggggttggttccaggacccctgaggataccaaatccaagggggctcctgtccctgctaccagctgcacacatcctctcatgcattttaactttctctggattacatacaattcttaatacaaagtaaaggctattgatggagttgttatagcgtatttttaaaatttgtattatttttattgttttttatcatttttctctgaatatttttgatctttcattggttgaatctgaggatgtggagcagtcggatgcagaggatcagctctgaactgcttactcctaagtagcctggtctctttctgtttggaaagaaagttgcagcagtgcagactaaaaatgggtatcgagcctttttctcctatttgaaatgtctttattttgcctttctctacatttctttattgtttcccatttatatgacaacaagaatcaaaattaaaaaatatatttaggctgtgtgtggtggcttacgcccataatcccagcactttgggaggccaaggcgggcagattacttgaggtcaggagtttgagaccagcctggcccacatggcgaaacccctgtctctacaaaaatacaaaagattagctgggtatggtggtgcatgcccgtaatcccagctgctgggaaggctgagacaggagaatcacttgaacctgggaggaggaggttgcagtgagccgagattgcaccactgtactccagcctgggcaacagagtgagactctgtctcaaattaaaaaaaaaaaaatagtaatatgtattttaaaaaattttttttaccatgtctctggtgcttcggagcaatacatatttttagaaccagatctgtttaggtgaaaaacaagttttaaaattgaaatttccatgtaagtggggcaaaggcttattcacgtggccagaatcattctgatttacaaatatgtttttctcctataggtaaggcctgattatacatttttgttattttgttttaattcgggggataaagaaaaaaatctattttttcatattttgtgttttactacttaagtctccatgatagagctaccatgaaacaaaggaatgaaaaaagacacatgaaaggggctttctgagaaattcttagaagaactcaaagtctctccatctgacatttgcattattactccaaatattcaatgttgttctgtacattttagctgctgagctcaaaatccggggagcctttgaggaatgactcaattagatgagggcagcctcagagatcattaatccagacagagctgaaacattctgggagtccttttagccttcatttagaagacttttaaaaaaaataaataagtagttaactcaatcaagatgagagattgtgcgtctcttccaggtagttctccctttagactgatttggagatagatgatggtggacccactgggtcttggcccgcagtcatgctcctgtaagatgctgagtcacgctgggaggactcccaggccctgatgactggctgggtcttgcctcgtgttcatgctcctgtgaaacactgagtcaggctgggaggactcccaggccctgcctcccaggcctgtggcctctgagcctccgcgtgcacttgctctgcaggtgatggtgggaggttgtcctcactgactctgggtgttcaacacgtgtgtctaacaaaagcatgtggcagcttgtcctgacccctggacaatgaatgtctgtgctgtgggctctttcctggcctctgtctccaggagtctctgccttgttttctaacagcattgatgtaaagtgggtttaggcagtaaaatgtgctgtactgtgagcatccatttaactagaggcagccctatcctgaagagcatgtcgtgctttcaatgccttgcttagtagaactgcaagcatttatttaatttccatactatttccttttgaaagagagaggatgggatgatagaccctagagggagcactttcaagacattcgtatgaataactggctacaatacagcctcagtcggtagacacagctgtttcatgtacaccaccctgcttcaggttatggttttgtaaatgggagggaatccgcacagcaatgggtttatgtcctgggaaggacacatcagagggcatctgaaaagccagttggtgagcgtcccagctgcgtgatgtgcaccaatggaaaacaatatgatttttttatgatgatgtattctaatgcctagatttcgagctcttcttttatgttagccgacacatcttatgacctccatggacgtgtggtcaatgccgcttcttacacaggctcacagagattgtttctttggtggtgaatagtaaagacaaggccaggagcacaaaggggacaaggggtcaagtccaagggttcctcagatgcctcagatctgcaaaagcaacaggaacagatgtttctacctgacaagggctcttgccttaaagtcagagttccaaatgcttctgagcgtccctgtcttttactttttgttttcttgttgttgcttgggtggttttgttttgttttgttttgtttttttagaattcgcctgaattctgcacgttggctgtaatgtaaatactgcttaaaatattttattatgatttttccatcaccactcgtaaatgtctatacaagacacattttttcaaccagatagtaatatgtacaaccaaaagttattttctcttaatatgtacaaccaaaagttattttttcttcaattcttcttcctttttttttattttttatttctcttaaattcttaatctcaggcaaacccatgaccagagatgaagcaagatcaggactatttttgtcttgaaaatatccgtggggcagctcgtgtgggtttcaagattatttgttcatcatcttctttctccagttgtttttagcaatagtatctttggaatagaaaagaaaatatatacatatgtatatataaccaagcgttttatttaatgcaagtttacaccttaaccatctacaggaacttaaaatagccttgctgttattgttcgtggtaactgtcaggaaagcaggcggggcgctaggtgagtggtgctctttccaaccccactctgctccccagcagcctgagtgctgcagcgctgagagccgcagcctccctgaaagggagctgagaggccgtttccatggaaacccagtcaatctcttctgccatttccaaacccaagctgtgcagcacaggctgccatctgattctatccacgggggatgctgattgtcccacctgggcttccttcgtggaaaaggcaatgctcctagatgggcagatacaaatcgcgtgtttgtaaatcgatttcacgccacgcccgtggtcgaggatcctggagctgactccgtttgagaggcgaagatcccttttgttagatgaacagtcacttccccatccatcgacttcagaacattgtatttttttaatgttgagatttcttaaagctaggaaatttgtatgtaaatctatgagtttttaaagagccttaaattcttgaacagtaacataaaaatggataccaagagcggttggaaggaggaacccttgaaaagccattctgggctgccttatgtggtctagaagcaccacctaaagacggaaaagctgaattaccacccccgaaaaccgggggctggttatctcagggagacacagccagtgtttccagcatgtctctgctctgggcgctagtgaggacgttgagggcagcctgaactgtggcgttcacaggaacctatgcaggcgggtggagaggcgtctcaagagaaggagacgacgtcaggcccaggaggactgtgagccttctcgggccaaacagcttccccacattcattcacgcggctagcaagtggcacgcctgggatgaacgccccacccgcccaactcgaaatcctggaaatgagaacaatccttttaagagagaaaagcctccttccaatgatttttttcttcctcagtacagtgaaagctctaaaaatgagctaaatcaatatagttttgtttgttttcatgatgaaaaaggacattttaaaaactttttttactgaaacctaatttgattttaaaattaagggcatagcactcatctaaccccattggtgtagacttcagcagcacacttgctattttccgttaatctcataacacagatacatttgagcttgcagtctgcacctgagtagtgcttatttagcggacttgggtagagccctccatatgtatcattaatctctttacataatcacatttaatgatggcccagtaatctcaaaaaaagccctactttaaagactaatcaataaacaaaacaaaactcacagtgttcccccgccaccctccaagttagcagttgtgagttgtatttatactgagacctaatgttttcaaagtagttcaggttctccaacagccccatcccacccgagaaatgcagcaagagtcatcaattattttattctaccctcccaaattttattaatccagtgttctttggatttttaagatataaattgggaaagtgctattaataagctttttaaaaaggcatattctcctataacaagaaggacacataaaccaagcaataaaagtatttgacaggacattaagttgccacaggtgctggttaaaacacctattttcttatcaaacaatggattatactttcataaatgacatttaaacacataaaaactaccacaaaaacttttataggtagtaaaaatatgattttcactgaattatttggctataatatctcactttaaatttgagcagaagagtcaacttccttctgccccaacaaaaaagaacatctcaaaaatgtttagccatattaaaatgaataaattttaaataaacatgcactatgtacttgaattagaaagtttaagaatctttttcttttcttaagcaaaaagtaataccaagtatgtattggtggctggtaggaaaaatttgtttcttgatacatttttaatacagatacatgcaccacgattagcttctcttggatagaatgatttttgttgctttcaaatgtcttcctatgtaagcatatgggtttggagtttacccacataaggtgtcatttgaaaaaccagctagttaagttcagtcatttattttttagacaataattacttagcaactgactgaatagtcttacgatcaaactttaagtatatgtgaacagctgttacttgaacaaaaatcaggtctaacaattggatttggagttgttgctcatgatatgcagacgctgtttgaaatacctcatcactgttctgccccaaactcctcttttaaaatccccagttccccttaggctgaagagcagtgatgggagcacacagaagaaccctttactgcttcttcactcagtgaccctctcattctccccgggagcaggtcataaattagacttttcctctaatatgatgtggaaaacatccacttctataccctgagatctagagttctgttccctttcttaggactaaaggagagtactgaaaaccatttacacatccaagtatcaaaatgtgacattcatacacttaaaattcggccaatgtcatgtgttcccactctaatccctgccattctcctctgatcttgagaaagcccacctgtaagcaagcactttgccgtcctggtctcagcccccagtaccctatccatagtgactttctgagtggaaagcaaattgaaatctctaggagcagtagacatgtattaaaatatttttaaattgtgattcttgatcttgacaagaattcgggtactcactgaggtgggaaggggcatggagtatgctttgatgcttcctactaggtgtaatattgctcactaagttgctttctccttgtcatttttggagaattacaaatgtaatggaaataaagggaattttttcttaatttttacattcatggtgggcgcaaatgcaactgaaatagctcaaagtgaaaatgtgtttgcggtgtgatctcattattcttgagacagcatagttaagaagttgatctcattattcttgagacagcatagttaagaagttatatggagggcaatataattataaagctctttttcttaaaaaaagtctctgattagagaaatagcaagaccttaattaagaaacgggatggggttgcctcggtaggcttcagcagatgagtgtatgtccccatgaactgttcagagcctctccactgactgacctggtggatctgaactgatttatgttcttcatgtcgctcaagagtaacaactattttaaggtctatcaaacctgcctgagtgcacagtggtcatcggaaagacagtcggcctgcattcccatggtccagatgcgggtcgataccctcactgctccctgggaccacccaggctggccgcagccctggccagtctgtggaaggggtgcctttgcagtgctggggtctgagttcagactaaaaccattctctcagaccccagggcatgtctgttcatgtgtgagccttgcttcccacgtgggctggtgcagtaacaagccctgtggttgctggctctgctgagctttaagaatgaggggaggaaaggcgggctgttaggagggaatacaggttctagaatgagcagcctagggaccaaaagtgcggcatctgctccagagactgtggggagcggagcagccacgaagctcccggtgctctggaaggtgtgtgtgtggtcatggtgacttccagctccatgagggagcttccggctccactcagcctctttcaagtaggaagtgaagcaatagagttagtttgctttttggattaaaaaaaagttaattgttcagggaactttatttctttccattttaacacaatttgcattttttattgtaggtgccccacgcctggctgtgatggttctggacatatcaccggcaattatgcttctcatcggaggtatgtagagatgctactcttctctccaaaatgctctttctcactgaaatggcaggaatatcactcacgtcaggctccaagccttgcgaagtttgacaccatgggcaaaattaaggatctagagactcttagcgccataaagcagtgacgtcctcattggagcttctcttagaaagcaaaccttccttttccagggccactggctcctctcaggacatctcacatgcagtgcaagtggccccactgagaaacattccacctatccagctgcacttctttctaaattggaagagtaaaggcaaaagaacagtatctactataagatccctgagaaaagccatcaagagacacacattctaatgccactgagagttggtctcttaaatattaagattggaccacaaagctgtacagttattctaagcagaatgtaacattaagaagcacttaatgttacaaagtctaggcactgtctctcccaaaaagaaggtactgtctaaaatataatatagagatttcatcatgtgagataacaaaaattctataccacttgacattcagtaactactggattaacatggaatttaggacaggcactatttagccgagaatggaaagaaattgtggtactattcgagaaaaaatttaccacttgttaaagatggtacaccagactattcaagcggggtgggcagggcaagaggtccaggcgccatgcaatgagctcctgtagtcggggagactggactcagctcaaaccctaatgaggacaagtggggatttacaaccaaggagcagattggggtcagtggatggaaaattccccacgggaagcaccaaggagaagggatttctggccagacggacttgatgggatcattgctgtcattgctgatggccggccagggtggtaggatatccaaatgctccgacactgatggtggggaattgttcttaaactgagttagcaggattcttgctcaaactggatcctacaagcacagagagggaagccaaggtcgggtgcattctagtaaaggacccagaggagctcaactaaagttttggtcaagaagaaaacctttgtgaacatatcgtccacacaaaggcgaatccactacatgctgtgaatggtgaagtcatgtttagatgtaccaacagccaatgctgaggtaaagacaagaatgtttctgaaataagaccgatttaaagtgaagtctccctgtatgggaaacagtgctgcatctatcaaataaacgaagttgtaaggtagctgctccctttcagctctctaaattttagcttataaagtacgcagtccagacgcagatgaggcctcctgcttttaacatactgcttgcaataaaaaagaaagagagaaaagacagggaaggaaggaaggaaggaaggaaggaaggaaggaaggaaggaaggaaggaaggaaggaaggaaggaagggggagggggaggggaagggaagggaaggggaaggaaagggaaggagggaggggcaggagggaagggagcgagggaagggaaggagagagggagataaaggaagctaggagagttaaagacactgtcagcagtggataatggcccccccctcaccaccccgccccctagagcacggttgtctgtacagagtagctgagtgaaacctgctatctgtccctgagtgaccagatcccaacagtcagagtgggggaccctcacctgactggctggcgttttggattagaaacagaactcacaggatgattgttttgtcattaaaatctcactgaaggtaactcgctcctgtgctcacatcccagccatttgagagctatgtttaaacagcacgtgtctatgaaaagcacacattgtgaatgccaccaaagaaaaatgaagcatgcaacttgtgggaggattctccagactccgtgccaacgttgcaagctcttcacccagattcctcagcctctgcagtgctggcaagtgggggcagatggctgtttgccgtgggggccgtcctccgcaccgtgggacctgtgcggcacccctgggcctcacccaccagatgccaggagcatccaccccttcgtgacaaccaaagatgcctgcagtcactgctgagtgtcccctggggggaccactgccacagacccagggcagcagagggcttatgacattgatgtggcttcaccaggcagcacagaaacagccaccacatttggtagaacacgagtgagtcgcgccgtccaacaagattgccagaattaaatcactggtttagattaaaaaaaaatttgtaaaactccaattaaatatacaaagacaagaacattccatgctggtgtttatttcatcttagaaaagcgatgtcttggtcctctcacgtggccagagcttccggcatggcgtaatgtcagcaccccgtaaggtgaacacttcctggtcactttgtgtccaaatgtctgtttttctgatttttttttttttttggtgggagttggcatcatgtaaatttagtcctcatgtgggttaaacattttattcattttacatatatcttagactgttaagtcttaatatagcacaaacccatgattaaaatctaagctcaaatttaagctaccatctatgcctggagtaaatgatcccagggttaagtcaatggagttggaaagtaagtgtgatttgtgtttgacaaatctgagacctagacagagccctctcggggttttagcgtactgaaggtggagcaccttgtgacgttacttgttctagtaacagcttccctagtatagacatctaagcggggctgggcacgttgctcagcagaagtgttgcctccacgtgacagtccttacataaagcccccgctaaaggaagatggaggccccagcaaaacaagtgcagttctgtgtaaatgagctgctgcagacagacagaagccaacaagcaaacaaggaaactcttaaaggtctgttggctcttggtggccagaaatgcaagtaggaggaacttcttttcatgttaatcttctattgtctgtttcccaggaacaggaagataatgttacctataggcaaacgccacttagacgatgattcactggccttctttttccctcagttatgccacaattcaaggtagttgtgtgggttcaaggcatcctcctcctgtactgtgggctgttgtgagaggggaagtcaccaaacaatgatcctgaacctgttcagagcacagatccgcctcgcgcacctgtggtgtctggaattctccctcctgctcccaggacaaacgcctcgcgcttccgtggtgtctggaattcttcctcctgctcccaggacaaatgcctcgcgcttccgtggtgtctgtagaattctccctcctgctcccaggacaaaggcacacactccaattctgtctgcagttgcagagcattcccagctcccatctgagagaaaactgaggccaagccccagccttctcctgggcccattctgggaaactgggtgaggagctgtcctccaccatctccacagatgcgctgagaattagcgatttcattaacttttgaatttgaggaaactgaggggccaggagattcagtagcagagctgcaactggagcccatgtcgtctgactccgagtcccacctcctggcagccccatgagcctaggatggccctggaggaagtaggtgtgcctaaaccacctagagaaggtggggttgtacctgcctcttagcggtggtgttttctggcctccacatagcatctaaaacgtccctaagtccatttcaacaaatgtttattggctgtgatgttctatcaaacaatcctctatccgctgctttgccgactctccgtcctcagtgaacagaggccctgttgaccaaatgcctacaaaggcttccatgtcattcacagtcatccatggggctcctctttatactcttgttttcaaactaacagactgtttcttaagtgtgtcctcaaaatcctgttttccagacccctttgctcttttttccgaccccccaggcccacttcttcacctgtagtctccctttgctcttttctccgacccccaggccttctccttcacctgtagtctccaggtcccgccagacaggcctgcccaggggtgctcctcattctctctgcgcagccgtcccacatgcgtttttcataggatcaggcaagcagcaagagctccaagggccctggagttgttccaatgcagaagtcaagtccacattttccacaaatgatgatgctccaggaatccgactcccactagaacaccctgtggcctctacggttcccgaatggcctctaatcacaaaagaacattcactgggcacctgctatgtaccagaaattacagtgagtattttacatctataatctcaccatcctatgagattattggtatcctgactgcaaatgaagatgcgcgggcacagagatgctcagctgcccgtcttgtcagcgcctgtgctcacctggagcacttccactctgctcttttacaataatgcgcaaaatcgaagcctccagcatggcagtcaaacggccagacagtgtctacctatgccactccagtgtgctgtggggactttcaacagggatcccaaaggccttacctgctgtgaaatggagacatcaccaggtcctgaagaagacagtgaagaaacaggcttgatgtcatgcagaagagccaggagcaagtctgccttggagagtctcaggtcccgctgccaaaatccggagaggtggctcctcaccagggggccttgggaaccttgtaaggtggtgcttgtccaaccctgtcagtatctgccctcacacagggtgcaaagctgtttagtcagagggtccggagggtcacaggatccattctcatgcggggcatagagctgtttcgccagagggtcagtgaggtctgtgctctgcccctgggctccgggccggacacccaccctagcaccactttggcctgggggccacgaggtacactgcccttgaccacatgtctcccgggatcccaaatcctccagtttctcataatcctgcactcacctgttgttggccctttctcgctggagctgtccgtatgctctgtccgtgtgctcacccccagcctttccctcccccagagaacacagagctctcccttacagcgtttccatcgtttacaaagttccagataaagatgtggacatatgacaagcccctgtgaattgtggaaaacagtttctgtctaggaaattattaatcatttaaacataatcccaaatgccagcgtggaattccagaaacctagtaaattagtaaatacctatttgagtacgtagtctgtccccgaggctaaggaacagtgataactaaggtgttcctagcctcgaggtacaggtaattatgaggaaagacataaaagctaaccagcctggcgcactctcacgcattcctgcacaattaagggaaactgagatgggttccaggagggcgcacctcagggcagtggccttgaggcctccaggtcgggatggcactagggtgggaatctgacctgaaagatacttttcaaatatgtatgtacttatcaaagcctaaagataatgagtaagtcatgtctgaattctgacaaggcagggtgggttggagcccaggagagaggaggcgacgctgagccactgcatgagggatggtgagggtctctaggaggtcatgcagagaaggatattccaagcaaaggaccagtattacagaacgtcttataacaccaacatcaatgcacatttgacagtgaataattcagtttggcaacagtttcaggtctaagcctatgggagcagctacaaacggaacttgctttaggagtcccgttgaattcagtataagggggtaaaattttatttgctggaaaacgggtattcacccaagtgcaggcttagcttttagcctagacagcgggctgctgagagacggcaggtgtcaaaagcgcacttggatggtgacagtggcagccgagagaagagctggtgcaggtgaggagagcagcaatggggccgtgaccagcagggccaggagtgggaggggcccctggggaagaaggcaggcgctaaagagggagggcctgggatgcagcaagcagccgggggacatcatcatccggtataaagaagcccaccaggaggagtgggccttagattctgtctaaacacattaactttgggattcttatgatatattcaggtgagcaaaggaggaaggtgagaggagaaaaacagcttccagagtcaccagcagatgagctgttccaactcattcacgaaaagaaaacgacacttttaaaaatggaagatggtggctgggtgcggtggtagctcacgcctgtaatcccagcactgtggaagtctgaggcaggcagatcgcttgaggccaggagttcgagatcagctaacatgatgaaacgtcatctctactaaaaatacaaaaattatccaggtgtagtagtgcaagtctgtaatcccagctactcaggaggccgaggcaggagaatcgtttgaatctgggaggcggaggcttcagcgagccaaggtcatgcccctgcactccagcctgggcagcagagcgagagactctgtctcaaaaaaaaaaaaaaaaaggaagatggatccaaatcctaagaaatgaactgtggatgtgagccctgagcagagcatggagctgtagctccaatgcccaggaaaggagggattgctcccctccctccagggctcgggaagggcctgcaaatgaacccctatgtttctaaaatttggaaggagaagacgagggggagcgactttttgttaggttcaaatctgggccctaaagaagggatcacaagtgcagataaaggtgaaagtcaggatctaaaatcacagagctccttctctgtgcccagcattgtatgtatcatgttatcacttccagttttcacagccgatgatgcaggtatttctgccccaaaatacagacaaggaagccgaagcacagacactcgggccaggtctgcacagcctatacatagcatcgcctcttccttctctcccttggcgcaatacctggaagtggccgctcagatccttctcacaaatagtcattctgtagagaatctccactctggggtccatagcaagtactggctttccatcctatgttataagccaaaaagggaagttttaaatactgaacaagttctaattccattgctcctagagttctagtgcttagttggtgggtagggaaacgttcccttgttttcatcaagcatgaaaagtagcaagaagtaagcagtataaaggttccagccatgcattaagatgctacagtgagaacagggtgctgcggggggccctggactcctgggggtgttcagtgctgaaggggaagctaggtcctgctgtgctagggatggaacagaggccctgggctacggcgtgtggaagagaggaccccgtggggcacaggtgccgagctgcccaccaagtgagtgggggcaggtaaagaccacacccctccaagcacaggcttctcacaggtgccctgggctagtgccccagaagagaccacagggcctcttctcaccaacagacatggctttcagatgagagctcctgagccccagagcaggcattctaggagtctagagcagccctgtgccaaggccaaggcttcctggaggccaccgcattgtcggagccaaatcttgttgcagatttgttctgtttggtttagttttgcccccagcccaggcctccatggtggcccagagctgtccctggctcccaagtccacagggagtgactcagggacagggcagggggcagggcctacaggagctcggcctctgtggtggagtcaggggctcggcttcccccacagcaatcctacatctggggagatgggatcctgggtaggactccgtaattctccctgggtaagacactttaattctccctgggtaggataccgtaattctccctaggaaggacaccatagtaattctccctgggtaggataccgcagtaactctccctgggtaggactccgtaattctccctgggtaagacactttaattctccctgggtaggatatcgtaattctccctaggaaggacaccgtaattctccctgggtaggacatcatagtaattctccctgggtaggataccgtagtaactctccctgggtaggataccgtaattccccccttggttcctcttttcttcattcatgcattgaatgacccgctctgtgcaaggcgtcgggctaggaattggggaaccgcagaggaacactcgcatggtttacactcccaggcatcgcctctcagaggagcctgtagaggagagaaccgtgtgagcctgcagcggccgcactgtgaggacagccaggcccaggcttcttgcaggatgcagaggccacgcagctgggaacgagccacagacaaggcagggacatcggccagcccgaaggatggcggcaagggttgcagggagagcccagcgaggatggcggggcctacgagtcgcgtggaagaactcgggtccccctgaggaagcggagagcctcggatgatgctaaagcgctggcctggaggtgttcccagcccgggggccggtactagcaccgcgcgcctggaagcggaagcgcctggaagcggaagcgcctggaagcggaagcgcctggaagcggaagcgcctggaagcggaagcgcctggaagcggaagctggacagacgaggagaggccttgggtgtgacatcaacggaacctgagggaagcaaaactcagcaaggacgcacccggtctgctggactggggctttgggttggtgacgtggacgatgagtctaattttggggcatccgcgcagttgtgcagcggtcagtggggtgcaggggtggacgtgaggtcaacccacgccggcctcagagccccagcgacctgcaggcaggtcaggagccagagggtggggcgggggcggaggaggccaagggaggaaggaaaggtcgggggaagcacaggcgggcccctctttccagattccctcctttaagagggcggggagaagaaaggccccagcaggcagcgagctcaggtgccctcgcctcgccgcctctttcctcttcctgtgaagagcgagacaggggaaggagcaggaggattccccgctggctccaggaggtggggcagcaggggcctgggagtgaaggcgctgtggggccctgacaacctcctttctgcccagacacgaaacccgaaccttcccgaaccttcccacacccgcctgtgctgaggtgctgcccccacctgaacagggaggaggatggccaaggcctgggaggcaggatggagcctccctttaggggagtgagcacttcctcctgggaatctgcgtgtttccaagaatcagaactgaccaagaaaactatccccgagctcaggaaagccagggagaagagtggcctcccacctggacccacccgtgtgccagcgccgggcccgcgatttccacaagacccaatagcatggcaggagattgcccaatttctggttcttcaattcttttccaaaaatcccatttgttttatgtattattttatgtgatgtgtatgtgtgtgtatgtttctgttccagctgaaaaaattccctttacaaacatgtccaaagcctctgtacccaagaggttgaaaattaaataaaataggcgtgtccagctcccactctcccgtctgcaggcacaacccgaagcctggaataagtcactagcccatcactgtctcccaagacacgaacctgagatggaagtgcttgggaagctgctgtgagagacagagtacccaagaatggggctgggaggctgcttttttctgccatgttcacccccgacatgcacgcatccgtgtgcgctcgctcccgcgctctctgtcaacaaaacctcccccagcgtctttcctggtgactcccgactgcttctgctccctcccggtggaccagtttctctcccgttcacagcatcctagcccaccccagtctcccaactttcttgaaaggggactgacggtgcctagagccttggagaggacacagggaaagaactctcctcctgaattttgactttgtgcccagaagcacaggttttggagagaatcaagtcacagcctcgtcggttaagaaagctcactggggcggattacgaggtcaggagatcgagaccatcctggctaacacgatgaaaccccgtctctactaaaaaatacaaaaaattagccgggcgtggtggcgggcgcctatagtcccagctacttgggaggctgaggcaggagaatggtgtgaacccaggaggtggagcttgcagtgagctgagatcgcaccactgcactccagcctgggcgacagagcaagactctgtctcaaaaaaaaaaaaaaaaaaagaggccgaggtgggcaaatcacgaggtcaggagatcgagaccatcctggctaacacggtgaaaccccgtctctactaaaaaatacaaaaaaattagccaggcgtggtggtggccgcctgtagtcccagctacttgggaggctgaggcaggagaatggcgtgaacccgggaggcggagcttgcagtgagccgagatcacaccactgcacttcagcctgggtgacagagtgagactctgtctcaaaaaaaaaaaaaaaaagaaagaaagctcactgaaatcaacggtgtggggtgctttctgaaatgtgtttcttatttagcctttcaggttgcccaagagcaaagaaaagtggtatcaggatagcacagagcaaagaagataaagaagatcaagaacccatcaggtatgagcaccagtggggctgagaaccatagcagggctgccatgtggggacgaggcattcaagcaaagcaagtatatgtcaacaagaaaaagagacagcgggtcttagtggccattctttgagatttccacaaatgcaaggtcagataacttagacccaaaccaaagcacatctgctgattggctgaaaagttacatgggctgtccagcaataagctgatatccatcaatctgaggttccatgtaacccaaatccccaaaaacaagccttccctctcctcttggtgggaaaagcagctgaattcttgggaatggcagattggtgaatgctcctgaaggtactaaatacaacatcacaagcggatgtttcactggtattctggcttataaaaatagtttagttataccctgccttgctctaaggcagggcttggggctgcagtggacactgagcttggagcctgtgactaccgctgggctgcccaagggggtgtttgtccccatcccacgccagccatgcctgggccccaaaaacccacacagtaagcctcacttcacatccccagaaaaaagttttaattaaaacaaaataaaaatgaattaaagcataaattattcaaataaattaagatttgtcaaaataaataggtaatgcaaattctgaggaatgcaaacttttctgttaataaaaacaatgcaggcaaactcactgctcaggacacatgaggagcgcttaggccaggccctgcctccttcaggcgcctttgctgccctggtgtgtgtcttggtcctgccattcacaagttcccaggaacacacctgtcccgtgtccctgtgtcagcccgattccaggagacttcatgagacgtctctgcagcttaggatcttctctagctggaagggcattttaaggcctccagaagatacggccagacaaataaatgtcttctagctcttgagaaaagcacgaaacagcctctttaaaaataatgccacgacatcttattgacgttgcattttttccacctgaaaagccatggttctgtcccaaagtggtatcttttaaacacacgcttgtgtagctgcatgtgcctgcgtggtcttttgtgtgctgaacccatcagtcccaccaggcacatacactttgttccagaaaatccttccatctgcaatgggtcaggccttctgcgcaggggaaacagttcagtgttccactaggtggtgtcttttagtgacttttctttctttctcttttttcttttccttttgcccagccaggagggcatggttgtttttttcttcttcatgccgggttattctgactttgttacagaagccaccaggcgacggtggccagacaataaagtgtgtcacctctgcctgcctacaggtgtccggtccccgggtgcgacggccagggccacatcactgggaagtacgcgtcccatcgcagcgcctccgggtgccccttggcggccaagaggcagaaagacgggtacctgaatggctcccagttctcctggaagtcggtcaagacggaaggcatgtcctgccccacgccaggatgcgacggctcaggccacgtcagcggcagcttcctcacacaccgcaggtgagtggccgcgtctgcgggaccctggctgggatggtgccgccgagagccgactggcacggctggttatgacggcagcaggtgccagcttctcccgtcacctgtgtttagaaagaaaaggctgaaaactatcgtaccaacctaacaaaattcaagggtttggggacagtgttgaaacatcttaaacttacattagggagcccagcctccctcagccccatctatagatgaccacagcagttttccgtttttgaaactagaatccacagtaagatatagattttcatttaagacatgcacatgagggtctttagatgtagttacttatttcacccgaaattcacaggcaggcgtcattgggggaaagaggatggcatttggcacggtggctcctggtgaatgcctgcaccaaagatgcatgagaacattcccaaaaaaccccatcaacctcattcatttttgtttgcttcatttaaaaagaaatacatgcagttagattatcttaggagaggcccgttctgtgcagtcagattgtgcagtcggtccctctgcggggagtgaagacctgggatgggacccgtctccaaggctgacggcacccattacactcagcgtccctcagcttccttgaggaggtggaggggaagatacacacatcacatgtacgatgtgaaggccataccctttggggagatttacaatggtttcctttctgctgccctatatgccactttctacgaaaatcacacctgcgcctcaaatccatctcaaacacagaatgaacaaaggggtatgcagattacaggaataatggcatgttcagtaataggtgactctgacccttaaatgttaaggaagattttttttaattattaaagaaattcctgctcaggtagaaaattcaaacaatgtaaatgggtttaaagagaaaaattggccgggcacagtggctcacacctgtaatcccagcactttgagaggccgaggtgggcagatcacctgaggtcaggagtttgagaccagcctggccaacatggtgaaaccccatctctgctaaaaatacaaaaattagctgggcgtggtggtgcacgcgcctgtaatcccagctactcgggaggctgaggcaggataatcacttgaacccagggggcggaggttgcagtgagccaagattgcaccactgcactccagcctgggtgacagagcaacactctgtctcattaaaaacaaacaaacaaacaaaagacaaaaaaaaaaaagagagagagaaattgaatgtcctttccccgacctaatcccttctcaaaggcaggcagttcccgtcttctctggaactgaaaagcacccctatttatacacatggatctcagtgtctcccagaacccagcatgaggacaggggcctcagctgctcaccaggatcacccagggcccagcagacagggcgttccttgttaggtgcacagaagcccagggtgtcacagagccgcctcaccctccccattgagcctgttcctgcacgtgccacctggtgtcctgtccaggtttgattgttacaaagaactccgcgtgaacgtccttgtgcacacaactccatgtccttgtgcaagcagatcttcaggctctattcctggaaacaagaatgctagctttaaaattttgacagatcatgccaaaatgccctccaaaaaagtgtctactttcccaaacctttcaccattaataaaatgtttaaaaattttgtaaaaaccctgcccatttgacctatgagtaagggtttgtatgtttcgctaacctgacacaaacgaaaacaatttcgtcctctcacgtgagcatttctgcactccagggacggcactggttcagagctgcctctgcggagcctggtgctttagctttcctcctgctgagagtttgcccctttgatttaagcagcaaataccaggtgccagatgaatgctgttccctcccactccccagcctctggttgcattgtatgttagggtcagaggacagccctccaccaagatctctgtcctgcccctttttccatgggggagggcttagagcttaggagccactgaggtgggaagcaggaccccgccccatgacgccccttcccaaatgccaggcacaaatttctgctgctagaccctcacccacacacctctgtctactctcttgccagcctcacctcaatttccacccttccctgtttcttttctccaaaagggagcctcttccccagggtccctggcacagagtggagagtatattgaaatgcatgctctggccttgacaagctgatggaaacttgggggcacaggctgatggaatattggggtgcaggctgatgggatcttggggtgcaggctgatggaatcttggggtacaggctgatggaattttgggatgcaggctgatggaattttgggatgcaggctgatgggatcttggggtgcaggctgatggaatcttggggtacaggctgatgaaatattggggccaggctgatggaattttgtgatgcaagctgatgggatcttggggtacaggctgatggaatattgggggcgggctgatagaattttggggcacaggctgatggaatattggagcgcaggctgatggaatattgggtgcaggctgatggaattttggggtgcaggctggtcgaatttgggggcacaggctgatggaatgttggagtgcaggctgatggaatcttgggggcaggttgatggaatcttggggttcaggctgatggactcttggcagattgatggaatcttggggtgcacattgatggaatcttggagtgcacgttgatggaatcttgggggggcaggctgatggagtattgggggcaggctgatggaatcttggggtacaggctgatgaatattggggtgcaagaatactgggtgcaggctgttggaatcttgggccacaggccacgtcagtgagtaaaatcacagcttacaggcccatgttactcggagaatttgcaatgctagaagctcccttctctggaaagctgtatgcctctcacttccctcccacctggttgccacccacccttgccccagggctcagcagcctcctctttcaggatcccaggtccctggagggcccacagaagtccaggcatgatggaaatgactccagctgcctgtgctccacctagcctgcagggccacagcttgatgggaaaggccccaggctccagccccgggtatcagtattcacgtgtatgcagagattgaaatgtcagcatgccaggggcggctcctgctggagccctgccatgggctggctgagctacacggaaatgttgatattcctccgttttactaaaaggcaccatcagaactctctgaactgctggcttcggcgacctccaaggaggaaaggggacctccctgtgtgtcacagggctctgggcgtgtttgcccggtgaccagcagccctgtttgtgcagcaaaggaaaacccggagtagtggcataaggggaaaggggcagtccaggcctgagcacaccggacctgggttctgttctgttctgtttgtttttgtagttgtggtaaaatattaacatatggcatggaatttaccatctcacccatcttcaggtgtatggttcagtagtgttaggtatacagatggtcctcaacttacaatttttcgatcttacagtggtgcaagagcaatacacacttggtagaaatggtgctttgagtatccatgcaaccattctttttcactttcatagagtattcaataaattacatgagatattcaacacttttgtgtaactaggccttgtgtaagttgactctgcccagctgtaggctgatgtaagtgttctgagtgcattgaaggtgggctaggctaagctatgatattgagtcagtacaagtattaaatgaatttttgacttaaaatattttcaagatatggtattttcaacttaagatggctttatggggatgctgaccccatggtatgtggaggagtacctgtatccatccccatggtatgtggaggagcacctgtatccatccccgtggtatatggaggagcacctgtatccatccccgtggtatgtggaggagcacctgtatccatccccgtggtatgtggaggagtacctgtatccatccccgtggtatgtggaggagtacctgtatccatccccgtgttatgtggaggagtacctgtatccatccccgtggtatgtggagaagtacctgtatccatccccatggtatgtggaggagtacctgtatccatctccgtggtatgtggaggagtacctgtatccatccccgtggtatgtggaggagtacctgtatccatccccgtggtatgtggaggagtacctgtattcacactgttgtggaactgatctctccaattcttccgtctccattgaaacactgtctccattcaacactgactcgcccttcctcagctgcctagcccctggcacccacactgtgctttctgcctctgtgaatctgatgcttctagggacctcctataagtagaatcccatggggtttgcttttttgtgaccgtcctatttcatggagccccatgtcctcaaggttgtagcacgtatccaagcttccttcccttttgagactgaataatattccatcatgtgttgactatggtttttctctgttgagcaagccttcatcaattttaatagataggcagaatattattttctgaaagtgtaataatatgaatacccagcaagaacacagctaagcgcacagaaatacactcattaggaagtcttagacatttctctttccttggaagccctggccttgcccagactgccaggactgcctggtggttttcccaaacctggttagcaggagcctcccacaaagcccccgcgggcacgtcaagattggagtttggagggcccctgtgcatcccacccactgcgcaaacaaagcagcggttagaagcagcagcaagaacagattgaaatagaagttgcctgttttatttctcttttaccccaaactgtgacaatctagccagatgatgaagaactgctttcaagcaggtgccaaaatagaaacagtagaggaagcaggaaccaatgcccatggtttggggccctgctcacatgcccagcccactcccggccccgggtctcagacctgacaggagcccctggccatccaccccatttgctgtgaaatcgtttccacttcacttcatggggagtcctggcgcagccgctgctctttctgcgttgagggttaggcaggagggctcctttccccgatcctgctccctgagctgagtcgtgtctgaaaaaagcagaactgatgtaagagaaatagaaaacattttatctttagggttggcaaggtctttctagaaaagcagtgtctaagatgaaaagtcaaggccccatcccggctcctgggcacacacatacgtggtgccatgacctttggggaagatgccatgttgtgattgtaaaagcagctatcatgagaccctcaggtcaggtgtaaaggccaatccctcccagaaaggagggggagaactggaggcacatggagaagcccaggacggaggagtcagggagaattctacaacgacagaagtcaggtagaaaatgttgattgtatacatgaggaagcagcagagcggacagctcaggacaggaaggtgtcctcagtcccggtgaacacagactgaggacagtaccaggccatgaccagggaccatgaggcccatgcagacccccagcaagcgttctggacaggtgctaaggccaagccacatagcagacgcagcagagcctagggtggtgatggtgagtaagacctaacactcactccccgagcccagaacctcacagtgagggaacagactcacataagagcctcggatgcgggcactggggcaaggccaaccacgggacagatgcaatgccactggcacacactgtgggggacactggctttacactcagagaaatctgaggaggcttcctaggaacttgagacccttggggtctgtgcccgaggagagctcaacctgcagctcaccctccccctaagccgccgacagacgtgtcattcattcatctcattcggccgacacagacagacatgcctccaccagcaccgatgatctccgtccaggtctggtttacaaagttgagtaccgtggcctgctctttagaggagagaagagaccatcttttagagaatgctgtggactggggtgaaggagattacagatgctgcaacatggtgccaggccagcgatcagcaacacagaggagaaatgtctagtccagatggggtgaacaggccagggcccttcaggagccaagacaggagctgaattttgaaaaaaggcacagctcaccacagggaggaaggttacattgagggctttaagtgactcttggagtccgggctttgaatgcaccaccttggtggccgcggaggagagctggaatggacgggcaggcagacacgttgagccgttcctgcagacctaagcgaggcatgatgagggctagacctccaacatgaaaggaaggacagattagaggactgtttaggaaacagaatgagcagggccttgtgggtgaatcccggcaggagaggtggccccagccccagcagctgcacgggtggcaatgctggcagttgggaacacaaggaaagaatgaagccttgaacgccatgggtatcttagtctgctcagccgtcacaacagaataccctaggccaggtggcttgagcaactgacctctatcccctgtccctgggctggaagtctgagatcaggttccagctgatctggtttctggggaggcctctcttcctggttggcagacaggggccttctcactgtgtcctcacaaggcagggagagagcaggctcgctggcatctcctctcataaggactctgatcccatcagatcaggaccccacccttacaagcccatttacatgaattattcccttagaggccccagctccaaacacacccaggggttagggcttcaacacaggaacctcgagggacacaaatactcacaccataaaagtggggaaagatggttatttcattttaaatacgtgaacttgagattctgtgggactttgaagggggaatatccaccaagcagctggtaacgggcctcgggaagtgtctgaggagagccgcgtaggaatcggaaatcagcagcactcaggtcacacttgaccctgcaggttcaccccgggactcaggggtccagggggaagagcatcagcaaagacacccctgggagacacacacgttttgtgacaggtggaggcggagaggccgtgatgaagacagagttgcatggtggcattaggggagccaggcgccatgatgtgcagaagcttccagagaaaagaacacacacaatactgggaaagtggcgagaggccggtgtggcggagagttcaaaacgatgctgggctcatttggggcattggccgtgggaatacaactgaggcactttgtggagagtttagggaaaagatcaggcaccaaaaccagactgagataggacgagagtcagatggaaagttcagggggttgtagaggacatgactaatggttctagaaatgcagaccagacgagaggggaggaacgacgttggcagtagctggaaaggcgcagaagtgggcaggacctcacaggcagagagaaatgtgggtctggaatttatctgaagaggagaaaccaggaggaagaaatggtttaaagatacagaaggcagcaggagtaccaggtggagacagatcttggtggaggtcaggaagccacagacaagctggacaaatgtggctgtaactgcactggggagctgggggtcctcagagcagagctccatctggggggagccaggggtcctcggagcagagctccatctgctccatctggacaaggacttcatgggagtcattcacacacgcgtcgggcacccgagtggggttgcagggtgtggtggtgtctgggacaccttcaggagaggggattccaagggaatcacggccatgccaaggacacacagggaattggagaccacgtgttggccactggagggaagggcacacttttgtccccaacactcagctgtcaggatgtggggaagacagcagcgtgggagccttactccagccccattgacatgcaggtgcatgcgggaggtgcagagggagcagctccaggccaccagccaccaaggggctgtggaatttggaggatcctgtgagggaggccgcagccagccagcaggcgaggacagagcgagaaggcacactccacagttcccctaggcccagggaagaggctcctgagggaaggactcctgccaccctccacagttccccaggcctggccttcctcctgtctctgggagcatctcctcctagccatcccaagctgcctcatccccatggtgtttcacacctgtgagccctttggggtgccaagagcaccctttcccacatctccctgtgagcccttccaggtgccgagaataccctttcccccatctccctgtgagcccttccgggtgccgagaacaccctttcctccatctccctgtgagcccttcggggtgccgagaacaccctttcctccatctccccatctgccatgtgatgcctccttatcttccagacaatgtcagtggaggctgttcaggacttattatgggccagacagagctctaagcacctccgcataccaaccttcttaatcctcacagcagcctgaagaaatgggctctgtaattatccctgttttaaagatcaggacattgaggcaaagagaagagaacttcctgcctggggtcctgtgagtgacggagccagggctcaggtccaggctgcctgaccccccgtgagtgactcctttccactatctcatctctccctgactccgatccctgtgatgatcttggtgaaactgccccagcctcctctctgcagacactgtcccttctctttctacccgatactaagtagctgctacatctgtcatgctccattgcaatgtctgtgcgtggggacctttgttccttcctgcacatctggggcacctcgctcggcgctgcacacacagctcctaagaaaagttttcctgcaccattgactcaatacattttataagaggagatttaagtctgtgttgaaacaggaagcagccatgtgttcgctgggtgcagatgtgaggaacctagggcctgccaggagacaggtgcaattcacaggtgtatgggagggtcaattcacaggtgtatgggaaggtcaattcacaggtgtatgggaaggtcaattcacaggtgtatgggagggtcaattcacaggtgtatgggaaggtcaattcacaggtgtatgggagggtcaattcacaggtgtatgggagggtcaattcacaggtgtatgggagggtcagttcacaggtgtatgggagggtcagttcacaggtgtatgggagggtcagttcacaggtgcatgggagggtcaattcacaggtgcatgggagggtcagttcacaggtgcatgggagggtcagttcacaggtgtatgggagggtcagttcacaggtgtatgggagggtcagttcacaggtgtatgggagggtcagttcacaggtgtatgggagggtcagttcacaggtgtatgggagggtcagttcacaggtgtatgggagggtcagttcacaggtgtatgggagggtcagttcacaggtgtatgggagggtcagttcacaggtgtatgggagggtcagttcacaggtgtatgggagggtcagttcacaggtgtatgggagggtcagttcacaggtgtatgggaaggttggaaggtgagagattctagtccagcaaaagaagtcaggaggtaaagttgggggagaaggaaccagggagtgctctgcccagtcctcagcacccccagaggtgagaggcccaacgccatcttcatgggagatcctcaccaagcgctgggcagccagtagatgcagggaggatggggcagaagagggagggaagtggaggttcctctgcagctgttgagacttctctctcatgtgcagtgccctgagcatccttttttgccaccacttcagttctcactccacttcagtgaaatttaagaagagtctccaaacttaaagttctaactctgaaaaacaagtatttttagaagtaactcatatcttaagagtctcgtccaccatacatttttttaaagtccttccctaggccctcttaaaaccttttctgtctggaacatgtgaattgttctatttattttttggttcctctctagtccattataaatgagaacataaccttttatagaatgtttgtcttgcttgatatatctcaagggaattgttgcaaaaataaatcaccatattgagtacttactatgtgagctattttttaaatcagtcatctcatttaatggaagattagcgagaataggctgacggccatgacaaacacacttcaaactatttgagcagagctgaggtctacacacatcacagtgctggacaggcaacagggagaagggctctggcaccttcgacacactttcatacggttgtttttattccataacagagagaggaagagaacgtggaggatcccaagagggaggtgtttagggtctggatctggaggagcacaccttacctctttctcattccatctgtaaaaaccaccccacagtgtcacctaacactgggaagctgggaattccataagtaaatcctgccccaagatgtcacctaccattagggaagctgggaattccataagtaaaacaggccccccagtgtcacctagtaccaggaagctgggaatatggtctcccatgatcccaaacaggacgcctgcatgctctcttgcctctctgtggtgctgagtagccatagtttttacacaacacaggtaaacattcaaccaacgcgccctgagatctgtgtggtcctgttttagagatgagggaactgactcggagggcaagccacgctcccggatgcattgccagtagggagagacgctggggctgctccagggctgctgggtctcatttgtggacacacccgtgcgatccaggacaagactctcagggcgcagggcgtccacagcaagcatgcagctcatctactaggattctggttttgatctcaggacagatcactagctggtgtctggaggtgtgggggaagtacagtgaggggaccctccccagctgtcctctctaggggggcgccctgcctctggatccccaggagggtagttcctcgtctgccaattgtgtggaggggaggggtcctcgctctccctgtcatggacaaggactggccaccctgtccagagaccagatatatagacagggcacactcaggaggttccagttgctctgcactgaagtctctgatgatgattccaaattccacatcatcagggaataaatattttgtgtgtcagcaatgctgatccctgccgtagacagagccctggggccgtgtcacctcagaatgttcctccaggactctcctggcgctccctggatgctccccttttcccaaccagagaggtcccctcaactctctgagatccccttctaggcagagggtggcgggaatgaggaccacattgccaggggctcctccaggcccggtgggagctttctgtttgacccaggcatgtttcaatggcataccttgttttataacacaggaagaaagttctcctgagctctgggtccctctgtgatctgcaggaggtggaagggagggtggccccagcccaggagtaaatgcagcacaagggagggagacagagagcatttccatccagggctgaaccctgccgtgccccagctcctacgaagccccatgcccccattctgggctggcagcccctcactatcagcccttcagtcatctggccaggtcaccacctcagggaaaagagaggaaatgttgctgcgctgtgtccaggccgtgatctctagtcctggaggccaggcaggttgacccatccagagccctgcaggatggggaggggtctggggcaccagcaggggtggggattgctaaagtgagatcctcgccaggatgcgcctcctcctgcatctgctctggagaaagcaggactcagtcagtgagccccaccccaccccaccacctgctctcatgaggaacctcacttctgagaattacattcccgacccccaccccatgctccccctgcccccacgccactcctgtggaaaactggccttactgaaccactttacaaggaagccttcagggacttgacttctctgacctttggagtcagctccctgctctgcctcaggcccagacaccctccaaggggagccctccgctttccccgacgccggccctgcactgacccggtacccggtgctgcgtcctaaaagcacctcagaccctttgcttcttttcctttaatctccatcttttagtgtttgacgggaagcaattgggagggaaagagtcagattcaacatctgtctcgaactgtgaatcccaaagggccctgtgaatagcagcagggagaggtgacatctggtcaacctcctctgcctgaaacaacccagtgttctggcccagcgctgaccagggtggagcgcgaccctgctttgtttttgcaggaagattccctcctgaagcactcccacattcgcccgccccccagccctccccaggacctggcaagcattcagcagatgctgaatgaaagcactgagcttcagcagggccctctgcgccagcgcaggaagccgaactgtgtcccatgcccgagcaccgtgccggtcttctagtttgttctccaaagtggcacaaacaaagcagcttaaacccaggccctgtcattagctcagttttcccatggtggaagcccaggctggcctaagggggtcctctgcaggtggcgtcccccctggagctcacagtccaactcacagctcatgcgggttcctggcagaactcagctcctgagcttgcagctgtcaggcccgactgtcctgctggacgttgggcagagtcgtcctccgcggatgaggcccccaggtcctggccacacagccggtggcctcactgcttggcagctgggctggggtctcataggatgtcaccccatcatgggggcaatgactatactgtgttcacaggaccatccacactcaaggacagaggcccacgcacggcaggtgcacacggggagactttggggccaccttagcattctgcccactggaaggggactatccagccactgcgctaggatcttcagagaaataaaaatttcaagacagtctctgtcccaagaaacttagcctgttataattttatagggaaaaccaatatacaaacaaaaaattaacagtacaaacaaataggatcattcttatatccaataaagagatggggaacctgatcttttaaaagcgggttcccatatgtgaattaatctcaattaaacaaacaaaaaactttgacgttctcataattagtgtgaagctaagactgtaattccaatcttttgatttctccaaataatttctaataaacataatattacttgattcttaagggaagagtaagtaggttttcaggagtatgccaactttttaatggaattatgttataacatgtaaattctaccaatgtatctgttttctgtaactgaactaatttctgtctcctcctctactgtatggtgagagcttgctcgccataactaggtcgctgtggtgcctcccccccatcttcatcccaggtgcacctttggggcaggtggcagctcctggggggcccctttccctgccaaagcaccagcctcatgggcagctcctccaccttcccggctcccagccctgaggcctctctgtgtctgtcgccatcaggaaggcaggggagtggcgtgtctgaggtctctttccccagctccatgttgctctcaggggaaagggagaaagtctggctctcaggccactctctgaggacccacaggcatccaaaccccttactcctctccctcctgtcctctcccttctctgtctcctccctggagattcctccaccgctacctgatggggatgcatccttccaaatctatggctgctgccaggagttcctcctatctctgggatgtgtcatccacaaagcgaagcctttgaaacgcaaatgcctttttctctgattttcgcttctaacagctgttccttgaagcaccaaatgctagccaaaatggtggtaaaatgcataagaagaacaaattatgcatcagccgggatactgcggagtcctccccctctctctcctctggatgactcaatatgcatcagccgggatactgcggagtcctcctccactctctcctctcgacaactcgctgcacggatccatccctgagtgctggtcagtgctccccaaaggagccgcagagggcggcgtcccggcgccaccctcgcatggcctggccggggtgtcacaggctggcccctgagttctcacagggcccagggcacaaacttcaggacgagagcagctcaaatgcagaggcccatgcccctctcctccctgtgctcagccttctctgggatccgagctctccgtccaggctggcgctgacgtcagacatgttctggcctctatcctgccagccttctcagcactctgggttggagggaacattccaggaaggcagtatttcccagaggacagagcaccgccctgctctgctgggcacaaaattacctaaccctagagagacgtggagaaaataccaaactgaatctacattacagattgttggaagaattggttggggtcatgtatctaaaatgcttaatgcaggctcctaagcataggaatatgtttagtaagtctagtctgctttattagctattatttaaatttgttccatagcaagaatcactctctgtttagaatccaaactaaaaacgttccccaacccccatggagagggcttggcacgttccctaaaaagtcactgagcatcccacatcacctctgcccggcggccccgctggggggggaggcgcggcctcatcccatgggtcgtgccagggacggcgaggcccaggccaacactgtgccacgtaatggtcactggacacctgagactactcagctcttgaagtttggctcctgtgacagagaacttttaaaaattgttagatttcagtaaatataaatgtaaatttgaccacacgggacgagggccgccaccactggcagtgcagggctgaacacgcctccagccacggatcttcctacagggacccagcctcatcgctgctcgtgccaggagcctgacccacctgcagggctgaacatgcggccagccacgggtcttcctacaggcactcagcctcatcgctgctcctcccaggagcacgacccacctgcagggctgaacatgcagccagctgagggtcttcctgcaggcacccagcctcgtcactgcttctcccaggagcctgacccaagccccgcctgcagccttcgcttccgtcctgggggagctgctcagaggctgccctccagcgtcaaccacacccactccagcccactgcctgctccctcctccaggaccccggagccgaagccctgagccagatagggtggacctgagtgccccaagtggagagaaggctacaactacagctgccacagctatatctatgacaatgaaggttgcagccacaaccacagcaacaacagcctcacagccacagctctgacaacagcagcaacagccctcactaccacaaccaccacgactataacagccagcaccaccagctgggtgcccctgctgggtctgcctggggaggccaagctgccacagggctgtgcagcaggacaggtgtctcctcattgaggatcttttcctcccacgtgtcgatgccatttgaggagcttagggcaaaagctcacatttgcagaagagttatggttcacatgttaaaaagaaaacgaggtgcaataaggtccctttcacaggtgtaggggccaggccatcaacatatcccttcaggagacacagccaagccacagcagtgataacgttaacaaccgaggctcctgagaggcaagcaaaaggagaaacaaaactaaacatttcccttctgctaggattacactcagtcctcagcagcaagcagctgctcctgagaaagagaaaccctccaggagaggagggtttcactgtggacacagcagccctggtgaggcagtggctccttcacaggagaggagggtttcaccgtggacacagcagcagccatgaggcggtggcttctgactgccagggacccagatatccgggtcctgcacctcagcccctgacactcggagaccacctcagggtgagtttgctaccacaacagccatcctgtccctggaggaaggaaggggaccctctcgaaggacacaggctgtaggccacacttctgcctccaccctcagatccatgtggtcccagggccagccctcgccatcctgtggcagccaagtgcctgctgagcacgcaggagcatccctggggaagaggggctgacagtggacacaccctgcgctctccaggaaacagacccaacccacacaaagatggcagacaccttgcagaaaggtgcacgtgtgttcctcaatactgggtttattaggcatctctattgggaatcctagccaagctctgcagactgaaatcacatatatctccactaaatcttaaaacactactaaaatgacccactctcctcttataaacccacaaatataatgcaactaaataactaaataaggaagggaagtgcagaccatcccatccacaaagcactgggagccgcccagcccaagcacacatggctcaggcctcagctccctgcagaggagctgttggggagggagaggatgggggtggagagaaagagtgaagaaagaacccagaaaaagaggagtgaagagcatgcagaacctccatagaaaagaggctgggacctagagtggggattcagagttggtcggaaaacagaggagtagttgaattgtctaagaggggttcgactcccggatgccctgccacaggcctccttctccccggcagaaggataagctagaacagaagctctggagctagtgctaggaagagctggaaacaggatgagccgttgtactgaagatgggaacgtcaagtgagatggacaggccccaaggccttggtcccgtgtggctccgggaatccagcggctcctcctgctcctctgccttctccactccccgccactccagacagagcaggggcctcttctctagaaccaacagattcaagataaagggcctccaggcaccaatgtctgggatgtatgcgtgaacagccaaggactccggccactgaaggcaagcagtaaacaacatggcagaaaccaagcaaacaaaccagccttaccagggggcaaaagaagctcagaggaagcagaaacatttctggaaagaggagcaatctttttaaaaacctataatttgtcatcagacagaaaagaacagaaagaacattaaaatatattgtattcataacccaagaaacattcagagaacacgaatatctattttaaaaaataaataaaaagtttactttgaaagttaaaatgtaaaattgaggtaatgtcccataaattataaagagatgagaaaagaagataaaagattttgttaaaaaaaaataaagaattcaggagagttagtaatcaactaataggagtttctgaagaagtagcgagagtagagcaaatggaagaaagaaaattcccaaagaaagaaaacaaggaaaatccccatggcagagatcttgagttttcagatataaaggcctcgttgagtagccacgcaatcatgaaatggttctatgtcgtccggggctctacctgagaagcaggaccagtaggatttatatatggacgggttcatcacaaggaactggctgacaccatctgggaccggctccacaagtccaaaatctgtagggcagacaggcagcctagaaactcttgttcaggagaagttccattccacagggagaatttcttcttcctcggggaaaccttagttatattcttaaggtcttttgactgcttgagtccggcccactgagagtattgagaataatctccttacttaaagtcagctaggccaagtgtggtggctcacacctgtaatcccagtatttagggaggaggacgcaggaggatcacttgagcccaagagtttaagaccaacctgggcaacatggcaagacatcatctctacaaaaaatttaaaaattaaccaggcatggtggtacatggctgtggtcatagctatttgggaggctgaggagtgagaattgcttgagcccaagagttggaggctgcagtgagtatgatcatgccactgaactccagcctaggtaacaacagcaaaaccctgtctcaacaacaacaacaacaacaacaaaaagccaactgatggtagatgttagtcactctacaaaataccttcgcagcaacacttagataagtatttgattaaacaactggatgctgtgtcctctccatgttgacatataaaactgtcatagccaaccacacagaggttcatcatcatgaaattttgagaacctggagtggggatacagagaaagagagggacaaacagagacaaagtgagagacaaaagaaaaggaagctaagagatgtactcaacagcaatgctggaaacaagaatcaaatagaacaatgccttcaaaactcttaggaaaatgattgcacactcagtattctatactcaaccaaactatcaatttggaatgcaaaagcagcaagccccatccaatgggtgaccaagccccagcccttcttactcctcttgagtgggtgctctcttctgaacccattgctgcctcaggctgtactccctcattcctcccccaggcccctctgccagcttcctcgctggcccccccccactgccctctgccctctgcaagcatcctccaggctgctgccagtgagctctctaccaagcaaactctactgtgtggttgccaggattacatgcttccaatcctttgtcattgcctagaagctaaatccattctcctctgtaaggcacttgagatcttccctaataagctcttacccatccctccagctccctgcctctctgccccttggttgcacccagacctaaattcaaagctgaagacatgctgctcaggcttctttggcccttccactgctccttgtcctcttcaaacaaatgtctgtctttaaatacccatgcggactccacctccctctgtaatgctgcagagcatcacatcatcggaccatgtgcatccctgtagggcatgtgtattcacaggggcctctgcccgaactgcactggcagggcccgagtgtagcatctgtcactcacgggtgcatggagagaggctgcaggaggaggagtggagggtgaggctggtgctggatggcctgggtataaactcagccctgccttttctgactgtatggtctggggcaagttagctgttctgcgtctcgattctctcctctgtaaaatgggatggtcatagattgtttgagcagtgggccaagtctgaagagcatgccagcatgtgataagtaaagcatttacagcagctcaccactgctgttagcattgtcatgaccctcctgttaggactgtgcttgaggacaggaggtaagtgttgctgatgagtgaatagagataggacgtttgatgacctatggaagtggctcttcaaaacgtctcttctcaggccttcttctcctaacagtgttttgattgtcactgccgaatagcagtggctccagaatccatcccttgggcaggaggcaggtggactccctgggctgcaggaatgagctgtgtgggtagctgccatccctcaggctttgagagggacctttgtttcctgaggcaggtggacatgcaccccagtgggagggacctggtctgggagctgggagctgggggccatctgggtggtcacacggccacccacagctgcactttctgcaccacctgcctgtgtggctgtggccgaggcgtccacctgccacagaggtcactgttctagaaacgcttccctctctccatggtttgagagcaccctgtttggcacagaatatttttaggggaaaaacctccaaattctggatcttggcttgagaagggaccacgatgccattgcttcccactgagatggaagcagatctgatacacagtcagaggcagaaatgtcacgtggctccaagaacaccctcctgcccttcctcacatatgctggggccagagtccgggaagcgaaccacaggagagctgctctcgtggcgaccggggcaaatgcaggacaggctgtggctgctgcaccaaatccctgtttgcttattgaggagatgctccgtcatcatgagtcaatcagtgacaagaataggattaaaatacacagtaacagtgtacacctggagtgtattgtgtctcatataaattacatattatatagttagagtattaaaatagtagcagtggaatagggaatagtaaaataaataaaatgttattagagtgaaactcactgtgaaggaaactgtttgcccctggctgtgtggagctgatgttcagaggatactgaatcgcagacagcacctggctgggctcttcccacccgcagctctttgtcgtgagttctcatcctagcaccttccagctgcaacaaagcttctacacacactcccacctcctctcaaattacttatttttcttcccaatctgtgtgtcttgttaaccatatcccccttcgaaagtttcacttatttagttatttccaactgtaatgttctccaggaaaaggcccttctagctgatgtcctgataaaaaatgtcagggcctcccggagctcggtttgaagcccttctaaagctttcgctggaaccttcatctggaatccctggtgctgacgcctggtgccagacgtctggggcctggggcaagcgggtggagcagccgcctaactacttgctgcccggaacctccccgcactgaaacttggtgacttccaaacctacactcagcagcacttgactttaattggagaagcgtttctgtaacaggccgctgggtctcaggttcagaactaacgtgtgagtaaaatagtaagcaccctctttataatttacacccgggaccagccgtgggctgacctccttggctgagccaggtgtgtggactttcccgagagcccgggaccagcaccgcccccaggccaccgctagatggcactgtcaccgcaccagggccgccaccaccccccagggccgcgctgggcctgctcccagggttctcttccaaattggacctgagctggcagtgcagtcaccggattggaattggcagcaccgacacagccgcgtttggacagaatgcatcattcttcaggcccgtctttgtttcctaatttagtttcccaaactcttgctgaaggctcctgctccttaaataacaccattatttgtcattcccagcaggcagttttattaactgagagtgaagagaagcagcgtgagactgtgggcaaagccggtgctgaaccgcagtgtgggtccaggaatgtggactctgcagtttccggccgtgtggcgcccctatccccccacccatgggggacttgcctccctgcaccggtggcctctgcttcctggagccgtcggtcctctgggtggttctctcccatgcacttaattaaccgcacataacttagttctgttcctttattttcaaggtaggagaagccaggatggggagatccctaatagatatgactaaatacacttaataaggaactttgtaatcaagtcatgagaaaatgggcctttttgacataagagtggacaagtaccccagtgcccacctcccagcaggagccaccttctgaccacactgcatgatttcaggagctgaggcacccatggggagctgaggacaaggtggccgtgtgcagcccctctggagcacggcgtctgcagggacccctgggtgctgccgacaacaggggtccaccctgggacggaaccaactggcaggaccccggggtcctctcgtctacctctcaccctacaatgcaggccccaggcccccagccgggcagtgaggccctgtgcatacactggggcataggaacgggacagggccaccccctggggggccacagctgtcactgtgcgctcactcagtggccttgaaagaagcgcctgaagcgagagaacatgggtgacggggtttccctgaagtcaagtcaaagcagccaacgtgcaccatgtccatcctcattttatgcgccttcgtcttggcgtagcctcagcagctgcttttggctgtggcttttaagctgtgaaagtatttgctgggaatgtccttggctcctcacgcagcacctcctccccgttaggctggtttctctgctggatctaaaacaggagggaggaagcatcgtgagtggcgtgggggggcttgagcggctcctccctctctcctctgggggtgcccaccggggcccaaagcttctgggaacccggcggagagctctgctcctgagccaggaattgccaggcaccacacaactgctatccgcggggcctgtccggtttccccaagtgcttctgcttcattcgctaatccatacagcgtagctcagaatgatcgcttgccttgggtccccaaacactacctgagctggaaagtgcttgtgtgatgtgttagtaatggataatacaaaatttttaacatgggactttaagccatcaaaatttctgttttatttcttaacaacaacaacaaaaaggctgaatgtggtggttcatacctgtaatcctagcactttgggaggctgaggcaggagggtcgcttgagatcaggagttcgagaccagcctgggcaacatggtgagacctagtttctattaaaatatttttaaaagaaaaaaaagagataactgtgccatggggcgttccattggtgatgaagcgtgctgatgcacagggagccacggagtttctcggggcggtgccgtgtgcctctcacctggatgcctggagccactccccagtctaagggtttgaatgcaggaaaagccatctatggctaagaagagacaaaaaataattctaaactagaaaagataaactacaggacaaaggagagatgggccaggcagccctgggacactggcctgaccgactgtctggtgcggagaggccgggagttctgggggcagggcatggggaaggggtggctgttaggattccatggaggtgtacccaggggggtgctcccccacactcttccctcctcagaatcagagtgggaaagcagctcggcctctcggcccctcttgcttcctgacaactgagaggcaggacactgtccttcctattttattcacgcaacagacatccctctagggcccgtggtttcccaggcaggaaccgtgattctgagtggagagggtggaaaggacacggggatgaccctgctggggtagagctgacagcatcatgaggcaagagccactgaagaagcaaatgcaccccctcatgacgagtgggagcagggagggaccccagcgacagagaggatggggaaggggcctgttgatgctgctcagcgaaggtggcagagacatccgcaccaacacagccaggctctgggagctgcgtcaccaagcccagccgcagaggggcctcacctcgggctctcaaccatgtgccccagagagccaggcctgtggcggccggagctcactgagctgattccacaggacggaacctcacctgttctcccaggcctggctatcctgacatctgcctttcatggttctggtttaatatcctttctctatattcaaccttcaaaatatccctatgaggtgggaaattttgtttgcttttaaattcccattttacaaatgaaacacccgagcttagaaaggtcactagaataagtcagcagcagaagcaggacttagcagagaaagtctgacttccaagcctgtacttcacttctccctggagctcctaggttgtaggtaacaagaatccccaagaagcaagcctggagcagagccagggaaacgaggttccactctccaccccaccactaaggagctgttcgttcatgggtgaatgctctccgccaggcctgcacctaccattctgcaagcatttagtgcactgtgggaaaaagaaagtgagacctgccctaaagaacttaactgagcagatctttaaaaattctgcggcaagacccataaaagagaaagaggctggggagctccgcacccccagtgaggtggaggctgggggcagtttctgcaaaagccgaatcctaaaggaaaaatcactgacatgatgtcagtctgtttccattttctatgctgtgcatttttactaaacatgtcccatctgcaaaggctcctggacaccgggatacacatagcaatgtggtgggcattccgaggaaccaccctcagaccagcagaagaggaaaagataaccaaggatgggaaccgcccatgtccacgtcccgggaggctgcgctccagggcgcaggggattcgaggaaggcagcgctgtggtgggccagagcctgggcctggagggcctcctggtgcaggccgggccctgctttgtggacaaaacagtaaagagttgggaggtcagttggatggggacagggcgggacagcaaactcaagtgggagtgccaggggcgttcacctagcggcagagaagatcgctggcctggggaattcgtgagtggacagcgggaggcagcacgtgtgagaagagcccgtcgcaaaggccatctaggacagcggcccccaaccttttggcacaagggaccggtttcatggaagctaatttttctttcttttttttttttttttggggacggagtctcgctctgtcgcccaggctggagtgcagtggcgcgatctcggctcactgcaagctccgcctcccgggttcgcgccattctcctgcctcagcctcccgagtagctgggactacaggcgcccgctaccacgcccggctaattttttgtatttctagtacagacggggtttcaccgtgttagccaggatggtctcgatctcctgaccgcgtgatccgcccgcctcggcctcccaaagtgctgggattacaggcgtgagccaccgcgcccggccggaagctaatttttctacagaaaaggggtgggatggtttctggatgaaaccgttccacctgggatcaccaggattaacttctaaggagcccgcagcccggaccccctcgcaggcgcagttctcagtagcgtttgcgctcctgggagaatcgaatcccgccgctgacgtgtcgggaggcggagctcaggtgagaatgctcgcccgcccactgcccacctccacctgtacggcccggttcctcacaggccacggccgggagtttggggacccctgctctaggaaatattccagcatcggcagctgctctcagagaagctgctggaagctctcctgggggagtgggggcaatcacagctgtgcccctggggccatttctcagctgtgggatggaacggatgggacccaggctgaggcccaggggcctcgctgagggagaaagaagcacagacctggactgaagtgatgaagagaagggagggggttcaggcgcaaacagcagaggctgctcgctgggaggacggcaaggaggaggaggcgtgcctttgtggccctccctctctcccccccacctgcagctcctggcccctcaatgccattcgcaaacacagggaaagtcgaaagggctgcggaggttcagacggcggaaggccagagaggttcagcgggggaaagatgggagctgctccctgcatttgtgaggatcatactgagccgggctgggccacacgcaccgtggaccgaccaggcgtcacccttgtcctacagtcacagtcttaggacctctgcaggaggccctcaccccagccctcctctcatcttaacccagggcggcagctgcattcaagagtctttttttttttttttttttttgagacggagtcctgctctgtcacccaggctggagtgcagcagtgcgatctcggctcactgcaacctctgcctcccgggttcaagagattctcctgcctcagcctcccaagtagctgggattataggcacctgccaccacgcccagctaatttttgtatttttagtagagacagggtttcaccatgttggccaggctggtctggaactcctgacctcatgatctgtccgcctcggcctcacaaagtgctaggattacaggcatgaaccaccgcgcccggctaagagtcttctcttaacttggaagtcctgcaaaatcctgccgcaggcctctttgagggctcagtctgcaccttccagagcctgggtgcactcacactcaccctgggcctccactcactgagccatcacaaagtgcattcagacattttatgctttcagaagtcgtcactgggcacctattccatctccagcactctcccatcatggggatacagagcagtgaacaaaaaagtgcattttaatccttgccctcaagaatacacattcttttcattaaacttcacaaacacagtcaattcaatattttattctcatttcataagtgagcaaacaggactgcctaagtctttcctagccagttccacgtcttatgtgcgttagagcatcagggggtgcggtgtgaggtccagtgggcctcctggtctcacaaaggacttgccagatgtagtcacctgactgcagagtctacctggatgcgggggccaaagcgcagacacacctgcaggaagatgtgtgtgacagccacagtgtgtccagtggcaggaaggggaaaagtggcgttaacatccaagcatcctattttaggagagccttaacagatcttttgagaacttcttattttacaaatgaaaatatccagctcgccttcagaagcagatttacggataagctagggaagcagaagtgtcagcccccaccccagccggatttgcagggcgtcctgctgggatctgatggggaggcaggagaagacccaggagggtgccccggagtggggacgactgccaggttgttgcccaggccccatcagggaggactgaagaggagcctgttccctccggaacgcgaggggttcgttcacgccccacactaaagacagcttgagtagcacagggatttccggtgtaaacagcagcaggcagggtgagaggatccatcagaagcagcagtgccaatgtctagtaacaaataaatgaacaaaaaaacagcaaagggaaccacgagccaggaccccctcagggactgtccggattcctggggatgcagtcagggcaagcaggagaagccagggcgcccaccgtgcccaccctgtcaggccacccagttcccagaggcctctctgctcctggggcttcccgtgcggcttgccctgggatgggataggacgcgggagctgatgatgctggagctgatgacgccagagctgatgacgccagagctgatgatgctggagctgatgacgctggggttaaagtccccgctgctccttctcccactgaacctaggaacatcatcagcaaacacagcagttcacagccacagagttgtggtatgagcaacaaatactggtgattgtcttagacgttccagggctgcaaaaacaaataccataccttgggcagcatagaaaccagaaatttattcctccaagttctggagactggaagtccgagaccgaggcaccagcagattcggcatctggcaactgctgctctctggttggtggacgacgccttctcactctgtcctcacatgggagaaggggttaaggagctgtctgggtccctgttataagggcacggatcccatcacgaggcctcctcacttcccatacgccccttctcctaacaccatcccggtgggggtcaggatttcagtgcacgagttttcaggggacacagtcaggcaacagcaatgattatttagaattttatgaatattctattataattatgagatgcaaacatcacatcaaaaaaataacaacttagacctgtggtgtggatgaagaatactggaaatatttttatacaaagataggatttccccaaaaacaaccactaatatccccagttgaaaatgtattacgatcaagttcttctgctatgaattttcctgttttcttaaattttaaaagaaaatgtattacaaaaataatatttagaaagcttaattatattaatgcagatattagagatatttctaataatgatgtaatctgcctgcactagtaaagagtgtttctagatatatcactaacacatcatcacaccacttacggacacggtccatctaacacttcatatacaggtgaaatacaatattatgtatagagagaataaacacatatgtcatatacatatataaaacattataggcggggtgcggtggctcatgcctgtaatcctagcactttgggaggccaaggcgggcagatcacctgaggtcaggagttgaagaccagcctggccaatatggtgaaaccctgtctctactaaaaatacaaaaattagccaggtgtggtggcacacacctgtaatcccagaggctataattctgtaatcgggaggctgaggcgggagaatcactggaacccaggaggcagaggctgcagtgagccgacatcgggccactgcactccagcctgggtgacagagcaagaccctctcaaaaaaaaaaaaaaaaagcgttatatatagaagtttttcacctcacccatagttaagtgccagatggcccctggcctttagcacagtgaggactccagttgaccagcacgtccaggagcccctggaagggagggaaggcccctcggagactgaggagttgtgaggaagccgaggcacgggactgcatggaagaggcgctccgcacacaggacacgccatcttcagcaaacacccaacaggacagaaaaggaggcagaggtgccttcctgccccggaggctgccagccacatctgccacatacactgtgaagagctgagacgcatcctgacgtcgacaaaccagtggctgagaaaagtgaagagacacctggaaagtttgaaaacagactgaatagctgctgatactagaaaactggctaaaaattgtaagtgagataaggagattgcagttatgttttcacctttgagactggggaagcaggaggggcacaggtgactagccttgagagataacagctgaatttggggtgagttcattattctgctgtctctacttttgtatatttgaaattaacttttaaacccaacctttctatgagcttgatgctttccataataaagatttttaagcaatattatcactctacaaaagttccaaaaagctctgaaagttatacaatgaagggcagatttcctctgctctcagagccccagctcccaagaccccccgccaagaggcagccccagccgagcacccatgatcagtgctcaccacatgcatgagtgcacacacatgcaccccatgtgtgcataactgtcatactgtatgcattggtctttttgctttttctcattttcagacagccttttgctggcaaccaacctaataatgctattctacgccttgcttaccaccacttccctgcagggctgggacattagacagttgactaatggccgtcctgtgtcttgtccacagcttgtcaggatgcccgagagccacgtcagcgatgaagaaggcaaagctttctggagagcagatgctgaccatcaaacagcgggccagcaacggtgagcacccctccagccctcgtggcacccatggtcaggaaggcccagcgggcacggccatgccagctgtgtgtcctttgacagttacagctcacttttcttagaaagcaggggcagagataattctggccctctcatctataaagcgaagcaacttgagaaaaagcagtctttctcaaaaccgtctcccaccttcaccgatttcactgctcaccggaatcatgagcccaagtcctgagggtctctccagcactggacgatttactccctggaaccccagtgtgcccacatttctgcctgtgtccctcaggccctcatccagggtttctccacccaggagcagctttggggccaccccaggccacagataacaaggatggcaccccctcccctgtcgccctcactctctgcatgtctggtgcctgattttcttgattccacctgcaaatctgttttgttctgagggtctctcttgtcaccaaccagcacaggtgtgtagagagttctgcagaggaaaactgggggcctctggaggagcaggagagaggagagccacttaagcccttagaaacatccacagtccaccctcatgatctggggactctatttgcgaggtcacctccctgccgaaattaatttgtagacgcaggcaatgatctcagtgcttttgtagttagtcctgtgcactcgcagagcagctgaagtgtctggtgttcctaagggcagggggctgtgatgtgcctcacagagaaaacacacgctagccaagctcccttcagacaggagtcatggttgtgactgttggctgggagtttctatgttaaggaatccacagtatctattaaataggttgtctttaaatgggagcacacataaaacaggtgtattcgtgcattctcacactgctatgaagaaatacccgagactgggtaatttataaaggaaagaggattaatcaactcacagctccacatggctggggaggtctcaggaaacctacaatcatggtgcaaagggaagcaaatgtgtccttcttcacatggcggcaggagagagaagtgcagagcaaagtgggaaaagccctaataaaacctccagatctcatgagaactcagtatcaggaacagcatggaggtaaccacccccatgattcaattacctcccaccaggtccctcccacgacacgtggaggttatgggaactataattcaagatgagatttgggtggggacacagccaaaccatattaacagggttttttattgatcgattgacaaaaatgggaccagagggtggcaggagcttggccctttgtttccaaaagcagtgattctgctctcagcctgtgtgcagtaactttatagcacatggctcctgggaataatgagatcagctgtaacctgtagccattgagcagactggtccccttcacagcagaagcccagcctccccttctcagctttcacttgcaagatgcacccctaattttgtatttctaaatggagcctgcaaacctcttcaagcaccacaaagcacggatgccctgggctgaaggctcccagacctatgatgcacagatccaccctacaaagctgaacctgggcagaacctggcaccctcctgctgtacctttaccaaagggcacctcctccccaaatccaccaagagtgagccacacctgagcagctcccaagcatgcaggcatgaagcccctggccacagccacgggggtctcctctcatctgactgttattggtggtcctgaggacagcatgagagacgcctgaacgtcccacgtgtgtgtacctgcaggactccctctgccagcagccagtacaaactattcctcaacatgtggcccattgttcaccagaaaggtcatcagcttcttgacattggtcctcaaggtctggggctcctggaggcatcctgtcccccaggctgctcctgtctcccaggctgctcctgtcagtttctgccttccagaataccctgacccaccctcacaacctctccctgtggatgcagtcccaagcagccagtgtaaggaccccgcttttgagacaccaggatagccaactttcgctttctagttattacggagcagtgctccttgccagaaagaaaacattccctaagccccatctgcatgccgggcgcttttcaaaatacttagagggcatttcacccccgaataaccctggattaaagtggaaatccttagacaattgatccgagtccacgtgcctttgttccccattaatgaaggaagtggcggttaggttaggtaggccagttcaaaacagaaaaggaaagaaaatacggagagaacagatctgccaatcctagaggaggggccattcacacctgggctggtccacctgggcggcggtgggcagatccctgaggtggccatctcttcatcggtgggcctgagtcggcattgagggcactagacattcctattactgctgcacacaaggagttaattcacaaaaacaggtgctaactcggagggataaagataagcagttggtctgtgactctaaactagaggaaccaacaactgggtgtcatcccaccagaaagcagccgggacacgggcattccagggccaccgtccgcccgctgggcccagctgctgctgctgggcagccttcagccaggtcgctgcatttcacccaagtttctagacacacagttcgtgttgtgctaagttttaggacaaacagttccccttgctgcagatcctaatgcacgcacgtccatgggtaaaaaagaggagctgcaggtcactgggagaacaggtggtggaagtgggtcttcctaagtccaagtgtgtgctgatgcctggggctgtcgattcctgacactgtttgcaccaaactgagatagttctttcttacccccagagcacagttgtgtgcccaggcatcatttccatgtctgtgtagctaatccaggaagggtccagggacctttcctgctgctcatcaggggacagaggcacagcatccaattcctgcggctcttcaggggacagaggcacagcatccaattcctgatgctcttcaggggacagaggcacagcatccaattcctgatgctgtggtaccattctttgcatctgaagctctgtgttcctgttgcccttgctgtagatgtggaaaagacaatccctctctttttttggactgggtctcgctctgtcacccaggctggagagcagtagcaccatcttggcttactgcaacctccgcctcccagggtcaagcgatcctcccacctcagcctcctgtgtagctgggactacagatgtgcactatcacactcagctaatttttgtatttttggtagagatggggcttcgccatgttgcccaggctgctctcaaactcctgagctcaagcaatccacctccctcggcctcccaaagtgctgggattacaggtgtaagccactatgcctggccttaaatattttactatagatgaggtctgactatgttgccccctgtgttgctcttgaactcctgagctcaagcgatctgcccacctcagcctcccaaagtgctgggattataggcgtgagccaccatgcccggccttcttttctttcatatcctgagtgtaaagcctttcctggggtcatttttataccttcagtgtaacaagagtgcgcagcagcttccctccatgtgaggcccagacactgtgtgggacagagaagccaccggaatccactgtgaggcactgactcggccaagaaggaccctggcactggattttagcgctttctcttgagcatttgtctgaaagggaagcagctattctaaatgtccttgaggttcccttctggctctaaagtatttttctttctttcttttttaagtttagggatgagcctgctctcatgtctctgcccaacaaggatcaccttattttctttatccgtggagtgatctcatcacgcattagtactcagctctgcctgagcagccggcgtggctgttagtgagtctcccttcagaacccttttgcagaagttcactgtatgcctcttagcaccttggcaccttggctgaagttgtaccatcagtggctttttggcgggtagtgggggcaggggcagtgtttaggagagaaggaaataagataatgctttttctttccttttactatcacagcagaaagcaagctagggaaaggagctctaacctccatcaagccctgaaaacatgaagcgctttgtcaggaacttcacctacttatttcgcttaatattcctgagagctccaaactgtgggaactcacgtttctattcagctgtaaggaaaaggaaattccaggaggcatggaaattccaccaagccattagtgagagtgaccagcgctggctgggttcaccatgggacactggtctctcaagagctaccaggatcctgaagtaaatcaaaatcttccaggaccacgctatgctaatttgagtaggatttgtttgcttctttgctttggtgtccagtgggtggattttctggctctgagatgctgctttttggctgggccctccctgctcaggccagttttttataaaggcagtttctcctgacagcttgcaggccaactggtggaatgtattataaaaccctagttgtggctgggcgcggtggctcacgcctgtaatcccagcagtttgggaggctgaggtgggcagatcacctgaggtcaggagttcaagaccagcctggccaacatggtgaaaccccatctctactaaaaataccaaaaattagccgggtgtagtggcaggcacgtataatcccagctactcaggaggctgagacaggagaatcgtttgaatccgagaggtggaggttgcagtgagccaaggtcacgccattgcactccagcctgggcaacaagagcaaactccatctcaaaacaaacaaacaacaacaacaaaaaaaccctagttccagcctaaccatccacaaagtgaggctcagctcagaggccccagcaaccccagggactgcttcctgggccagtcactgccctgctgcagggataaggagaattcccacccaacccagagctctcctctccctgagggggcttcacgccgaggcgcacgtgcctgggggctcgcaggatgtcccaggaatgtggctgtggacagctctacagaatcagtttgcaggccctcctcttccacataccctcgtcctacagaatctcatgggccgggaatgctctgtgacctgccggttcttcctggcaccgtttccctgtctccctcctcccccttacaaaggaatggcatgctgcacagagccgcagtgggcagccccaggactgagacgttcccaggctcccacaaagggctgttggtgaccacttgggcctgagggtggtcccccaggacagagcagagctatggaagtaatatccacccatccatcactcccagaacaaaattagagatgaaaggttgtcatgggacccgtatcaagacttttatttggatttaaaatgacactgacttctgtcagaacagttgacctgatctggcagatcaattagataacaaagcctgataggccagttagtttgacatttatcatgaattcttcaaactaagcatcccagtccaaggtttttgaaaggcctctgcgagatgggattcctaggaatgtgcttgagaaatttgcctgtgacagctgtagagggtcgaagcttcaccacgtccagtgttctgagggcctccttcacatggaggtgttctaaaggcatttggatgcttgcagtttaacagaagcttgtggggaatgcttctgaaatgatacgttcgttcataatttagttgctttatgaattgggattttttgcattgggtatttttatcttgagggtataacttttttttcgtttcactaaaagccgcatctaaggcccaatcccactgatccatcactttctcttactctcatctttctaacgtcttggtagagaggagcctccacctctgttctgctgatgtcagcagggtttttggggtgctctcaggcctcggcctctggttgattgtaccccttctgcccttctgtctgcaaagcttgaaaacagcatctacccactgggagtcctaggaggcctggatacattttccattagttttgagtaaagatccattgtggtgctgtgtggccaatgagaacagcaatctcaaatcctgaattttctagggtgattgtgtttgccaaactcctgctctccttctgtgtacacccaattgtgtgaggtcaagtggtcacaaatagagaggaatctccttctctttggcgttggcagtgtaatgttgccagtaaccagacacagccggccagggaagcaagtgtccagaatggcctttgtaaatatgggcatctgggccctgtgcccagctatgccaggactgatccaggtgccccagggacctcggcagggcagcagtcacccaccagggacactcagatggtcaggtacacacctggccgaggtcatcattctggcagagtttacaaattgggaattctgttagttagtgcatactttttaatcattcagaatgagattttttatttgctaaatgtcgaatattcagagagcccttttgtggccatctccctccggccagcccccatgtccctctcccacttcccacagcttcctgtcggtgggtaaggtgaggtcatcctcagcgtttgctggacggcatttgtcgttacacgtctgttgcccattttccgacccagaacctgacctgagtgagggcgggaggacctggccttgttggtgaacgtacctgcagagcctggctccaagcctggggtgtttgcagaatgactgatgcagacagcgagtcgagagagagaacaaaagcaggagaaaacaggccaggctcagcaaatcggcactcaggaccaggtggtttctgcctcgatacatctaagacccaggttaactgtccctgggagctcgaccctcaaagtgcctgggagtcttctgtgcgtctcaattgtttgttcctttttgtaggggaacttaggtggggaaggggcggtggtagggaatagaaagacacagagattgtgatgattttttcctttctaattcaagagtctattttccaagcaaattcaattacgaatataaaaggaacaaagaaagctcccaaaattctaactctaatatttttgtatataacagttttaacatactaatattcattattacaggtatagaaaatgatgaagaaatcaaacagttagatgaagaaatcaaggagctaaatgaatccaattcccagatggaagccgatatgattaaactcagaactcaggtaacagtttttgaagccctcaattttagctctaacacgcgccattataccagagatacatggcatgaaatcagcttttaggagagctgtcgtttcctcttatttgctcttttatttcctttatttttccaccttatgatattggtcttccgcagacaccattccgtggcagtgttcgctgtagcaggggccgtggttctctcgttttcagtctgcatgtgtgtttgtgttttttaataaagtgcatttgtgaataggcattttcagaggatcgcctgttcctgcaaacaatgaaggttttccttccaagatacttcaggtcctcctgttatttaatcactatattaaatgtatggcgacagccgatgttcccagaatttaaaacaaggagtgcctgccacataggactcctgggtgtctgggatttggggaagtggccccagtgacttgcagctgcagagcctggggatggagagagagcagtggcagctggcagagcagctgtggtcacctaaccccctccatgcccacaagcagcccacagggtaaacgtcctcagcctcatcttaaacatacagcttctaagatggagaggcagcttcctcagccaagccgaagccacagaggccaggctggaccctgtctgaccatgagccttgtgcctggcatcccccaccttgctgtgttagggtcccgccgaagtacactctgggagtggaatttatttgctgaccacccgaccctcacattgcccacagggtgagcagaggtgtcccttcctcttagaaatgaggtctccattctggcccctccccagcaggccacggtgtgatgaggttctcgggggatgctgaccagcctccatgaaggttgctcggtttgctgggaatgagccccgagaactggatggagatgaggatggtgtcaccgccagccatctacgtgatgatgctctcctcctaacacactccgagggctcccttattatccccgctctgtaaatgcagaggttgaggctggggaaggttgagggcctttcccatagtcagccgggtgtggtcaacggctctgctcaacaggtggtttctacccactggacacagttttcccaaggatggagacatcctctggggctggggccccaccaagcaaccgaaagggatttccaggccccccgtgagtaccaaggatgaggccaagggtgggaactccccaccaggccatgtggctgctgcctgggtgttttgatgccaacctacttccccagagggcatcactgccttgatctcacagacctggtagccccaggggctgtgttcaggtcttcccagagtctcgcattggcctggctggggctcacccaacacaggttggaatttcccttaagacttacctgaacgttaggcttggggaatggagtaacagcctgtggcattcctcacccccgggaccagccgaggccatggaggcagcatcttggactgtataggagactccatggctgccagagcactcaggagctgctgtttctgggagagagtaggaggtgaccaagtcagcaaagattgtttaattgggacagatcaaaaattcacccttgagtattactccgttctcacactgctaataaatacttgagactgggtagtttataaaggaaatgcgtttaatggactcacagttccacatggctggggaggcctcaggaaatttacaatcatggcagaaggtaaagaggaagcaaggcaccttcttcacaaggtggcaggaaggagaagtgcaagcagaggaaatgccagacactcataaaaccatcagatcttgtgagactcactcactatcatgaggacagcatgggggaacgcccccatgatttaattacctccacctggtcctgcccttcacaggtgggaattatagggattataattcgaggtgagatttgggtggggacacagagccaaaccatatcaagttgtattctgtttatgagggtgacaagcctgaaaatcttaatttatttcctcctttgaatggcaccttttggggcactctctgatgaggcagaatgcccttgtctgtccagggtgttgagtccatggtctactggggcaacccaattccaataggatgccattcaggaagggggttcttcccactttccaaaacccctccttctgcagtgaaggcctgctgctccgtggctgtccatgagggatagacggcagctctgatgccagctgtggatgaagtactggggctggggctcagccgagggctgagtaggcttagaggtcatgccgcctggatctgagccctaaagaacaacgcatgtgcctacgcaggctgcttagagtaggaaccccaggcacgctctgcacctgcacgggcgtggcctccccctcaggaaacactcaggtctgtgtctgttctcactggctcctttgtgcctttatctctgagatgagtagttgctcctaacagcatctatttggacctgatgtcaaaaatgaatgtgaagagttcacatttattctcactgactcggctgatgagagaggtgacttcccagatgtgcccagggatggaccttcctctattctagaagggatgggaatgcgctgagccggagtcccccagctctgcagctctcagggtcggatgatgagctccagcccagaagttgttctgtgagcaccaggcctgagctcagagacaggcagctgctgactcaggcagcttagagcctgatgttctttaaacaggttagatctggagcaaaacttaccagaaaacaatgtgcgcccacagccaggagccctccttgctgcctgtgcctcggccactgcccggggagtatggaggaggaacgtggggcaggccagctctccagggcataaagcggccctgcctgatggcctcggccttcctgcagcagccttcatgccccttgcattttcctttagaaggtcctgactttcccgtgcctctcaggcccgcacaccctcagggagcatggccaggaaggggaactggcccagaccccgtgttttcttgtccactctgacccaagagaaaggcagacttctcccagtgcgtcatgacatgttcaagacacactgacacgaggatgcagacctgtgcacagagcccaagccagagatgacacagggctgcaggcctgtcccaagcccaagccatgagataactgagaagtgggtgcccacggcctgatgttctctctggaatgggagcggaggaaagaacggtagggtcagtgctcaggcctacagcccggtgatgagggtcctgcacagggagaggtccagatttaaatctgataaagaacaaatccaagagaaggaaaaaggaaactccgtccaagcctttaaatttcacacctgtgccggatggggaagaccgccacgcctgtgccggatggagggagaccgccgcgcctgtgccggatggagggagaccgccgcgcctgtgccggagaagagggagaccgccgcgcctgtgccggatggagggagaccgccgcgcctgtgccggatggagggagaccgccgcgcctgtgccggagaagagggagaccgccgcgcctgtgccggatggagggagaccgccgcgcctgtgccggagaagggggagaccgccgcgcctgtgccggatggggggagaccgccgcgcctgtgccggatggggggagaccgccgcgcctgtgccggagaagggggagaccgccgcgcctgtgccggagaagggggagaccgccgcgcctgtgccggagaagggggagaccgccgcgcctgtgccggatggggggagaccgccgcgcctgtgccggatgcaggaaaggcctctcctgccactctctgcggaaggggttgcttgttacctctcaagcccaggagtgttcttactaaaacttggaaaggtatttttcactgttcagttgtaagaattcaaattaggacaaacgcaattttatttaattgagaagatgaggtttccaatttggaatgtgtttaaatgctatttgaggtccaattagtgcgaccaacacaattcctatgtggctgaaaaatccattcttatgcttggcagcttgaaaagaagagtctgcgtcggggtcttcacctcacacaaacgcaatcagaagtccgggcccctggccgggcacagtggctcacgcctgtaatcccagcactttgggaggccgaggcgggcagatcacgaggtcaggaaatcgagaccatcctggctaacacggtgaaaccccgtctctactaaaaatacaaaaaagcctagcgtggtggcgggcgcctgtagtcccaggtactcgggaggctgaggcaggagaatggcgtgaacccaggaggtggagcttgcagagagccaagatcgcgccatgggcgggaaaagaaaaaaaaagaagtccggacaccggtcccttcccagtctctaatgcaggcttcctctgggggtggcccagcaccagcagaacggccgaggtgcctgtggggtctgcgtttccccaaccccattcaactggattcagtgtggcctcagcttcaagggctgaagcacccaagctggacacacccaagccttggttctggactccacgattccccagacgcatctcatccgattcaactcagttcacaccagagcccggagcagagacaagaaaagcttgccctcggccccaggggacacccagaagttgcttgttatcagaatccggaaaaaaacaaaactgccgctgaggaggagagagcaggggactcaagtgcagggcacggcctgggcaagcggcatttgtgtgaaccacatgagtgctgagagccggagttcgagaccccaccgtgggggcctggagcaaggagcccgaggagagacggcgggagtcctgcagacacgggaggtggaggagggaaaggagcactccaggcacaggaaacagcaggagcagaaggaggatggctcggagccggctgggaggctgggatgctgccccccgtggcccaaacagcaggcatttgtcagggaggtggggatgggggtatttgagtataaaagggagctcgtgttttcaggacaggctattcacaagaaaccccccagctcctggtgcgagggcccagatggaccagagtgaacagccctgtgcagcttgacttctaagattggcaggtcagttaatcccacagcctgcaccactttcagaagatggctgttctccctggggctaagcctctctgtgatccagcctccctggtcagcacgggcatgggcaggaggcagtcctccctgcacgaggacactttccttggggttacacccttccaccaccccactgctaacgccttgggattcccacccattttacacttcttccggaaatgttttctaaacacatcacgccatcaaggtacttagtctagaccagggattggcaaacattttctataaaggaccagatggcaaatattttaggcttctggaccacgcagctgtgttgcagtgtgacagcctcaaaacacgtgtgagtgtgaccctgtttcaacacagcgtcacgtggtgctgcagtcggaatttaatagctcttatatgttacaaaatgctgttattcttttgtttttgttttttttcttaccactaaaaaatgcaaacgccattcttagcttagtcttagctttcaatgtcaggccccaggctagatttgacctttctctactccaggtgtggtcagagactgcgcaatctaagaaacgctgaggtctggaaagacagagggtgtggacaagtctgtaaaaatgcgggtttgggcctagactggccatcaggctgctgctgatgcaggaactttcttgggaagatccgggaatgcactgcttcctagcagcctgaaaaacctttgatgtttcttaaacaatcaaaaacagaacccaccttcgtcagagggctccctgctttaccacaggcaactcgatgtttctggaaatgcagactcaggtccgccagcgcacatcattgatgacggccgaggtggccggcccagctcccagccaggcccccacacccactcgcgacacaggcccctccctgcgtaagcacctgtgatcagggatgccttctgagtgccaggaaccatgtactgtggctgctgtgggttgggtttggaagggagacaccggcctctgtgcccctccccagcctgctcagccccatcctcggaggaggcctggcgtatgagggcctgggcggagcccctacatcacctttctcagcagtgctgtctcccatgaccgccgcagcgtgctggccagctccaagacgttctgagagggctcccctttactctgggcccctaaggctgggtcagaggccccaggaataacaaatgtcttctcactgcaaacatgcctcacatctcagtgtgagttgatgttgtgggcaaggagcattactcccattttccagaaaaagagcccacagtttgtctggctaggatagtaaggaacgggcagcagtgaccctgagacactcagcttcttgccaccctggaggaaggctcagggaagcaaacgtgtgtccacgtgcaagaagcccggggcccttcgtgtgtgggctggagatgcaggagattcaggggccacgggggatgcacttgagggaggtgaggctgcaagacctggcagatacccgtcggttctggttttgggtctccagacattctctctgaccctggacggggctcaccaagcagcctggttcaggagattatcattttggccagggctttgatgggatgtttgttcaaactgcatattttgttccacagctaagcagatttaacacaatgagatttgttccattttgagaaaagcaaagcatttataagcatgggagccccgccacccccatcccagccacagacccgggtagcacgggaaggaacagcctaactcctgagtctcacagagattcctgaacataggaagatatctctgcctctgcagaaggggctagactttccagcagagaacataagttgaaggaggaatggatctaaaatgtgtccccaagaattttgctggggacaatgagacagggtgccgcccctgccttggtcaccccacaggctgcttctccgctaagccgggggagcagttggacttccgtttactctgggcccctaagaccagatcacaggccccaggaataacaaatgtcttctcactgcagacacactgcacagctcagtgtgagttcataatgcaaggagcattattcccattttccagaaaaagagcccacactttgcctggctaggatagtggaatagccagaagcacctctgagatgctcaaccagaggcgagctgggctgggctcatccaggagggcccgctgagggccagcgatggcgaggcctctgcagggttccctgagcacagacaggaggggccgaggggcctgtagcagccaccgtctaggaaagccaccagatgcaaagggcaggagccgccctctgctcagggaaactgcagaggtgcccatcctgctgctggccttccccctgcgtgtacctttttaaaaacctcgggacctgggccatgacgcctcattctagattagattccgtcatagaaaacctacgtctgcttacactgacatcatctctagtaaggtcccagccacagctgccaccagctgtgagtgcaggcacgtggccacccaggaagggctacagaacgctctggaagacaagcaccgggcacgcagcccttcgaggcccacccaggagtcgtgggagggcaggcatccactcctgagcctgcaagggggcggctgggaggggaacattaatttgataaataaccccaaagaacacgaatgagaaggtcacccaggacgtgcatggaaataaatctgtgtgatttcagtgtgttctccacaggggaccgtccctgcaggaatggtgggggctgcgattccttccaaggagaaggccggccctccccacttcatcctggagggcgcctctgaggtgcttcagttttctaacagagggtctgggcctgaggctggtgactgggagaacccgggatttgacccagtacagccaagggagggccagaacataggagaaggcagggccgacagggagaggaggagagactctcgtgagaggacttaggaatgacacgtcagggaaggagaggagcgggcaggccaggcaagccagccctggactctgcgggtcggcccggtcttccaggaagaagccccagatcatgcacggcagaggcacccttgggtgcccaaggcagacacccccatgggcagggcagctccccgcctgctgcgtgtgaagctagtcctgtgcggttataggcagaggccctgaactcaagccccttgaccttggtgatacttaaattatctctggaatatgcgaggaagggtccgtggtgggcctttttccttagagaaatgcaggaagaccaccctgtgggcacagtgccagcctggtgccatctgaagacacagtgacacctccacacagaaatgagcattggaggacttagctgtggcagaattttattcaggctagaaaggagaagtattcgcatcaagccccctacacactgcagtcccatcaggccggctgagagaacaggatcgcgcagggaaacagtctcagctccccagttgtcaagtgcaatgaatccaaagcataggcagcaggtccttcaatgacaagctatcaccacggaagcctttttcttttcctttttttttttttttttgtgagacggaatctcggtctgtcacccaggctggagtgcaatggtgtgatctcagctcactgcaacctccgcctctcgggttcaagctattctcatgtctcagtctcccgagtagctgggattacaggcgcacgccaccacgcccagctaatttttgtatttttagtagagacagggtttaaccacgttggccaggctggtcttgaattcctgacctcaagtgacctgcctgtcttggcctcccaaaatgctgggattccaggcgtgagccacggcgcccggcccgaagcctttctccttcagcgagaggccccttcttcgcacccagtagactgtggcccccggcaacgaccacgcgctcctaggtcctcctggtgttacatgtcacgcacacttgtgcgtttcagattaccacgatggagagcaacctgaagaccatcgaagaggagaacaaagtgattgagcagcagaacgagtctctcctccacgagctggcgaacctgagccagtctctgatccacagcctggctaacatccagctgccgcacatggtaagtgactgagcacgcaaggcaggaatgtggagtcctccacagcgcacagcctaaagtagatgccgtttttatcgttattttcatggttcttcagcctttggcaaatgtttgtggttaccaccccgaaaccataccattaactgctagaaacatgggcggggctgaccccagaaacttaagtgtgctctgagccggcctttgaaatagtataaaaccaggggcactatgctatgatactattttatgcttttgtaaatatactattaagaaaataaaagttgtatatgaactactatttaatatctcgtaggatccaatcaatgaacaaaattttgatgcttacgtgactactttgacggaaatgtatacaaatcaagatcgttatcagagtccagaaaataaagccctactggaaaatataaagcaggctgtgagaggaattcaggtctgaacagctgctgtagtgatgaaactcttgcttaaaaaggatgcctcttgttttttgctgctgtaacttaccagaaagtgttctatatttatttctgtttgaatttgaaacagtgttatgcttacaagacttcataatgattttatgtcttgctttaaagatagtacctgcagaatagtttttgaatacacccacattttgtacgtttccatgtaagctgacatagtgttctgccatgtaatgtttatagctgctgatgtatgcacatttgggggtatatctatttctgaagaggtaagctgatcaaaataaatagagtgtaaattctttttaatgctttagtgattaaatgttttagtattttgaactgaaatggacacacaaacacacacacgcacacacagacccacagctttgaatgatcatgttgtggctgagcagccgctttttagacgttatcattttgcctcatgttggaggactttatggaatttaagaaatacattttgtgtgcatattgtttcatagcaagaattcgttgcaaaaatgctttatttttgaacaatgcttggaaatattatgtgacttttttgtttgtttgttttaggaggatggtgtatggtgggggcaataaatgaggttttttgcattccaaggaaatggcatatggattaactgtaagaaatgaaataagtaatttattgtaagacaacatcaagccatggaaacttggcagaagattcaaagcagcttaaacagcacttttaaattaactcctaagcgttacatggttgtgactatggaaactccagttaagacaggatcttatcagaggtggacaacgtgaagatttccttttccattttcaataaactttggaacaaccttctcgtatctcccctagagtttcgtgcccctctgaactgtctgttattgcaatgtagtttatcaacagaatttgtgtgttttcgatttaagctaaaagataatttaagaacatttatttccccttttcactttaaaaaattatgattattcctattattgttatgaaccttcttattttacatttgagggataaaggcaaatgatttgtgagtcttctagttactggaccgagttttctgctggatctggtgggaaggcagctcggtaaagtttccctcctgctccccccgcccgactttgactctgaatcagcatttggtcctattcagaggactcttaccacgacgtttctgttctacacttgggtggagaccagttgaccatagagcatttgcagagcctcattgtttgatttcttgtgactattctaagaatgaatgcaatcagattttaaaagtaactaaatatacttcagcacttttttgctttaaactagatcatcttagacttgtttataccttccagatttgattgttttactcccaatgactgcactatatgtatgcataagaccacttttgagcgctgtgttcccccttctgagtagtcctttgacgacgtgttgtgttttctgatgttgacttgagttccatttagtagcatctcttccttccatgtcttgatgttatgcaggaagtacagacgtactttaaatttttgttatgaaataaaaaaaagatgggttttgtaaaaataaaaaaaaaatatttttagcagaacaggacttacagggtcattgtccccacaatgtgccagtcgactatttgcacttaccttgtcctatatatccgtacggaggtgtgcaattcctcgtgtcagtagccttgtgacactgaacctggatggattatagaggagccctcacggctgatcaataatgttgcaaagggagactacagggatctcacgacgaatattctgatacaatactcaacctcggtatatatatatgtgtataaatatatgtatatcccagcggcactttatactgttcactgtacaaaagcttacagttttccacaaggactttaataactagctgggaaaagacgatgtaattatttcggggctctgcggaaccttctctgtacagcgccccctttctgttgtgctattggttgcagctgccatgctcagaatgcgttttgagagctgaagcaaggtgcttgcagtcacctgaggccgtccgtgtggcccagggccccagctgcctttagggcccccattgttcataacagcatatgcatttccccaccgcgttgtgtctgcagcttctttgccaatatagtaatgcttttagtagagtactagatagtatcagttttggattcttattgttatcacctatgtacaatggaaagggattttaagcacaaacctgctgctcatctaacgttggtacataatctcaaatcaaaagttatctgtgactattatatagggatcacaaaagtgtcacatattagaatgctgacctttcatatggattattgtgagtcatcagagtttattataacttattgttcatattcatttctaagttaatttaagtaatcatttattaagacagaattttgtataaactatttattgtgctctctgtggaactgaagtttgatttatttttgtactacacggcatgggtttgttgacactttaattttgctataaatgtgtggaatcacaagttgctgtgatacttcatttttaaattgtgaactttgtacaaattttgtcatgctggatgttaacacatcttactctaaataaacaaggtgttgccacatttgtagcacgaaggatctctaacccgggtctgcgtcttcacttgagtctgggaaatgctgtctggggtcccgtgggatccactcgaaccctttcactccaacttagttgcttttaacatttttaccagtttgattctcaactccgaggcatatagaagtcaatgacttttagaaaactatgtgagtgtctcggcatccccactgggccgtccttttcccatttgctgtcgctcctgcccctcgctgggctaggccatctgagagcgagcctggacggaggacacggtgcctcccagcacagggctcccctgggcagggaattctccaccagcagccctgcagccaccacacttgggggcattgccgttgtgcatgcgtcagcatctcagcgcgcccaggcagggcggtcacgtcctttgtagagcctttcttctggaatccagtcgaggaggcgcgctgctcccagctggtccatccctgtccctgtccctgtccctgtcacctccttattactgagcagactctcagcctgcctgtctcccagaggaggtgcactgctcccagctgctccgtccctgtccctgttcctgtccctgtcacctcttattactgagcagtttctcggcctgcctgtctcccagaacacagacagttttcaactgcccagggccattgttttacaaaatgtcccaaactggctgccacctcctgactgattcgggttaactgggagacgtgtccttctccagtttcacgtcaggggagcagaaggacaggcagcccatcgttggttacctgggtgttgaaagatgatgccttcttacttccatgctgttggcaaggatcccggcagcaagtcacccataaacttaaattgcccttcaaatataatttaacaatgaattacccactttcacatcaactatattagttaatgtcatggtttaaaattccaaaaataccctcctctcatagacacaatcacccaaaatataaaatttgagaaagggactctgataatcttagttaaatttcataatttattcccagtggtgccttcagctgcttcacgattcaaggtcctctgagcacttcttataagctagtgtgttcggatggctcatttgcaacagcactgcttcctggaagcactggtgattgcagtgagtccccctccagtccttggtagagtcctcagagctgacagaagagagaggcgactctcactcctaccaccctgcatctctgtctctctagacccgcagggtggaagaagctctgtcaaaggctgtctttaggaacaagccgagttaatgatgtgctggctcaggcctgtctgttaggattattaaaagctatttgtccataggaacagtttgcctgagaattgatgtaaatattttagaaagcaatttcacaatattttcaaaaatcttagaaaatttatattttgcctcaatctcagtctatactagaaataccaaaacaattacaaatgtaccaaaatcaataaaaacaaccctaaagtcctattacagaggaatgattaagcaattcatgatccatgaattttatggagtactagagagctcttaaaataatggctataaaaaccttgtaataaggggattatgataaagtagatgaagagtacagaaaaaaattacaaatgcatgaaggggcatttgttatcaacaaaaagagttggactctgtaaaatatttgaagagatttattctgagccaaatatgagtggccatggtccacgacacagccctcaggaggtgctgagaacatgtgcccaaggtggtcagggcacagattgattttatacattttagggaggcatgagacatcaatcaaatacatttaagaaatactttggtttggtccagaaaggtgggacaactcaaagtgggggcttccaggctatcggtgaatttaaacattttctggttgacaattggttgagtttgtctaaagacctgggattgatagaaagggaatgttcaggttaagataaagactgtggaaaccaaagttcttgtgaagtcttatagtggctccccttagagacaatagatgactaatgtttcctatcagattttattttttttatttatttatttttttgagacggagtctcacattattgcccaggctggagtgcaatggcacaatctcggctcactgcagcctccgccttctgggttcacgcaattatcctgcctcagcctcccaagtagctgggattacaggtgcacaccatcacatcggctaattttttgtatttttagtagagacgggctttcaccacgttggccagactgatcgtgaactcctgaccttgtgatcctcccacctcagcctcccaaagtgctgagattggcacgtgagccacctcgcccggccttcctattcggatcttagttaatctcttcaggattgagaaggcctggaagaaaaagatccagttatgttaacagagattctttacagatgcaaaatttccccctacaaagaacagctttgcagggccatttcaaaatatggcaaagatacatgttttggggtaaaatattttgattttcttccttgtcttgtaatgttatgccagagtcaggttggaaaagtaagtcatgatatacaggttaaataaaacccatctgatgagaatttatagtttgcagggcgtgactccccagaccccttcaataggaatttgggcaagataaaaaaaatcagagtttagtcctcagccttagcaaaataaacttctgaattggttgagacctgtctcagatacttactggtttacacaacacagctgggtaatgaggcagagctcagggtcttaagggagaagcaatttaagtacatgaagataatcaggctttcatcctttgtatttcacttactatgacacacacaagttatcagtcactgttcagacactgggtcaagtgggaaacgacacaaagaaaacatcccatcctaataaatgtagttggcatagacctccttgtataataataaaacaggcacatggcagcccctgagcaccctcattttcagtatcaaatagagtggcctaaggggaagcctcactgttggtcctaatgaggcctcccctgtgtgaggccaaatgtggggcatgctggactttcctctggatggagtcacctctggtctctgaccccatccttgcatcctagtttcttctcatcctcttcttgctttttaattaaatgagttttttctttctagagcattgtttgtgtcccttcagtttcttcgaatcttcgttgagcaaggtaagataaggaaataaagaaggatcagtattacccacaaacacagggatgtgtgtgcagatggccagataaaggtgggaaattaatcagagaaggaaagaagagggaggggccggtgatggaatcaggaaattgagaattccatcttagggcccgaaagagagataatcgaaggtaaatcatggcttcaatacttagggcccaacaactgtccccgccttccaccacagctttgttttctggccgaatgcggtgggtgcccggccttccttaggatccgtccctcccctcggaggccagcagccttgcccagcaacagcagagaaccatgctctttccacaggccgccaacaaaacatgtgaagcatctgataaaaaccatgagcgatcatagcgtttcccttttctaaggaacaaattgtttccttctcatgtgtgagatacaaacagcaggcattcaactcatttgccctctttgatatgtggggaacaaaaccacccaagaccgtctggggagagagccagagacatgccatcgttaaacatctcgtatgggtcagccccaagcgaggtgtcttacacagttatccccacagaaggggcctcctgacacctgaacagcatccgccccaggacccagctttgtcaggtatgtctgacggcggaggcctttccccacgacccagctttgtcaggcatgtctgacagcagaggtgttcctgagaagtgtctcaccgcaatgagacgggtcatggagaagcccaatcctctcctcatcttttcccaaagagagaatctctgcccctctacccaggaggggaccctgttggagtgaacaggattctgtctccctcctatactaggagtgacctctttaaagagagatgtggcctaagagtattagaatccaaataagatgtcacctatccagaaaagaaggtttaaaaagaatacggcgttgtcatgtcccaagatcttcagaacttaggagctagtttaaagttatttacatagaatttagtgcagaggttaatcgggggatatagaagtctagatggaggttactgactttacaaagaaactgaaaaattgaggttgtgacactaccttaaaatgagatcataattcaggcaccatgtgtctccccccagacggtttacaaaacctcatcaagctgggaaggccaccctcaaaattactcgggagcctcaaattgtttccttagtagggtgtaaataagcaaagactgcccaaatgacaacagacagaggctgcttatcccgagctcctcagagttaggaagccgaccaccatcacctgcattttcgcagagactccggcaggctgggcgtgggagcttcccggggaagggaaggcacccggtgagccccgatggaggctgctggcctgggagctggggcggcaaatggaatcggggcgtcccgtgtgagtgtcgggggagcacgtttgtctttctccgtctgtcctcaatgggacgtcagggcagaagtcggggcagctgtgagttgttaagctctgaccagctggggctgattgttacggcactgttgctcagctttctggatcgtcactagggacagcgatcaggactcctgcacgtctgatttgcagatagcaggcgggcatcctgggctgctccttgccggtaagggcttggtttcctgtgctggttgtgggtctgatgtctgcttttacatgtggtcggtccattgtccgcttgtattttcatctctcagtcgtaggcatctttcaacgttgcaaaaattagaatgaagaaataaagcattttctgtgttagaattaggcatatttagcattttaagaattgaaatatttaagagaatctgatcaattaaagtgatgcctcagccgtgagactaaaatttcaattgtgtatttttgttattggtgtaattgtgatccctccacgcgtgcacccaggctcattaaaaaaaacacagccccgctgcttatcagctttactgtcaaaaaaaaaatacaaggatgcaacagacagtggagcttttaggggaatgtgagcacgtcgcacttgtaaaatctgtgtggaagctttaatgatgttcagttcaccacttcgtggacgggaccgaaggttaatcaaaggaaccctaaatctcgattgctcacacctgtcgtatttaaataaaagaacacttttgtaagttgagcttttaaaagcttaaggaaagtctgggtactatggctcatgtctataatcccagcactgtgggaggccgaggcgggagatcacctgaggtcaggagttcgagaccagcctggccaacatggtgaaaccccatctctactaaaaatacaaaaattagctggctgtggtggctcacgcctgtaatctcagctactcaggaggctgaggctagagaattgcttgagctagggaggcagaggttgcagtgagccgagatcatgccactgcactcctgcctggctgacagagggaggctctgtctccaaaaaaaaaaaaaaaattttttttgagcaaggcctcaaagaaagcgaagcgtggattatcttattctcacctcctcggtgctgggaaagacctgccttgaccgaagtccgctcagactccttaggctttacctaagcattgtcctcgcccagctgtggcaaaaatattatgttggtttagagagaacccccaccctccacacctgaccccctccgtagctaactgggttcctcatctctccccatccccaggtgacacccgatcctcctgcggccttcagcaagagtcctgtgtgctgtgagacctttcctcactcatcataaggttgcgacctggctgacgctcctagaatgaaacgcaggttaacaagagaaaaacacaacgcatttctttaatccaagttttatgtagcccctgaggcttccaaaggaagacccaaagaccaaggggaaactgagattctgctcagaccccatgaagatgggcggccatgcagaaacacgatgggacaaagggagagatcgcccagcaggggccccagcaaggccgctccgtccatgttcctctcagcctctctgggtagcacgctgtgggggctcgggaatcgataccccaaaatgtggggctttgacgtgttgaactgaagaaacagcctctccaggtctctctgatcaccctcctcatgtcccatctgaatcccctgcgtcccaaagcacagggtgaagctgctctctgagtctgaacccaccaaagaaggaaacggtcacccctgtctcttccctgagtttttctcagctggattcctgtcacagaaagaaagaccaaagtctcaatccacctggacagacatgtgtcataagccattgtctgctctgtgggcccaacagacattgcctcagatcactgtatattctccaagcccattgaatttcctaaagggcatttactacccgctaaactcatccacacgccccatctccctttcccctaaaagggcgggtgtatcagcgtctgtcccatcacatggtgaggcggccacttcctcaccccgtgcatgttcctatctgcgtgcctttactcttattaatcgtcctttcaccagtagacttttagcaaaccttcagagggtaaaaagggggttttcccttggcccctacagtttcttccttctgtctacgggacaggacccttctggaatgagtgtcttgaagggagaagggagagagtgacctttccaggctttttggcttgcttttggggagggggcctctagtttctaggaccggcctaggggcataggaattccagtttctacgactgctttaggggaggctgaggagtgagagaggagaatgagagaccacagcctagcgtcagagcctttcagcatcctgcaactcaaagaacaccacagccaaggcgtgtaccttggggtatcatgctctgagccccaacatctgcaaaggtaggtgtcattatctccttagtgcaccacaggaaaccagctgagaaagccaaatgctttgtcccaagtcaccgggcaggtgtgtggcagtgcagagagcccagtctgagccccctgcaccctgagagctgcccccagatgaagagcccaggggagcatctgagctccctccaatgcaccacttccttccgtgagacatcggcccatgcgcgtgaaggggacaggaggcaggcggtcctgtgggtgactcatgggaagaacagcactgtgaccgcagcaagcttgcagctctcaaaaaaataaagaacaaaggaaagaaaattaaaagttagggctgaagggggagctggaactaacatcagaggctttaagtgtctgccactgggctagaaggtgaggtggcccctccctgtgtgacatggagcccaggacaggctctccctgtgtgggaactcgtgcagagcctgcggtccccattcacggccccgcaggagctcaccaggagagactgcagcagctcatcagagtctgcgctctcctcctggggcaggtggggctccagttcccgcaccccttctcctcaggtggagcctaaatagagcagtcagatatcaatcaggtaacggcaaactggtttctagctaatggaacgttaagtgggcaggactgcagtggaggggagaaaaaaataaaatccttttcctctacccatcacagtttccacagctgcggccttgtaaactagacttgcaagaaacaggttaacatgagaaaaacagaagtttattcacacgtgcctctcacaggtacctacagcagcacccagtgttgagagtgccggggtgggtaggactagtgcttatccatcatctcagacccaaacaaaggaaaggagttttgagcttctgggtgcagttggcaaattacaggaaagtgagcagggaaagcaggtaggccagcctctgctggtcagcctctgctggtgagcctctgctggtgagcctctgctggtgaggctgtgctggtgaggctctgctggtgagtctctgctggtgagtctctgttggtgaggctctgctggtgagtctctgctggtgaggctctgctggtgagtctctgctggtgagtctctgctggtgaggctctgctggtgagtctctgctggtgatgctctgctggtgagtctctgctggtgagtctctgctggtgaggctctgctggtgagtctctgctggtgatgctctgctggtgaggctctgctggtgagtctctgttggtgaggctctgctggtgaggctctgctggtgaggctctgctggtgagtctctgctggtgagtctctgctggtgaggctctgctggtgagtctctgctggtgatgctctgctggtgaggctctgctggtgagtctctgttggtgaggctctgctggtgagtctctgctggtgaggctctgctggtgaggctctgctggtggtgctctgctgttgatgctctgctggtgagtctctgctggtgaggctctgctggtgaggctctgctggtgagcctctgctggtgatgctctgctagtggtgctctgctggtgaggctctgctggtgagcctctgctggtgatgctctgctagtggtgctctgctggtgaggctctgctggtgagtctctgttggtgaggctctgctggtgagtctctgctggtgatgctctgctggtgaggctctgctggtgagtctctgctagtgatgctctgctggtgagtctctgttggtgaggctctgctggtgagtctctgctggtggtgctctgctggtgaggctctgctggtgagtctctgctggtgagtctctgctggtgaggctctgctggtgatgctctgctggtgaggctctgctggtgatgctctgctggtgaggctctgctggtgatgctctgctgctgaggctctgctggtgaggctctgctggagagtctctgctggtgatgctctgctggtgagtctctgctggtgatgctctgctggtgagtgtctgctggtgatgatctgctggggatgctctgctggtgagtctctgctggtgagtctctgctggtgaggctctgctggtgagtctctgctggtgaggctctgctggtgaggctctgctggtgaggctctgctggtgatgctgtgctggtgatgctctgctggtgaggctgtgctggtgaggctgtgctggtgaggctctgctggtgaggctctgctggtgatgctgtgctggtgatgctctgctggtgaggctgtgctggtgaggctctgctggtgaggctctgctggtgatgctgtgctggtgaggctctgctggtgaggctctgctggtgaggctggcctgctgattcaaacctggcttactccccagtaggaattgctgagacttctgctcttcctagtgcagaagagggagacatctttgacaaatgtaaatttccttcccaaaaggaaaacttgttcctgtttttagagctttttctgaatctactgtgaggaaagaaagtaacttttatctaaggaatgtgaaccctttcaaattcttaggcccagagaggctcaaatgagacagcaatcaggacccagcactgccctgagctgtgtgtccacctcttgaaaccgctctctgttgccacagtagcctccttacgccccagcagacactgtaacccctgcctatagcttaccaatgtatccgcaatcgctaatcaatgctattgctgcaaaccaatgagaattgctgcaaaccactttccaccagcccttttctgtccccctgcttttgcttttaaaaacctgcctataccatttagcattaggtatatctcctaatgctatccctccccactccccccaccccaccaacatgttgtaacaaacctgcacgttgtgcacatgtaccctaaaacttaaaatataataataacaaaatataataataataaaattaaaaaaaaaaaaacctccctataccaaaggtgaatggatctcctggccaaacccagccaggtttgcctggggctcagtcctgagcatcccgccagggttgcctggggctgagtactgagtgtctgaccagggttgcctggggctgagtcttctaggctgctgtccttgctttggctcagatcaactctttaaatcacattttgtgcttctgccttttccttccttttaggtcgacagctcgttcacaatgtcctttagctcaaaatgatctagcaaaagtagaatacagaagtggctaaatctcatgtgcccccttgtttgtcttgtgtgtagaaggatcttgactccctgggttcccattagggcaagtttaaaattggagccaatatgcaaatgtctgtgaagctgaaagaaaggtcgttaaaggaccagagacctcaaagatgaattccctcctgctcatcacaagagcgttccctctgctgccaccctgcccgtcttggtgacatctgcaacttctaactctcttgtgtatgtgggtctgaccctcccaattctagatgctcggaatctgagagcagatgccttaggagaattatacagagacagcagagttttcactttagaaaaggcactcgatatttgttaaaagagtaaactttggaaagctgaaatgacagttaaatgcattgttaaaaggaaaaccttagccaaattaaatttaacagagtttaattgagcaatggatgattggtgagtcgggcagcctcttgagctagagaaggctcagagactccagcactcagccatgaagtggaagatttagggacaccaaaaggaaagtgacagacagaaaatggagataacagccggactggttgtggctcggcatttgccttatttgaacaaggtttgagcagctggcctcctctgatgagccaaaacttggtgactggcataagagtaggttacagcgtacagagaaaggaagctctaggctgaacttaatttaacaggaactcgcagtcattttatcctccaaagtgctagattttagtctctcaggagtgacagaacacattgataactggaagcaaagcagatggaaaacggtctacggaagaggtgttgtcaagcaaaagtaccagaacttgccaccccaaaataggcccatttggcataaagatgattttgagctgaaggacattgagaatgagcagatgcagggaaaactctaaaaacagggcaaaagctttccttttgtgaggacaagtcacctttgtaaaaggtgtctctgtctcctgtacgaggactcttaaagttaggtcattcaagaaccagagacctcaaaggtgaattccctcctgttcttcacaagacagtttctgctcttgtcaatggagaaggccaggcctctgtctgcacagcagccccgcccaacagctctcgttcacacacagcacttcttctgatcacctcctcataacttgcctcctccacccagaagccctcaacccttctcctttgctggtatttaaactcaggctctgaacacccctggcaagcactcatctctgggggctcccctgtggaagcagaggctataatctttggtttgctttctcctagtagtctgcttttgcctggtctcacttgtgtggtccaagctggagaacctgagataaatagagacaaaatatttttcttcccctgaactacagagaagattctgagaagtttcccaggtttctaattgacaacttttggcagttttctgtctaacattagctgttggtgtggctctttacctttttaataaaatcatctgaaaaagcaaaaagtgaaatagttttcctcagtatgccaagagagttattgaatacagaaaactaatttgagctatagttactaaaaaataaattcaataccttgataaaggctattaaaattaaaaccaattaaaggccgggtgccgtggctcatgccgtaatcccagtgctttgggagggtggggtgggcggatcacaaggtcaggagttcaagaccagcctggccaatatggtgaaaccccacctctactgaaaatataaaaattaaccggacatggtggcaggcgcctgtagtcccagctactcaggaggctgacgcaggagaatctcttgaacccaggaggtgaagtttgcagtgagccgagatcgcaccactgcacgccagcctgggcgacagagcgaggctccgtctcagaaaaataaatacattaattaatgaattaaaaattaatagtggtgactgacagtatgtcactttgtatctttaaaaaatagacacactcccaaaaagtttgtaactcgtattgtaactgatactttcagtacaaaacgtaatgacagtaattcctacggaaggaattctgactgatagatgataaacatgtatgaacttaggaaacttgtttagatcatatttaaagaaatattggctgcatgcggtggctcatgccggtaatcccagcactttgggaggccaagatgggtggatcacctgaggtcaggagtttgagaccagcctggccagcatggtgaaatcccatctctaccaaaaatatgaaaattagccaggcgtggtggtgcatacctgtaatcccaactactcaggaggctgaggcagaagaattgcttgaacccggtgggtggagcttgcagtgagccgagatcgtgccactgcactccagcctaggcgacagagcgagactccgtctcaaaaaaaaaaaaaagaaatattgatatagccatcctgaattctacccttagacattctgttgtctacagagtcgtttttcaggacacgttcacttctggtgagtgtgagtccatctttctggaggtcattgcaaagaaggcagccgggggaaagaccacaggagccaagaaatcaaaggccaagtggaggcagacgcacaggtctgggactcagccttggaggtgaagctatttctggatgggaccggacatcagccctaaagaggggtgctgggttcctgttggagctgggcagtggggattggacatttgggtagagcactgtcagaggtgttcaacccagagcgactccatcctgagtaggggctggtgaaatgaggctgagacctacagggctgcattcccaggaggtgaggcattctcagtcacgggaggagctaggaggtcggcaggactggtttcacaagatgcaggtcacaaagaccccactgataagacaggattggggaaagtagccagccaaaatccaccaaaaccaagatggccacaaaagtgacctctgattgtcctcactgcttattataagcaaattataatgcattagcatgcaaaaaaaaaacgccaccagcaccatgactggctaattttcatatttttggtagagatgggatttcaccatgctggccaggctggtctcaaactcctgacctcaggtgatccacccaccttggcctcccaaagtgctgggattacaggcatgagccaccgcatgcagccaatatttctttaaatatgatctaaacaagtttacagatgccagggcaatgtctggaagttaccctatagggtctgaaaaggggaggaactctcagagccgggaattccctgccccttttctagaaaattcatgaattatgcaccccttgtttagcatgtgatcaagaaatagccataaacatagccagcaggcagccctcaggcccgctctgtctgtggagtagccattctttgcttgtttacttctctaataaacttgctccacttcatgggctcgccccaaattcttacttgcaagagatccaagaaccctctcttggggtctggatccaaactcctttccagtaacaacaccacacacaaaaagggatgacttcctatggtagctcttagtaagagatgtgtcaaatgcccctgatacactctttctcaacatcttacatcaatttcattgtagcaactattgaaaatataaggtcttccagttgtcccatattgttttctatagtgttcttcaaacatgttacagtaaattaaggtggtccttaagaattggaggagacaatgaggtcaatcgacaaaagaatctaaagtaccaccaccactgtaacacagaagtctgaatgcaagaaagttgccacagtcaaaatggagtcagtgatgtcaagaaaaccctaacaaatagagccaggcaaggccatgaggagagggtgcccttgcatgaatgcctgaacacaaaaagtatcacaaaagcctgcaaaaaccacagctgcacacaaaggccattgcaactggacacaagaaacacttctgcaaggatgtctgcccaccaactacctggccaacctcagacaggtgtgtcacccttgtcatatatctttgtagggaaaaaaaaaaaccagaaaactttagacaaattaaatttaacagtttcactgagtaaagagcggttctcaaatcgggtagggaccaggacaggctcagagaaacttggacactgccgggtggtcagagaagatttatggacagaaaaagccatgtgaggaacagaaaacggaatcaggcacagaaacagccacattggtgacagctcggcatttgccttactgggacatggtttgaacgtttggttgcctggaattgcccaaagctcggtaggggcagaagagcaggtgtctgtttacacacccagctactgtgcacagagaaccctttaagctgagtttacaataggtaaggcagcagtttcacactcaacgcaacgtaagggcagccaagggtaattaccccgacaagtatgtaatcctcctccttttttcctttaaaaacctttgtcctccttttcctccctgaacatgcacagagtttactatggtgtgtgcactcccatagcaatgctttatttccagataaatctcttttctttcagagaacctctctgtttgtttttatgtttgtttttagggtgacaagtgacaggaagggctgggaaatttggtaccttggccctcaggcagcatttggaagagggccaccattttctcacatttactcagatcagtaaattaaattttctgttggaaatattgatgttacaattaaaaatgtatactttcttcttctaggcagaataatcattgttcctgaattttgagagttgacagtgatctcatatgcagaatatctatacccaataatgaacacttttccctttcatttgactgtggacaacatgaaaaagctccttaagtacaataacgctcagatgacacaatttcattcctgatttgagggttgcattgcaatgtggaaaaacacttggtataaataataaaccatttggattttttttctcactttaacagaagtatgttcctggtcctagcagcaacaaagacaacgaagaagctgatgggttggcctcagaaggatctagagcatcaggtgacgaatctttgcaggtgttgcctgccctcctggaggccgccctgctggcgctaacttctggggactcttcccactctcctgggcgtctctatgcaatgccttcgcaccctgatctctttccacatgtttccagcgttgttatgagcagcttagccagttacaaagtacatgaggcttcttgttggatgttcatggctggagggtccctgggccattcagcttagagcctccacttgcctgttgcttgtgaattacgtgtcattatttgctgtagtgctcaaaatatgtcctggaatttaatgaactgttggttcaaaaatgttcttaaatgctttaggcttatctgatggaaagttggaaggattagcctgcagtcacatttttaaaattctttcagcgcagcccaagcagagggtcccttcgctcttcaggcctggaaagtcgtccttcagtctggacttgaatcttgatctcgtattttctgatgaagggcagggttcagtttctgagccccacctgatgcttcctctcctctcagctttggtcctccggttggagagatggcctccagcccttgtccttaatgcagcctccacttcctggtgcaaattgtgtaccaggcaagctcttcctgagacctgccactcatcgaataattggcaaattgcatttttttttaacttaggatatgcttatgtggatttaagagcagagtggcaatgggccaatggaaaagggcactggcctcctgaggcttagaggggctgctctgacaagcagtgctgctctccaggagaagctctgagagttaagcccacaggcctctgttcatttataacattgcttggcacagtaagaaatcccagtgtaaggaactggaagctgggagctcagttgtgtttgtgaatccactgctgggtgccctcgttctggtgtgctctgggtagagatgggcccagccttggggtcctgaaacaatcagggctaatggccactctgagggcaagcctgaaaaagcaaggcttaaggagcaagcagagaaaccccactgtgagacatgctaactgctgcagaaatggcctggaacgtggatccttgggctgatctgatgagaggccaatacaaatttgatgaaacactgacacataagagcccaggagcctgacactcacagaggctgggggccagccattcacttaggcctctttacatgcactgcccttggctccaacgtcaggcccttgggatcctggtgacaccgagcacccctctgtcaggtgccctctatggtccccacttgtggttcatcccagaacattcctcaggggcagcaagaagggagggtccagtgcattccacccaagaccagagttccaccagtacaagggagggtctagtgtgttccacccaataccagagttgtacccagtgctagggagggtccagtgcattccacctgagaccagagttccactgctgctgtagaaaggaccagaggcaggaggtgcctcgtgtgaacagtggccaccctcttcctgcagattctatccaggggcctctggggtgcagcctgggaacatgcaccctaaccagctcccagtgccaggacaaatacagtgagaggctgcattcttattactgaagataagatccttcctctttccctttccctacagatattctttctttctttctttttctaatgtatgtaaatctgtttaatggctacagaagcctctggccagattcaggtatccagaaagttttctcaaggacccaagagccatctccttgaaaagtcaccaccaaggaagaccacgtccctctccctgttttccgggaggaggagggccca

SEQ ID NO: 5629 - DNA, 164704 bp, Homo sapiens
  HPCAL1 gene - 10393638 - 10518341 of chr2; NCBI Entrez Gene ID: 3241; Build 35; sequence includes 20,000 bases upstream of initiation codon and 20,000 bases downstream of termination codon of the gene
ccctgaccaccactcccaaaggagatgccatggccccacctcagagagaaaggagggtgctgtctgttgcaaacccaacgtctcccagtcccccgggaccccacagggaagccaagtggcatgtcctggacggtgatgtttcagccaaactccaaggtgagagtcaacctgcattaggggaaacagcaggcagccgggaacctgagaggtgcccgggattgtgttcacagcgtaagggttcccagcatggggatggatgaacgccgggctcagctgccttccacaagacaaagcagccacaggcaggggccggccctctgtgacagtgagggatctgtgtagaaaggcctggccacggcctcctttctctcctcaggctctcaacgagcacgcctggctgaggagcttcttagaggcctgggaatgggtctggaggaggagccagcactaaagacacaaggaaagacagtttcacagtcaccgctttgcagcaaatagagccacaggctgccccaagggccaccacatagtcttttcccccgaaccccgccccaccccaaccctgactcaccctgactcacttccagtggggccaccactgctggcccagcagcccttctttggcctgctggtgtcttgggcattgcgtgtgtgtgggggggtgtccaccttctctctcctttcacctgcatcagaccactactcgccttctgtatccttccacccagggccctcttcactttgcattctttttctttcacattagaccctgagggtcaggttccctttctgcaaaggccaggatagcttgatttctagaacttcctaggtgtaaggggagatagttgcttgctgtcccgggaagtgtgctcaaccctggagtgggttggatccttcttatgcagcaaaaaaagtgaagagagtggccaggctcagtggttcatgactggaatcccagccctttgggaggccaaggcaggaggatcgcttgagcccaggagtttgagaccagcctggccaatatagtgagtttccatctcaacaaaaaatcaaaaaatcagctgggtgcagtggcacacacctatagggccagctattcaggagactgaggtgggaggatcccttgagcccaggaagttgaggctgcactccagcctgggctactaagtgagaccctgtctcaaaaaaaaaaaaaaaaagcttgaaagagaaaaaaattgcagtttccttatgaaaccaggctgcgcgttgctttcccatctcacatcactgagaggtttgtcgtctgggctctaacaacaggccgggatccagagatgaacagggccacgtgcctgctctcagctctgcttggtggcatctgagtgaagacaagggtggtttagcagagggacgtgctggccgcaggctgcttggggtccctggtgactcccagtggcctcggtgtgttggggcagggtgggattgtgcttctctggcccagccccatgacctaggctttaaggcaaacagtggggctgcttcaacactgtgggtggggggaacttggagctataagatgccatccgagcctccgttcagaaagaccctggactcccacccctctggaactgagacctgaggaagggcacccaatccagaccctccctttcctggtgctccagcccctctgccatcctggtgcggggagctgaggtctgtgcatgggtttgctttgtcagagcctgaggcagatgccagggtgagcacaaagccacactgtgttccctgggaggcgctatggacccacacagccggctgagccccatctcggctctgaggggctctgcgccagtggatgcctccgtagggcctgaggtcagaactccctgcccacctgctgcctgcatacctggcagacaccccctactccagcagcctgggacccagattgtccaggacaactccaagtataaaaacccctcccatggtcagactcaggctgggggtcctgatttggggtttggaaaataaagctatggaacacatgccagcatgtgccccaagacatctgcagggaacaggttgcctgtcaccttcatcactgtcctgacccaactgcacaaaccttcctaagcttccatcctcctgatcaaagcacctccacactgaaactgcttcattcatgccggtgttgaggggtgtgaatgagttccccagaacaccaagcgaatgaagcccatggcattaaactcatcctgtgaagctggaaacacattcagaggagtaagtgatttgcctgaggtcaccctgcagagcaggggtttataatggaggaggggtgcaaagtgctccgagagcaaggcccctcctgcagatatggagaaaggcttcctatgggaggtttgaccgggggaagagtcactctccagggctagaacaggaagggctgcctagcagggtgacggcaggtgcaactctgcagaggcatgaggcagtggtgcctgcagaaaaggaaccaggcacacaggggaggagttggcttcgttgaattctggaatcagcttcaggaggaatgctaagtcctaagcccttcttctcagagatgaggaaacccagcttcagagagttctggagcctggcgaaggctctgcagctggtgtactgggagcccaagcctgcaggtccagaccacggcccagcgatggcctctcagaagcacaaccccaggccccgagaagtcacatgatctggctggcagaagtggcagcccctctgggcaggaagcccgtctccagtgctgagtcatgctgtctctggccagtggcacggggtggcccagctgtggtgactgctaggacttctgctccccaggccttccagcctccctgggtccgcccagctgcatgccagccagcgcactgccctccccaggacgtggggtgtcgggaggccaccagcctccaaccctccctgcctctcacactgcatgtgcaggccggtggcccgcccactcgagggctgtgagggaggagtgtccgaactggaagtgcagggctgcaggctgtgtgcagggagctggtgctggctgaggaggggtactgggagggggcacatttgcattttgaaggaagaaatgtgtttgagaagtggagacaggcaggaggggccttccagcaggagggagcgcttgggctcgggcaggcagcctctcctgtgggcagcagagggaagctgaggagggcggcccaggggcagcagcgggaggggaggcccaaggcttttcccactcccatgaagtcaggaggtggaggtcctggaagcaaaccctgtagaggggtcccacttcctgcattcttccctagctataaggctctgggagggcctcccttccagggagcagcctggttaggaagaggagagcctgggagctgaatagagaggcagaggcaggaccctggcccgggcaggaagggctgggcagcaccgggctccacgggtggggccggccaccgttagggtgtcactggcctctgcccttagtggggcagtcaagcccacggccactttcgggcagcacggcctctgttagaccatgctgagatggcaggggagggaaaggatgggccttcgtgggtggggactccaccaaagcatcgctgggaggccatggttctaaaccaattactcctgactcctgggcacacagccctggcccctctgagctgatgcctcctctgggacctcatagagggtaaccagggcctcctgggaaggtgacagaagcggcagcagtcctggaaccccaaccagcaaatagcccccccgcccccgacgggagccctgcagcctgcggccgtgtgcagccagagctggccaggtgcccgagcgcctgcaaagcactctcagctttgtttgcttgctggtgccctgtccacccctcccgaaggcagtgatggggacagcttctgcccacggtggcttcagggcaatgggaagtgaaggagggggtgccgcagtgtgggtggcaccagcagtgggctgggtggagtcaggaggtggattctcgggttctcatccggagctgcccctggctcacagcctggcccgggatccatctcgcctccctccgccggtacctgccacggatgggaatttcaggccccagtcccctggagcctcctgtgaccctctaggtcatggcatccaagaggttgaaagtagcagtccaagctggggactctgctggcagcctgtctgagctccacgaaagtgggcacagatgggaccattttctccccacgtgaggacaccgtgctgcccagatcacccagctcagccccgatgatacacccaggccccgaaaagctttgccttggaaagaaaacgtaacttaggttactcctctgttttactctctagaaggggaagagggcaggcagggaccctagatcctggggctctgttcttttaatatagaagggagaaaaagctgataaatttgggggtggggccagttcattggttcagccagtatttcttgagcatgctttctgctgcagcctgtccaggctttgcacacagagatgaataaaggacacaagcccctgcctgcaggaagcccacattttgatgaactcacacttttgaagacaggcaaatattcagcttataacaaaaaggtggcattagactattccataagcacttacaagtacacagggggcgcaggaaagcctccggcagtgccaggattgggggaggccagtgaggctctcatcttgtacacagaatagaaagggcacccaaactcggtcatcaagagaaacattattttagtgcaatgtttgttaaactaaaaattaatataaaaatttgtgatgaacaaaacatcaaaattgtaaatagagacaagactgattattttatgatgtgtgtgattatacaatgggaacaacagcttccaatcagcccgcagttcctggccaggtggccatcgagtcccctggacagcttgatgatgacacagaggttggtgatgccatgtgaacagattgggcaactcagggctttctatacagtcgcggcttttgactggagagcctcattttccacttgattcaaaggtgggaagtatttttataagcatctagaggggcgggtatgaggctcctccagcctgagctctgtctcgtgtggcccagcatgcactggccttcggaagagcatctcagtgggtttccaagtgggaggagagtagaagacacaggaataccattcagttgacccaccaagtggacagagaaaaatgatcattttttttttttttcctgagacagtcttgcttcgttgcccaggctggagtgcagtagcatgatcttggctcactgcaatctctgcctctttggctcaaggcatacttctgccgcagcctcctgagtagctgggaccacaggtgtgcgccgccatgtctggctaattttttaatttctgtagagatggggtttcactatgttacccaggctggtctcaaactgctgagctcaagtgatctgcctgcctcggcctcccaaaggtgagccactgcacctggccggaaaaaaaatttaacagttttattgagatacgatgtacataccatacaattcacccatttagaatgcacatttcaatggtcttccatagattcacagagttgtgcacccatcgccacaataaactttaggatattttcatcaaccgtaaaagaagccacatacattttagagttattctccatttctctccaaaccccacctgcccttcctcctccagccctaggaatgacaaatctactaggaaaatgagataacttttgcactggaagttggatctttgcagatcctagatctgtcttggcagcgttgacacaagtgtgtgccaacacgatgaccctgcacctcactgggaaagtcttcacacacccacacggtcagttcctagtgcttctcctcacacgtgctctattttatttcaactactttttcacggaaattttctaagatatggtgagaatggccccattttcctcctattccttaataataggatccccaagtttttggaactgcaaagatcccagttaaaggattacacattttctggccttcttaataggctgtgtgatgaagttctggctgaagagttgtgagcagaagtgttgtgttgcacttaccatctccttagaaggatggggacagcccttttcccttttcttcttccttccacctggaataaggaagtaaatgctagaggttttgcagccattctgggccatgatgtgacttcgggaataaagaccatgcagggcagagaaacaggagataagaagactgggtccccattagctggcactgccattttattcccagactgtctgcctctcagctacttaaaaacagaaaatcaatcaactttactgagttacaattcagagaaaataaaatgcacccattttaagagtttaattcaacgagttttgacaaatgttgacacccacgcaaatgccatctcagttaagatacagagcattcccacaaatcacagaagcttccttgtacccctggcagtccatcttcagtgctcctcccccaccacacctgccgcagtaaccacctatctgctttctgtcctatagattcattttgccctgggctacttttccaagagcaagaactaaacgttcatctcgctgaagccaatattttccaggcctctattatttgcagctgattcgaatgcaaaactgaatatagatatattacagcttcaaatagaggcccctaaacactgtaatattttcttgataactccagaccatcgttagacaccctgtgctttagatcggtttcctgggaaacagatttggagatgagatttgccagcaggaggtttaatagagagggccttcagggacacacctgtgtagtaagtgcggggccacaggatggggcagcccccacagagggtgcgctacggcttcagagatggcctgggcaggggcctgagctttggtgtgcccacactgaccagtcatcggaagtgggctatccctggggacacgcgaaccttagcctacggcagtacccagggagtgactcagccatgagccatcagcaggcaacacccgcaaccactgaggcagtggatgtcttggcactgatgggagtcaggagctacatcgccatggccaggataccacgtgtgctgctggtttcccccggggctacttagatgtgagggtacttctcgcatctgccctgcaccccccagcagccactccacactctcctgcaccccaggccctggtacccatgaatctaccataggcctccagggctctgcctgtccatagcccctgctctctgtgtgatttgtctgatgggcacatgcctggcgcttggtgggtcccgaagctgtgagggcagcagaggcctggccttggggtcagggccaggagtgtcaggagagctctgcgcctcccaagcccctgctcatcttcctccgagttctccgtgtgctcttcctggatcccctcccggtatcaccgccacgcctgggaggcgggggtttcagatcccttctgtcttctgtctcctgagccgccccttgttgaggatgagtgtctctagtggccatttctgacgtctttcgacatacgtgactttggcgatgcgtgctcctggcctgatccttcttcactgtaagcttcacagtgacttctctgaccctactcgaaagacctggcatgtcatatccttctgagccactggcattcttctgccccaggaacaccccactgcctcccattcccgccttcgtttcggcatgccgcctgaggcttctccggaactcagcccaccagttctctatcaaccatcccctccgtccacacctacagcttcccctctacttggttccaggactgtcttcccaaaagccaatgttcctggaaccttgactgttagacaggctggatgttaccatagagcagaatccagagttaacaagagatgacataagggataagggatgcttttcaaatgctactttttaaatgaaaaatatttttaaatatagaggagtacagagaataatatatcagacacgcatatattattgtttccaaaaacactgttttattattaaaatttattattgtttccaaaaacagtgtatttggaaacaatgcaatgtcaggtgcaggtgaagtctcctttctatcaccccagtctctctcacctgccctgtcccagaagcaatcactaccctgaatctacattctgtctgatacttttaccacattctaatctattcaaatatactctctctctcattctatatatatatgtgtatatatacacatatatatacacacacatatatacacatatatgtatacacacacatatacatatatacatatatacgtgtatacgtatacgtatatacgtatatatacatatatgtatacgtatacgtatatacgtatatatacatatatgtatacgtatacgtatatacgtatatatacatatatgtatacgtatacgtatatacgtatatatacatatatgtatacgtatacgtatatacgtatatatacatacatatgtatacgtatacgtatatatgtatatatacgtatatgtatacgtatacatatatacgtatatatacgtatatgtatatgtatatacgtatatgtatatatgtacatatacacatatatacacacacacatatatatatatacacacacatatatacacacacacacacacatatatatatatttttttgagatggagtctcccttggttactcagactggagtacagtggcaccatcttggctcactgcaacctctgcctccgggttccagcaattctcatgcctcagcttcccaaatagctgggactacaggtgtccaccaccacacctggctaatttttgtatttttagtagagatggggtttcaccacgttggcccagctggtctccaactcccgacctcaggtgaccggcttgccttggcctcccaaagtgccgggattacagaggtgagccaccatgcccggcctaaatatacattatgttgtgttgcatgttttaaatgcacgtatacagtaattactatatggttctattccttgcttttcaaaattcaacatcacttcagagattaatccatattgattcacatgtctagctagttggttttaactgcgtttcagtagtctgtagtgagagtatcacatgctgtatgtactcctccctctattgctggacattggggctgctttcagttctgttgtacaatgttgcaatggcatccttgcacatggcttctggactctgcagggaagtttcctgagggtaggtaaccagagggagcaattgctcggctgaggacgtgcctcttcaaccttcctggattttgccagattgctctccaaagtgcttttcccaatttacactcctccccagtgtgtgtggaacccacccccccccccccaattcctcctccatccctggcatggctgggtgggaaatgcgatctcactgtgactattttgcctttcctcgtcctggataaagttgagcatctttcttacatttattggccatttggatttttttcttctgtgaaatttctctttcaccttataaaagggttttgcccttcaggtttcctctaatgtcatgttccagcagtacttaagaaagtgtagtccctggctgggatagaggctttaggaggctgaggcgggaatattgcttgaggccagaagtttgagatctccctgggcaacatagtgagaccctgtctctactaaaaatttaaaagttagccagttgtggtggcacatccctgtagtcccagctactcagaagctgaggtgggaggattgcttgatcctgagcatttgaagttgcagtgagctataatggagccactgcattccagcttgggcaacataaccagactctgtctcaaaagaaaaaaaaaaaaagtggcaccccacaggccaggtaaggtatggaggaaaaaaccttccttaggcatctgtagtccaggggctggctcccacctgacatttattatctatatgatttgaggtaaatgtcctcctttctgctttttaaaaaggcgtatttatttttaatgtatgcaactcaggttttcagtatattcacaaagctgtgcaaccatcaccaccactctaattccagaaagaaaccctgtccctactagtggtcacgctcttctgctgtcagcctctggaggccacacattaattgttggtctgtgtggacttgcctattctgggcatttcatatagataagatcatacagtatgtggccttttgtgtctggcttctttcaggtcgcataatgtttttggggttcaacatgttgcagtatgtaaccatatttcatttctgtttatggctggataacgttccatgatacagatacaccacattttgtttatccattcttcaatgatgggtcttggggttgtttccactttgttggtatcatgagtagtcttgctatcaggattcacatgcaagtttttgtgtggacatagcttttcacttttctggggtacatacccaggcacagaattgcagggtcatatggtagcctctatgtttaactttttgagaactgccacactgtttttcacagccaatacaccattttgtatttctaccaccaatgtgtgtgggttccagttcccccacatcctcacctctcctgttattgtccaccttttggattccagccactctagcagtgtgaggtggtatctcactgaggttctgatttgcatttccttggtgactaatgatgttgaacttattttcatgtgcttattggccaatgtctatcttccttggagaaaggtctacttatatcctttcttatttttaaaattgggtcatctgacccaattttacttattgtttcattgttgacttgtaagagttctgtatatattctagatgcaagtcccttgtcagatacatgacttgcaaatattttctcccattctgtgggctttcttttcactttcccaatggtgtcctttgaagcaaaaaagtttttcattttgataaagtccaacttatcaaccttttctttggttgcctgtgctttttggtgtcatatctaataaactactaactaatacaaggtcatgaatatttatgcttatgttttcttctaagagttttatacttttagctcttacatttaggtctgatccattttgagttaatttttgtatatggtgtgaggtagggatccaactttatttttttgaatttggccatcccttggagaatcacttgaatccaggaggcggaagctgcagtgagccaaggttgcactattgcacaccagcctgggcaacaagagtgaaattctgtttcaaaaataaaataaaatgaattttgccatcctgttgtccagcaccatttgctggaaagactattcttttttcccattgaattgtcttggcatctttgccaaaaatcaactgacaataattgagagagtttatctctacattttcaattttattccattcatctagatctctgtccttatgccagtaccacaccgtcttgattactgtagcttcgtaataatgatatagtttccccagaggtaaactagaaagcatgtttcttgcttgcctcagaggactatctaggccagtagttctcaaagtgtggtgcctggaccagcagcattacatagaaacttgtcagaaatgcaaattcccaggcaacactccagacttgctgaatctgaaactctgggggtggggcctagcaatcagcattttaacaagccccgcaggggattctgatgtaccctaaagttttgcattcacaggtctctatgtgtgctgtccaatgtgttagccactagccacatatgactatcaagcacttgaattgcagctaatccaaattaagaaatgctgtaagtgtagaacacacactgaatttcaaagacagtagtataaaaaaatacaaaatatctcattcataatttttagattgattacatgttgaagtaataatatgtatatatacatatatgattaacattatgtccatcccccattagtcatggagctatatgtttcagggagaaattcacctactgttccttgcagggcacgtccttggcatatgcaccaggagctctagctcccagaacaggaaccatcatcagaagcagagctggaaaggcaggcagccttttccggttcaaactggtttgaagcagaggtcagagctgctgcttgtgtttggctttgggttttgtgttttagcatgagcgttctgcagccagccagactctgggctactcccctctctccactgacatggaaaagatgtctgtgtgttgtgcggagcccccggctggggcttctgacttccatgttggggcctgagctgccgctgatgtggcgtcccaacctgtactggacaaccatgtgtcatggcctcaggcttgcctccaccccactgtgtaaaccagcaagggcacagaagtccaacccaactctgtggagccactactgtcaccacaaaggggtcccaatccagaccctaagagcgggttcttggacctcgcacaagaaggaattgggagccagtccacagagtaaagtgaaagcaagtttatcaggaaagtaaaggaataaagaatggctactccataggcagagcgcaggggcatgggctgctcaactgattatacttatagttatttcttgattatatgctaaacaaggggtggattattcatgaacttcccaggaaagacatgggcaactcccagaactcagagctcttctcccttatagaccatatatggtaacttcctgatgttgccatggcatttgtaaactgtcgtggcactagtgggagtgtattttagccggctaacacattacaattagcatataatgagcagtgaggatgaccagaggtcactcttgtcgccatcttggttttggtgggttttgcccaggttcttcactgcaacctgttttattttttgtttttcatttattttttcttttctatgtcccccccattcacaatacagaccaggcacagggcctgggctgaggtgtatattaggtaggtttactctagctcctctttctgtacagccagtgtaagaacgcagcctgtgggtaagtaccaggaggcctaccgcaacgtgttttatcagcaaggtctttgtgacctgtaccttgtgtcgacctcctatctcatcctgtgacttagaatgcctaaccgccagagaatgcagtccagcaggtctcagccttattttacccagctcctcctcaagatggagtcactctggttcaaatgcctctgacactacttgaagatgtgtagtccaggagcacatttcacattttacaaagccatttcccattccttggtgccttggcctccctcccttgggtcatctgagagagagccctcagggggaaaggaactcagagaggttgggtgtctgctcaggtgatgccgatagcgtatgctgagctgggccagcaccggtgggctccgactgatggctgcgatggctttctttatttgtgtgggcagagtggtcagtcagtgggaggatgatgatgagggtgaggacatgacaacgaagtaacatgcccatcacttcttgaggagctacctcaccagaggccctttgcacacattgcctcttttaatccaagcgagacatgattcatatgcacattttacaaattagaaaattgggaccctggattggggcctaatcagggttgctaaagggaatgctttaagtttgctaatgaggaggagggaacagcgagtgggggaggaggaaagcagctgttttttgggtttttttgagacaaggtctggctctgtcacccaggctggagtacagtggcatgatctggactcactgcaacctccacctcccggattcaagccattctcccaccccagcctcccaagtagctgggactacaggcatgcgccaccaggcttggctaatttctgtaattttagtagagatggggtttcaccatgttgcccaggctggtctcaaactcctgggctcaagtgatccacctgcctcggcctcccaaagtggtggggttacaggcattgagttttcttttttttttttttttttttttttgagagcatccaatgttagctcatttaaggctctcgacccccccaagaggtagttcgtaggtcaagctgtctactttatagaagagcctgggagtccagggttatctgacttggagtcctgttcattttcctgggtacctccaaaggccgctcggtgagtggacagtgcagttctggagccctcccctggcaagtcccgctccggcccataccccgccctgttccccagcagccacggtcgggtagaggggtcagggaagcagggcaagagggtaaggcactgctcaagaaacaaaaccaggtccttaacgtccctagtcctgccgggcagtgtcccaggaccccggccttgagattagagagaggcagagggcatacggaatgggaaatagaagaaaatgtaccaggacatgcttcctgtcttatgcttagactgccatgacgaaataccacagactgggtggcttcaacaacagaaagttatttctcagagttccgaaggctggaagttcaagatcaaggcactgctggctgattccttttctggtaagggcccactttctggcttgtagacagtcacctttgtgctgtgttctcgcatggcctttccttggtgcatggagagggagaaagatttttctctcttcctttctaagaccaccaatcctatgacttacaactcctttaacgttaagtacctcctaaaagtcctatctccaaatacaattacattagaggttagggcttcaacaaaggaattggggtggtggtggtccacagcaggggaggggatattttagtttatcttgagcttgcaaggatgaaggggaaagagcgggggtgggggggtggcatcggaacctgcctctgagtcacacttcctggatgagccatgggccacagcatctgtatcaggagtggttacaaaacagcgtgcctcagggataaacaagctgacctaatgatccaattttcccagctctggtccatctacagatttgaggcaggatccagtgattctgctggctgactggtcatggtaaatttccaactctcccctttccaggcacggctttggtttcctgctgcagctgctgctggggagttatcagggcatttcctccgcctgtgagctcctggggtcaggggaaggttgggtggccagagatgctgcctctaccctaagtcagcgtcacccatgctattcccagcagctgcatttctccactctgtaattacaaatgaaactggggaatagaatcaaaagagtacctagaaacaagctagcctctacttcctcaaacattctggggcaggagtttgtgcgctggaacaatgttatttgcaagattctccctggtggatatacactcaagtattaaagtgctacaaggaattaaaaaaagaatagtatttcttccagagcctgtgtgggcccagcacaatgacactgaatctggctgttaaacctggctgttgctgattctaatatgtggccttggacatttcatttttccaagtatagctttcctcatctgtaaaatatggaaacaatctttagaatgtcggagatagtgtatgtaaaggtacttcagaaacaataaagtccaaatcccaatgacattttttgcagaaatagaaaaacccatcctaaaattcatatggaatctcaaggggccctgaacagccaaaacaatcttgaaaaagaacaaggctggaggactcacacttcctgatttcaaaacttaccacaaagctacagtaatcaaaacagtgtggcactggaataaagcttgacatatagatcaatagaatagaatagagagcccagaaacaaacccttgaatatatggtcaaatgatttttggcaagggtgccatgatcacttaatggcaaaaggacagctttttcaacaaatggtgctgggaaaactggatatctacatgcaaaagaatgaagctggacccttacctaacaccatatacaaaaattaactcaaaatagatcaaagacctaaaagtaacctaaaactatagaatttttagaagaaaacttggagcaaaatctccacaatgttggatttggcagtgatttcttggatatgacattaaagacacagacaacacagaaaaatagacaaattggatttcataaaaatttggtgcatcaaaaagcaaaatcgggctggtgcggtgtctcacgcctgtaatcccagcactttgggaggctgcggtgggaagatcacttgaggtcaggagttggaggccagcctggccaacatggtgaaaccccgtctctactaaaaatacaaaaattagccagacctggtggcgcacgcctgtagttccacctactcgggaggctgaggcaggagaatggcgtgaacccacgaggcagagcttgcagtgagccgagatcacaccactgcactccagcctgggtgacagagcaagactccgtctcaaaaacaacaacaacaacaacaacaacaacaacaacaacaacaacaacaaagtgctggcggtgaggatgtgaagaaattggaaccctgtgcactgtttggcagaatgtagaatggtacactgtggaaagtattattatgatgcttcttcaaaaaattaaaaatagaatgaccacataatccagcaattccacttctgggtatatacccaaaacaactgaaaataagatcttgaaaagatatttgtgcacccatgttcgtcgcagcattattcataattgctaaaatgtggatgcaacccaatgatttcttgacaaacgagtgggtaaacacaatgtggtatacacacacatggaaatattactcagccttaaaaaggaaggaaatttggacatacactacatcatagatgaatcttgaggacattatgctaagtgaaataatccagttgcaaaaaggaaatactgtatgattccacttatgtaaggtattagagaggtagtcattatttaatgggtatagagtttcagttttacaagatgaaaagagttctggagatggatggtggtgctggttgcacatcattaatgtatttaataccactgagctgttcactttaaaaggattaagatgataaattttatgttatgtgtatattataataaaagttagaaaaaaattgtcataaaactaagtcagatattaagaacaatcagaattacttctgtcttgtttacagtcatcatatgaaaaacaaattgtttatctagcatgacacctgttatgggttgaattgtttccctcaaaagatgctgaacttctaacccttggtacctgtgaatgtgaccttatttggaaattgggtctgcacagatgatcaagttaagatgaggtcattagggtgtgccctaatccaataatgactgtgtccttatgaaaagggaaaagagacaggtatatagagaagatgtgaattcacagggagcgcacatggccatccataagccaaggaatgcatgaggttaccagaagctaagagacagacatgaaacaaactgccccccacatctctccaaaggggccagccctgccaacactttgatcttggacttccagcctccagagctacaaaacaacacatttctgttgtttaagttgcccagttggaggtgcttgttacattagccccaggaaattatacaacatcttacctgaatttgctttcttctttgctctagttaaattcaaaactacatattgaataacgacggtgtgctctctctccatgaagcttcggggtgggtagacagtcctcctcttgaaggaacaggagggacgcaagggaagggaccaacttgtatctcatctgagagagatacactcctggaataagaggtctgcggttaagtgtgtttctctagaagttcagaaacagaggaagcatctgcgggctaagctgctgagggctaggtgagagctaactgacctaagttttgaaggatggatgggtgacaggttggagggggaagatggaaaagtcacatgggagaggaacagcatgggccaagtgtggaggaaccagtgagtgggctgggtttcagaaacaggccttggtctgcttttgagccctccctgaacttttccaccccaaccccacctcctgcctgtgtctgccatgcacctcccttcctgtgagtctgtggacagactttgcccctttgccctgtgtgtgcttgggagaaatctgctcagtttctgtggcagggatgtttctacgtgttcatcaaaccggctttgtttacttccgaaacactcatgaagaccacagctgccagagccccttgcatcctggtgggactgtgcgactacttctggcccatggatgtgggtggaagtgacgtgtgcttccccaggcctggctcctggaccccaccgacggcttctcacctgtaaccccaccagccttctacctggatacttcacggggagctagagtggccttggctaagaaggaggcatggcacccgcgggtaccgggccgccttcatcagtcggtgcactctggtccaccgcccacatgccttcatgtaatcttcactgtagggcccacagggaggggaacttcctcgaggtctagctttgcctttccgccttcagagccaagtaagaatgaggggtctgggctcggcccaccttccctgcaaggccctgtgcccgctcccctcaaagctggtcttgcatgttgctctggcggcctctgtagcaggagttcactctgttttccgtggaggaggagtggaaggagggattcaagctctcccctagagacgctagaaagacagttttgtctcagcctcatacgatcgcccagctccacatttctggctgtttctgtggttacctttcttcggggatgtttggggcgggaggtgggtgtgtgtgtatatttgctcttctgaagccgtttttccggagctcctggtgggggtgggggtgctctgtccctggttcctctcgaggcaggtgcaggggatggaggatgcccccctccccgagagccaggaggcgccgaccctgggcaggaggtgccagaccggcgcctctcccgcgtggagctcgaagaccacagatgcctggaagggaggagcaccttccgtggttaggtggggaaaccgaggcagaggcggcccaatggactcgcctaaacggcctggggagtcactgcaggtaaccagagctggagccaggcttcccactccaggcccggggctctcccccgaacaggcgtgggaaggggtgcgagctgcacgcggggctggggctgggggtgcggggctggggcaactcggctcttccccttcctaggccgcccgggccacttcctgcggcgtgggggcggggggcgcgggcgcagggctggcccctcccgggcgccgcctctcggcctcttctataccagcaggccagaggccaagggttaggggaacagaaccggtgcccggctccgcccctgtcccgaaagccactgggggctgggacccggcagggccaggtttgggccgcgagggccgaggagcagcgaggtgcaggggctgcgagggccgagccgggcgctgagggtccggcagggggcgtggagggggcggggcccggagggggcggggccgtaggaaacttgagcgcccgcctctggccgcgcgccccgccccggcccccgcctccgggtcccgcctccaggtcccgccttcgcgtcccttccttcccggagctggcaggcgggccgcggcggcggcgggcagcggacgggcggactgacgggcgcctccaccttgctccctccctggctgccggcttccttttgtctttctgggcggcgatgagcgcagggccggcgcagcagctgcgggcgcacggaggcccgcgctgctagtcactcctcccggcctcggcgcgcttgtcccgggcagcggcccgggcccgctgcagccgccgccggcgccgaacttgggctcgggaagccggcggaccgcgtcctgcgccggagcaggtagggaaggggcgggctgcggtctgctggctgctgaagtgtgccccgggcgtgtgcacccggcgtgtgcaccggcgagcgctgcgatccggctctttgcgtgtgtgttgtgcgcgcgtgtgtgtgtccgggagtgcccgcgtttctctgcgcggtggagttgtgggtgactgcggacggtggtgtgtctttcgaatggcgtgtactcgtgggcatccatgtgtgccttaggtgtgcacattttggactgcgtttgtggaattgtgtgtcggggcgcagttgctggtggggagcggtgcctggcgggtgtcgtgtgtgagcagctgtgcgcagagcggggtggcggggtgggtgtgggtggtccagccccacgcccagagccccctgtccctgctggtcggcgcagtgcgtagcttaggagcctcgaggacagctgggacccgacgggcaagggcgggcctcgcgggcaggctgggcagccctcagggaacaggtccgtgcggcccacgtgggtcgcctgtgagcttctgccaagggtgggggcccacgcggaggcgatccgctcgttcctcccagggccatggggcgacgaggagagccctggcctccccgcgacccgcactgcgacctgggccagacgcgccaccttccccggtcgcggtttgcttctctttaaaatgaggacagctcctcccttgggggctgtggtgacaggtgaaatgagaacgcactgaagacagctcttggtccaaagccccgcacacagtaggtactgtgttaattggattagcgtctcctgtttaaaatcctttttttttcccctttatcgtgggtggggccttacattttccccgggcgtgttttgtgcctctccctggccctaacttaaccgcgaagcactgagattcgagaaagtttagctgccagctgcgctgcctcctgcagcacctcccgggcggcgccgcctccgcgagtgcccgagagcgccgcgctgggcgccggccctgccccagcccccaggctcccgcgcaagcgtgggggtccctctcctggccgggaggcagcgactgcggagttgagaaccctttggttcaacaagttcctagtccgggaggatgcagctcagctcgtggagtccgagagtcacggcgtaaaattggcgcttcccgcacatgcagatctcgggctcccggggtgtcccggccgccaaaggccacccctttcctcctggctgaccccaattccaccagaggaggatgtttgccagggacgccgagtccagctgctggcctcggcattagacaacccccagccccagcccctgccatccctgctcccttgcagccagcctcatgccgggggtgccacatgggacacctcctcctagtcccacaccttaatttaaaacatttacttttgaaacctactagtcgtaaaattgaaccgcagtgaacgagcacccagctcttaccacgactcactctctggagagttctggcgcctcggcgctggctcggacgcagcaaggccagctctaggggtcgggtggctctcggccagagcgaaggatattctttcccttcatcgccttggtgtctttctctgggggaaaaaaatcgcctttaaccaagggagccaagatctcaccagtgcaggaggctctcaaaatggagcgccggcatggggttgggctgcggaggggacagcatgggcggccttttggtatggatgcgcttcccaactgtcaggggctacgtgatggtgttcccagagaggcgggctgctttgcgggcttttaggagccagggatagaaacctggtccggttcctttggtttccctcggccgagactgaagccctgcaatcctagccatggcaggccagggggatgcgatgaactcattttctcatttttcatcctgacttagtgacaggggcacacttagaatgcaccctgttttctgtttcatcaaatgattttatgtcctacaagaaaaaagggcttttggtgtgaatcctactctttcctcataatcaggttccataataatattaaaaaaaaaatcagtctggctttctcagctcagaagacagacccaaacccaggtttgtgttttgttttgtttttgtttttttctagttaaagccagccctttgtctcaagcaagccagtgttttggccttagatctatttctgtttcacttttgaaagtgcctgtaattactgagctcttgaggttttattggataatgtggcaaagggaaggcccgggggccctgcctctcccttgcggtgggatgtggtgccacggtggcacattctagccttgcctgctccctctgcgtcccactttcatgctgtttttaaggtggaacagaaatgtcaatgtgtgataacaatttgggagactttgtctttggaatccaataaatggaaggtcctttgatctgtggagaaaccagaacaagtcaaaaccccagaagaacagagatttgcccaaactccagccaatgacccatttatttccaacaagccctcctagagatagattctaagtgaaatacaagaacgtggacacactccgtcccctttctggccacagggctgtgcagaattagaagtgcagtctatggaaggacaaggactggacttcgcttggtgcaaacgccccagccaggcgccccatactcacctagcaccatttcaccctggagctgtttcctcctgttgaagcgctggtgctcacaccccctaccttcagggctctgcaagcacagttccaaggtctgcagcgcgggtacagtgcatgccctgctgagtgtgcgtcagagcagttgtctccctgtgacacttattctaagaccctttttgctactcataagtggtagagtaccacactcactcatgaaccagtgataatccagggtactaacgggggccccggagtttatttggcaccgaagattaagctacttggcagctgaatttttatctagattggggttaggtttgtattaaaattttgcattccagcaagccctaaaccgtgcttgttcattgtgggataatgcgttcaactgatgagttgccaggccaggattgatgggggattatgtgtattctgctagtttgtcagcacctgatgtcactgtgctggggggtgggggaggcatgtttggagttaggatgagcagacacttgtagattttaatcacactctactttggggctccctgctctcctatggtagcagggggtttctgtgtcgttcttatgtcctcatgtaaagctgcacatctgtgaatgtcaggtagctcttgtgcttttccccttagattgagtttctaatctgggaatgacagagggtggctgtatatggagacagcagcatgggcttaggggctcttttggtgccagttaccctacggaaaaaaggtttcttcaaatcactttctacaaagactaaaaaatggttggaatctagtggtgcagattgtaatatgacttcaggtaatcaatacggtttgacaggtggaacatttcttagatgctgatgagcagggcgcaagtctcaagatttttaaatcatctgaaaagcacagtaaatcctttaaagagccctaccttggccatgttgtttcaagtaaaattgaatttcagaggcaaagcttcacatcggaggcatgacgaactaaagaaatccttcccagagacctccactctcttcctgttgccaccctcctctgccagcagcagggcaggaaagatgacttcttggggctgtgtgcctttaccttaagaagcaagtgcaccctgaatgcttctaatcccgcagctgggttgtctgggtatttggatctttttggtgcttgaggtactacccaagttggcaggaagccaggagcctgggggtggaggtgtcttagccccacctgtggcatgagacaagaggtcttctccagcaagggatgggtctctgacccttggctaagaaaactcaggattgttaaatacgtactgcatggataaggttgctgtgaccctgaaaaaaggaagaaggcttttgggtggtgcgtggttctcctcttggaagtcttcccagatttcgcctcagtactctcttgccctagcttaaatctttccttgctctgtgtccccttaggcaagtgaggtctcctctcaggtaggcatgatattaagtgcatgtctagaggacagttccttctacctgcccaggtgcactggctgaactcacctatgcccacatctgtgcattggcaggtgatatagatatacacctgagctgtccccctgagctgcagacctaacactaggtgtgggctccgagctgttccacatcaaaacagagccgaggacacatctccctcactgaagctgtgtctcctacctattatggtcaacacgtctcatctactcatttgttaaagctagaaatctctggagagttttggagctctttctctgtcttcacttgaaatctctggagagttttggagctctttgtctgtcttcactttgccatctaattgggtcagccctctctgagggctcacacccactcttccggcacagcggagccttatctgcccttggcccagagaatgcttccagttccttcactccagccacaccggcagcacttcccagtttaaaacgcagatttcatcatcccactgtcttctgcctccccaaccccaccaaaccttggtttgttctcttaacgcagtaagtgcttctgatacctactgtgtgccttggaccaagctggagtctgagaaggttgggcccaggcatcctccctacctgtgcagagtttaaggtcttgggctgggggttgtatgtggggtacctatcaaataagaccagggagcgtgaagtgctatggaggggagctcctaccccagtatagggggctccctggagaagcaccctctaagctgatacctgggagagttgggggtgcaggggaggggttggagttggggctggattgttcgatgcctttcttctgtctcacccagacttccttatctgctaaactcctactcatttttgttttaattaataccaagatagaatttatctctcataaagcatgcccattctaagtgtacagtttaatgattttcagtaaattaatagagttcatagccattaccacaatccagttttggaacatatccatcaccccagaaagatccctcttttgtacaaactccctgtccccgtcctcaagccgccagtcccccacagatttgctttctgtctctagatttgccttttctttctatgtttcttagtgtgttttcataggttcggcccaagagctgtttcatttgggccttcctagagtcttctagttagaatcaatttatcccccagcaccgacgaagtgagctgggtgcttggccatcccgctgctagatggcgagctctcttacctgcctctcctgcctgcacctggctcagcactggcacctacagaatacccaaggtgtgttggctggaccagctgaagttgtgttcctcacatttcttttgtataactcctgagtatctagcagagtgtggggatttaaaatacagcgcatgtattgatgtgtcaggtgatgtgagccctgctacatacataccttaacttgtttcatcaagaacttgtgaggcaaatggcaaatcaaaaacaaaaacaaacaaaacaaaacaaaacaaatctattttctaagccaggcacagtggctcttgtctgtagttccagctactagggggtgctgaggtgggaggattgcttgaaatcagggatttgagcctgggcaatattgtgagaccctgcttcttaacaaactttttttttttgagatagggtcttgctctgttgcccaggctggagtgcagtgatgtgatcccagctcactgcagccttgaactcctgggcccaagcaatccccctgccatagtctcctgagtagctaggactacaggtacacaccaccatgcctgctgatttttaaattttttgtggagacgaggtcttgctatgttgcccagactggtcttgagctcccgggctcaaataatcctccagccttggcctctcaaagtgctggaattataagtgtgaactactgtgcctcagcccaagccatttttctaaatgaaaaaactgaggaggcccagagcaaataagtagcccaagggcatcagcagaaagtagaaggatcaagaattaaacgaggtcactttctcttccgcccttgttttggtagtaatgatatgcccttttatggccttgcctgggctggtgttcagattttcctgtacgagtcttgtcatcccttcctaagccatggaagctccttctagggcatgagtgctgtgtgacacatgttcacacagtgttgccccagtacctacctagtccacaactgaacaggtagagatggttcaagcaatgtgtgtgtgtagagaggtctcctggtaaatagaaggggctgggggagggcgttgaatgcagtggtgctgtggccttgggtggcttggtgcatttctgatgcatttctcaccttggatcattttcactctttgaggaagagagcagaggatgagatgccatttgacagatgcacaaaccaagacacagaaattgtatacccattgtacgccaggtagatcacaaatgaccgttctctcccatggttgtagagaactctcatggtggacagaaaccatgaaagaaatcatggtggaaagaaccaagacattcttgaatcggagtattagaacctcatttgcaaaataccttggaaagatcagggacactggggtttgaattgtagtctttgctctgttgtttattggctggtgatggtctctgaatctgtttgctcaggtgcagaaaggggttttaggctgagctcagatattgacaggaactacaattcaaacccaggtctgcagatgtggcagactgggtttgaactgtagtctttgctctgtttactggctggtgatgttctctgagtctgtttggtcatgtgcagaaaggggttctaggcgcagctcagacgtagatggggacgcagatgtgagtacctaggtgagtctggctggtcacgtgtggaataagtggtggtggctgccattactctttaagcattcttggatctagtgcctcctctgccactgagtacagaattccttttcaaattcgggcttatgaggcatgttttgatccaggctgtcgtagcaagggatttgatgctggagtctgtgactgctgtgcgtgtggaggcttccggaaggcagccagtgctggttactgcttggagtttggggagctgccattttggattgtcctagcctcatgccttctgagaagcatctgtcagggtccctgatgcacctacagagaccctgagcttggtggtgggggttgcacagagagagctgcaggttgttcctcaggcataacgaggcccggagctggtggtcccctccctctgtgagtgtgtgcagagcatggatcgggtctgggagtgttcgtgctggcaggccggaggaggactgctgggcacacttgcagaattgcggttctgtacagcagtgtgtatcgactgcagcgctctttttctctagcagcaaaatgctcagctctctgccttctttctgtgcatttaacagacgtttccagaaagcagaattgatgacagccccaactcctccctttcactcccatcttttctatttgctgccctgtaatcaatttttggagagaagtgagaacctctcgaaatcgatcacctatgttgaaaaaaaatcatttttaacatcatgcagttttccgtatttactgtgtgtggctggagacactcctggcagaatgagtgtgggatgtaggaggtccagaaaagcccccagcttcaggggctgagatagggccatgggtggcagaactggttgtccccccgccccccaatccctcagcagtggttgaggtgtgctttattagaaactcttcagtcatgcagtttggagcccgtgctggtgatgcagcctggatgcctggcaggggcttagcctccaggggtgggacatgagatgtggctgccgtggcttctctgtgtctttcttcccagcgagtaaaggtagacgcagggctctggcaggtgctaaggccctgcttgccttcatgctggaatgctggcaggtacaatttattcttatttcttaggaggtgctttcccctcttctttctgaagacatccagggataaagaattgctgcttttatgagcacatgttcttggtgatatgctgttaccttatctaaaaacaatacggcctggctgattattctcagagctcattgtaaggtgaaaggttatgcatttgagaattattttcacagtgtggatgggagtggggggagaagatgtagagcacaggtaaggaattccaggttttggggccagggatcgccaagcagtgtaaagggctcactgtggcctgtagctccttccccctgtggtttgtgctgggccagttgctggctccccaaaaccattatcaccattatcattatcactatcatatccatcacctcaccatcattatcactgacatcatcacttttctccatcaccatcatcatcatcatcactatcatccccatccccatcatcatcattaccatcatcattgctgtcgctatcatcatcatcattccattcatcaccattcatcatcactgtcatcatcaccatcatcatcactgtcatcaccatcaccaccaccatcatcaccatcgccatcatcactgttatcgtcaccattcatcatcactgtcatcatcatcgtcatcactatcatccccaccatcaccaccatcattatcaccattctccatcaccatcatcactatcatcctcaccatcatcaccattctccatcaccatcatcatcatcactatcatccccaccatcatcaccatcaccatcatcatcactgtcatcatcaacatccatcatcactgtcatcaccatcatcatcactatcattaccatcaccatcaccaccattatcactgtcatcatcacctttctccatcaccatcatcatcatcatcatatcatcatcatcatcatcatatcatcctcatccccatcatcatcaccatcaccaccgtcattgctgtcatcatcaccattcaccatcaatgtcgtcatcaccatcatcatcactatcatcattatcaccatcatcaccatcaccatcatcattactgtcatcatcaccattcaccgtcactatcatcactgtcattatcaccatcatcatcaccaccaccatcaccatcatcactgtcatccccatcctcatcatcatcaccatcactgtcatcatcatcaccatcaccaccattgccatcaccatcaccatcattatcactgtcatcatcacctttctccatcaccatcatcatcatcatcatcactatcatccccatccccatcatcatcaccatcaccaccatcattgctgtcatcaccattcaccatcactgtcatcatcaccatcatcgtcattatcatcattgtcaccatcgtcaccatcaccgtcatcatcaccattcatcatcactgtcatcactgtcattatcaccatcatcatcaccaccaccaccatcaccatcactatcatcgtcatcatcatcactgtcaccaccatcaccatcactgtcaccaacatcatggtgcttctcaacctttgggctgctttgggtcgtgcttgacatggcacattcctggtgagttagctgttctttgggggttttctactgttggtgtggtgattagggtagtcaggacaggatgagtataggcatagagaacccaagtggatgatggtggagtgtgattcttctgaaagggtcttcatgagaaccactgatctagaagattctgggagaatctcacgtattctttcaggcccaggagtaagccagtgttacctgctctgtggagctctcctttgtccctccagggaggacaaattctggctggagcctgaccttactgcttgtccatctctcccagggtggtaggccactttaggtaggaccctgtggatttctccttggtgacccccgcattctgggcacagagcctggaacacaatgtctgcccagatgtgtgactgaaccaccccccaattccttaactgtaggatggcggctgccttcattagaatcttaacaccttgcctgagggctggctttgcaggtctgagtggctaggtcagggcactgctagtgttttctatgtttgtagtcaattggtgagagtttgttttacgcatttgttaaaactgtgggacagtggtctggaagccaacaaggctttagggttggcagagtgactcccatcccatcattgatgtctggctttgacttggcatgggagacattgcctctccagatctcagttctctcgtttgacaaatggggcttagggttgaacagcctctaagtcctctgtcagctctgcaattcaggaaagatgtttaaaaatgcatacttgcattgtaggtacatccaacatagagcaaagagagaattttcctagctaaattgactgcaaaaaaatgaaacctcttgggccgggcgtggtggctcatgcctgtaatcccagcactttgggaggctgaggcgggcaaattacgaagtcaggagttcaagaccagcctggccaacatggtgaaaccccgtctctactaaaagtataaaaattagctgggcttggtggcgggcgcctgtaatcccagctactcgggaggctgaggcaggagaattgcttcaacccaggaggcagaggttgcaatgagctgagagatctgagccactacactccagcctgggtgacagagcaagactccgtctcagggaaaaaaaaaaaaaaagaatcctcttataatatgcaggcatcttagcaactgccatcttagcaactgccatcttaagaggcagcattatgattcagaagaaactgataacattgaggaatacatttgtggagcacagattaggagagattggtgcaggggtggggggtggcaggaagatattaaggttggaatttagggaggtgagctctgtgggttggtttcatgcatccagctcaccattcaacctttcctgttaacttcctatattaaggaggctgagattaagaagacagggactcgtggcgtaagggcgagacagacatagaggtgagtgactgcagtgggatattcactgtgggagcattgaaggttggcagtcagctagattcttaggctgtagatcgggggccttatttagaagctgtttactgttcccttaagaggatcctctagcaggaaaaaccactgctagggttgttgctttcctcattataatgatgtctttatgttcgtcttaggaggtgatagtactgattatttaagaaactggtcagccaaacttcttaactaattgtgaattagagaaaagtcagaagtagggagtattatagagataagtaattgtattattttcagacaaaagtatatgtagtaatgtaaactactgaccagattttgtttcaaattgttttttttaaatgaattgctaagaattatttgaaattagcacattagcggtaataagatagtagatattagatagattagattaggatagtaggtagtagatgtaggtataaagagactgaaaatcagctgtttaaacatttttcccaaatgtggggctaggaagcaagataaagaattatgcaggccaggcgcggtggctcacgcctgtaatcccagcactttgggaggccgaggcgggcggatcatgaagtcaggagatcgagaccatcctggccaacacggtgaaaccccgtctctactaaaaatacaaaaaaaattagccgggcgtggtggcgggtgcctgtagtcccagctacacgggaggctgaggcaggagaatagggtgaacccaggaggtggagcttgcagtgagccgagatcgcgccactgcactccagcctgggcaacagagcgagactccgtctcaaaaaaaaaaaaaagaattatgcagacagtttcatttcatttatgtttggacggggaagaaagtcagaaaatagatgggaaggaaacatatctaaatgttaacggtggttgtattccatgggatcatgggtctttcttgatttttcatgttttgccacattctaaattttcaccagtgggcatttattatttttgcaattagacaggaaagagcctccaggaggaactccaaatacccatcctttatttaccctcttaatttgcttaccaaactttcttgttatggttagactggctggcatccataatttccatacttgtgattatttaaattaatggaaatttatcataatcccttattaaaatttcttcgctgcactgaaattcaacactgagcaaatctgttacctaggacataaagaaaaacattcagtccacgtgcggtggctcatgcctgtaatcccagcactttgggaggctgaggcaggcggatcacttgaggtcaggaggtcgagaccagcctggccaacatggtgaaaccccatctctactaaaaatacaaatattagctgggcatggtggctcacgcctgtagtgccagctactcgggaggctgacacatgagaatttcttgaacccaggaggtggaggttgcactgacccgagatcaggccactgcactccagcctgggcaacagagtgagacttgctctcaaaaaaaaacaacatccagagtcttccaggaaatttaccgtttcagtgtggcatagtgtagagtttgtttattatctagaatatggtttttcttttttgtgttcttgaacttgggcgttcacttcgtttgttgacctggaaggagccatctcggcgcctgctgtttgaaccttgggtattttaatgaagtggtttgatgtcctgataccaccagcccctgctgttgcttttcacggccctggcttttccaggaataatctccttactgtttgtcattctaatatgtttcagctccctttttgaaaataactttttctgctccccttccctgcccattcttcatgacccccagagaatgggcctgctggtctctagcccctgtgaattggaagactcctggcgatgatccttctttttctctctgtgactcaggcggttgatgttgggttgaccgtatttctttgctggctggtaagcagggccacctcagcccttgtgagggccatgcctgactttcaatggcttccctccaaaggcttcttaggccgttcctccccatcgtttttcagaggtttaatctgtttgagtccaggatattgagtcagcagtggaaagttatgaagatgaggccagccatcagaaaaattggctaatatgaaagattaattccagggtgaacaaaggagagggatgctggggccgggctgcctccccaggcaaatcacatcactgtaaaatccgagaaaccagaagttgcctttgctactcactcagtggctgcttgctgtttcttggattagatattgaaagaatcccatctttatagtctactgttcatatttatggtctggagaagaaaatgtaattttcagcaaaattctatcacgtctggtaaataatttcaggatctttacctatgataccacattaaaaaaaattcgtatggcttcagcattcagaaattgttcttttcaaactctgggccctcgggttattacaagatttaacaccgaggcaggaagcctgctcgcctatcactggagacaggtaggttgctatggagaccaggtgtgtgtccctgcggtttcctgggtatcccagttgtcctggaaaagaaatcagctcactttatgtgatatttctgcaatagtgtgtgtgaattaagtttttctaaacacagatcagatgtttttgttgacttacagtgtgatttctgacataattttgtcctcggttttgttttgcttaattatgaatcctacataaccctaccttttcctatcagaagcacttccatgcatcaagaccccctatccaaaacagccacaacaacttcaccaacaaaatctcttaaagctagagatgcctgctttggtgtgaatgatgattaccccttaaaataattcaacaattttttttttttttttttgagacagggtctcagtctgcctctcaggctggagtgcagtggcgtgatctcggttcactgcatcctgtgcctcctgggttcgagcaattctcctgcctcaacctcctgagtatctgggagtaccgggatgcaccaccatgcctggctaatttttgtatttttagcagagacggggtttcaccaggttggctaggctagtctcaaactcctgacctcaggtgatccacccaccttggcttcccaaagtgctgggattacaggtgtaaaccaccatgctcggcctcaacaattattatatatggtttgccagatcctggcctgggcactggggatgcaagatagagcaagaccattggaggccctgccctggcggagcttgtattagggttgtgatcctagaccacatgaagcccacaagggggccctgggctcacccgttcctggctcacattcactgtcagccacagctaaacctcggggcctggaacctctcttgttgtccccatgggacgagtgggcacatgccttgttggatggacaataacatcatctgtttttgtttgatgtgttattattcagaggcatttttcagaatggagaacagtgccttatcagtctgcttctgataattttatacatgaaaaaaatcctatttgtgcatattcttgggtctctccccatttctaaaggcagtcaacttggtggttggctgtaaaaagctctttacacttcctaggacttgtcaaatattgacaagtctttctcctttcatccagttcagcaccagcatcctcaaactcactgaaacagagcatcccacagtggcagccactgtaggccccaggtgggtatcctactcctccacccccgccccagactcccccaaccccagctcgcacctgcagaagttacgtctttgcagttatttcaggagaaaaaggcggccactctttctctcccttctttgggtttgtgttcagcaagggtctactgcagtcccggtgccggacagcctgttttgcccatgcttgttaactgatggggtcctcaagtggccttgtgacaggcctgataaggccgcacgtgggtgtggttagagttgatgaccgctccggacattggcgatgtgaggaaagtgacagactccagcctccatgtgcagccggtgattggccgggtgggctcggttttctagtggcaaaggatgctgtgatctgaataagaaaacaaacctcaggccccaagtgccacgggcttagagacttgagaggaggtgcttgcaactccatctgggaggctaagggcagccaagagctgctgtcttgaggctgacccactcccttgcagtgtaatgggtagtgaacaggccatcctttttaaaggaaaataagtgcctccctatggactctgttcctatcctgctaccctccctgaagcttgaatagcacccacccgtgccttctccatgccagcccttgggtctgccgggaccactgccatgcttttgatggacacggccttgtagcgtctatatcctcatctgtgaaatgggaattccacagcctccctttcgcaggctgcttgtaatagttgccattaaacctcttctgaactctaaagtgctgtatcaatgtaaggaccatcatcaacatcattgtcgtcctcatcgtgagtctttccaaattcacctcctgctgccccagcacgggagtgtctgagactgcaggtttccttgatgggttcctggggcttcccttgtggaaatttgagttctgagccttctgcacttttccatcccccagtctggagtcaacctgtatttttcattttccctctgcaagatgtcagcccataggagaggcctggaggcttgcaggggaaatgggacgatgtttgaaggaagcccccgtgcctgtgggagcatgcagcctcctccgtctttttgtctgccaggcaggggagtaatttgccgttatgtactgggcagtctgggagctggactctcagatgaaaaatgcttgttcaagcacagacagccaggcatggctcaaatcagagcatcgatttagcaagcagctctgctcaaacagccagctgtgtgatcaccttttcaggggatgataggctgacgggcaggtggggtggggtggggtggggtggggtgggcagactaatacagggaccctgtgtttgggagcctctgtttaagcagagaccgggcctggagagagtatccctgggtagggaaaggtgctctcacattagtgggttccacctggccccttggtggagctcccattcattcattcactcattcactcattcattcacatcgtgtctactatgtgccagtctctgtgctaagagagtgatccaagcagaaggtctgaaatcctcagggattcgtttcccagccgacttatgccttactaagtggagcaggttctgggctgcaggggactgacttgctgctgcaggtctgggtcttgaactaagggagaaagacaatgcccatcttcttcttggcgcagtcatttgaggagaggagcatttgcttcttgccaacctgcctgcctgggaggccctcttgctcctgcagccccccgagtcccctttgcagctcccagtcttgcttggggttgcctcctccaagaagcctcctgggctagctcaggcatcctgtggaggcactgctgggccactgatgcctgagctcctgtggcctggctgtctgcagggcttcagtcctggcctttcacttcccagacatgagtcttatctttccacttggttagggcctccccacggacatggacggatatggtttggatttgtgtccccacccaaatctcgtgttgaattgtaatctccagtgttggaggaggagcctggtggggggtgattggatcatgggagcagagttcctcttgctgttctcatgatagtgagtgagttctcacgagatctggttgtttgaaagtgtgaagcacctccccctgctctcccttctgctccagccatgtaggacgtgcctgctgtcccttctgacgtgattgtaggtttcccgaggcctccccagccatgcttcctgtgcagtatgtggaaccgtgagccaattaaacctcttttctttataaattacccagtctcaggtagttctttatagcagtgcgagaactgacagggaccgtgtgtttgggagcctctgtttaagcagagaccgggcctggagagagaatccctggggagggaaagctgctctcacatcagtgggctccacctggcaccttggtggggctcccattcattcattcattcactcactcattcattcacatagtacctagtatatgtgccagtctctgtgctaagagaatgatctaggcagaagacctgcccgctcagggcttctgtttctagctgggagcaacaacagtaaactaaataagcagattatattgtataatatagtaatacttagaaggtgatgagactgtggaaaacaatacattagtgaagagggtgagggtattggatggaagagcgtgagtgtattaggccgttccacattgttataaagaaatacctgagacacggtcattaataaagaaaagagatttaattgtctcacggttcttcaggctgtacaggaagcatggtgctggcatctgctcaacttctaaggtggccttgagaagctacaatcatggcggaaggtgacgggggagcaggcacgtcacatggagaaagcagaagcaagagagagaaaaatgcaaggtgccacacacttttaaacaaccagatcttgtgagaactcactatctcgaggacagaaccaaggggatggtgagaaaccattcatgagaaatccacccacatgatccagtcgtctcccaccaggcctcatccccaactctggggattacaattcaacatgagatttggttgagacatccaagccgtatcagtgagagatgcagtttttttttttcaggggaaagtgttgttgttgttgttgttttaataagatataatttacataccatataccatgaaagtcgccatttaaaaatgtacaattcagttgcttttagtatactggcaaagttgagcaccagtagctactaatttcagaacattttcatcaccccagaaaaaaatctcatagccattagcagtcactcctcaatctcctcgtgccctaggccctggaaaccaataatttactttaggtgtctctggatttgccacttctggacattttatatcaaggaaatcatgcaatatgaggccttttgcatctggcttcctttaccaagcacagtgttttcatgcaccgccaatgctgcgtgtgtatctgtactgcatgcctgtagatggcggaataatattccaatgtatggatagaccacattttgtttatccattcatctgttgatgaacatttgggctgttttcacttttggctattctgaacaatgctgcgaggaacaagttttttttgtacaagcgtgcaagttttttgtggatgtatgttttcatttctcttaggcaaatagagagacacaattttactttttatttattttattttttatttttttagagacaaggtcttgctctgttgcccaggctgaagtgcagtggcgccatcatagctcactgtagcctgcaactctatggattacatgttcctcctgcctcagcctcttgagttgctgggactacaggcataccccatcattcctggataatttttaaatgtttagtagagatgagttctcactagattgcccaaattcgtcttgaactcctgggcttaagtgatcctcccaagttagccttataaagtgctgggattagaggcatgaaccactgcacccagccacagttttaaatagggtggtcagagaaggtctcatgagaaggtgacatctgagcaaagacttgaagaaaataagggcagaagccacacgaaaaccccagcaggacagcaggtgcaagggaacagcaagtgcaaggatgcttccaccaaggggctggaaaatgaaaggcttgacttcaccagctgcctcccaaccagggggcccagtgagtttaggcctcactggccctttctggctgaggggcagcctgctgcgaggggtttccctttctgaataaagagtcaaagtcccaagacagatgatttttgacccatgcatcttcttcctgcctggaaagcagatgtgattcctggagatggggcagctgttctgtggccatgaggttgaaatccatgtgctaaagacagtagagcagaagaagactgggaccttgatggcattcttgagctaccgcctgaaccttggatctcctgcacctgaactttgctctgtgacacaaagaagaccctttcttatctaagccactcttatctaagccaccgcttgtcacgttttatgttgtttgcagccaaatgcattcctcattgatggaatgtccaacattgtccccaagtcccccagatagatccctgggggctcttgacagacagacagcaggcaagcctgggacacacgctgcccccttctgctttcctgtccctccatcgtgttaagctggtctctcaggtgggcatcaggattcagctatcccaggctgaccctgaggtccaccatgactgtgctgcagccaccaccactggccgcttcatggcatgtttccagcacaactctctgacctggctcccccggttccccagacgcgttccccacggagtcccagcgtgtatgcatggggtcacggtgctccacgctctcaaccgttggttgcaggttcccgtccagcctctcaagctggctgctcccctttctcagttgtcccctgtgcctcttgtaccctaacttcagtgttagagcacctttcagggggaatggcgtaaaaaagccttcctttccagtagacagagtgccctggccagcagaggccaaacacattcccattcagctttgtttcatgctggatctggccccaggcctgcacctggccctggcagtgggcgcacgttaggtgggattgctgaagacaatgggtgactgaggcagttacaggtgtcagccccagatgaggctccccaacctgtaccctttaccctggagctggccccatctctcacagcccagtggtgtactaccttaggtaagcaccagttgcgcctcactctaatgaaaataataaaagctcaaatgaccagcactgtcctactgctttatacgcatgacctcaggtaatgagaattagcccacatccattcattccacaaatatttatggagtgcctactgtatgccagggattcttccaggcactggggagacatttaaaaaacaataacaacaacaacaaaaatctgcgtcttgtcggaacttccatatacacttccactggctacttcatggaaacatctggaacatctgatttttctagtcttcccattactaaatgtggcacaagaacgtagtctaaaggatgtacttcaccatgcaaaagctcttgtcatttcagaaaaggaaggagaattaagtaaaatgtacttcaagaaagtcagttaagaatttttccagttaatgaaaatttaaaatgattggctttcatcttgctgttttccagggtcccactattaagaactcactcatcctgttgttattaagggtgaaacccagacatttccttatgtaaaagccaattaaaataaattaaatgcaaatactgtttcattgtcatgtcagttttgagaaccggatcaatcagaggttgtggaaatgccaaagttgttaaggctgtggttaccatgacaacagctctattgtgtaagtggtctgttatttgggaattcttccttaggtcaggctaacagtgatgtcatttctcagggaaggggacggagttctctggagtcaggtctggggccaggagacctggtgagcaaaaactggggttcagccagaactaccagttttgtgaccatgggagacagtcccttccccttttgcctcagtttcctcgctttggggatagccattgcacagctgtgagtatattgtggccattcagcacttctcaaaagttgctgctctgctaaaaaattttggggattcctgatttgccggctggttttcagcctatgttttggggaaatgcaaatgataggaaaccacccctggtcctgccttaccggttctagcagacctttggtgaaactgggagttcttgggtcctcttggctagtggctagtgaatacctgctgggggagggggtgtttgctttgctttgtgttgggggtggggttgttattggtttttacattttgtttgcaatattgggtttgctggtttttgtgttttttttttttttttttttttttgagacagagtctcgctctgtcacccaggctggagtgcagtggcatgatcttggctcactgcaatctccacctcccaggttcaagtgattctcctgcctcagcctcccgagtagctgggattgcaggcctgcaccaccacgcccagcaattttttttttttttttgtatttttagtagagacagggtttctccatgttggccaggctggtgttgaactcctgacctcaagtgatccacccaccttggcctcccaaactgttgggattacaggcgtgagccactgtgcccagccgggttgctgttttagttggtttttgattttagagagagggtctcgctctgtggcccaggctggagcacactggtgccgtcggagcacactggtgccgtcatagctcactgcagccttggccccctgggctcaggcgatcctcccgacatcgtaattacatttttgcagggttttcagttcacaggtgtgctctcccacatccccatttaagtttacttatttttcagccccagcctctgaggctatcattattttacagacgagaacaccgggactcagagggtgatttgtccctagtctcagggctccaaggcggcagtgccagcgttggtgggggtccccagtgccaggccagggtggcactgttctccctgtgcctctctgcttgtccccactgcctgcttctgcagaggcctgctcagagcaggtttccagcaaccttcctcgccagcatcctgctaagcaggccctggagggcggtttccctgcttccccacaccgggccagagctgccttgatatttatttcagggcatccctgcagagggaactgctaatgcagtcatggctttaagacgtcacaagccacagctgcaggtgcttcatcttaaacatctgccttcctggctgggagaagcccgggagcacctgctgcaggtgtctttgcacctcggtcctgctggtcccaggcccagctgcggccaattagcacctctgttgggcaccatggccatttccttgctgcatgggagccgctggcctttttccactgtgttgggggaaagttgttgggaaatgaggaagcagttggggatttaaaaactctatgcaggaaataggctgttgggttaacatttaagccactgaacagtcatggagtgtttgcttggaagtgaggcccacgaggctgcagagggccatgagattcaaggatggtgttcgtcaggcctgtccgtcatcctctctgggttcgacaccatctcagggtactcatgcctgttaggtgcttggtgaacaaaggcatcccagacagaatcaacccagaaggaagaggggtgggtggtaaacgttcgttaacttagccatgttctcttagggtttcttctcaaaataagggcagatgggagatctccctgcctcaaggggtccctggccaaggggctacaggcagatattgcccagtcagccccagtgaggtgacagaaggcgggaggtggcttcagtgtgtttgaaggaggctggcatcacaggttctaaagcagatggcaggagccctgtggctgggcctgcttcagaaccttggctggctgctccttggaggtgaggtgggggcaggcagtgttggctggagacttgtggggggaattggccgcctggggtgcgtgctggcctgcctgccttccgcttccgtgccatgagccccttgttctcagctgtgaaggtaggtgaggctgccctgcaccagccagcagactgggttaaggtgggaatcaaaggagaggaggtgttcagctggctggagacctgctgagccccttgcatgaggagggatttctgtccagcgcccctggtcctcaagctcctcctcagcagcgttcatgagcacagggtgtgggtgtgactggtccctttgggcagaatctgagagtgcccccttctccctccctgtgcatttgaaagttggctggtgctcgctgacagatgccgaggctcccgtttggcagctggccatggcagccgcttgtcctccactctccctagatttggctgagctgggcccctgctgtgccccacatgccccggctctttgtctcggttgtccctttggctcagctctgggtgtcggctcctcggaagcccttcgtcacccaaccagagtgaactccttctcccaggtggccagagcatgttgaagtgaccctgactttcttctgtgggtcctacattttagcggggagtacaagtgcctcttcactgcagcatctcctaaggaagtgagcctgtggggaggtctctgatgctactgggaatccagcttcaccttcccccaactcctgggatttgcagccacagctaagagtgggagaactttgccttgtttgcattgctccagatcgtgttaaacagaatttcaaaacatgcattttgtaggtagtagttctgtcatccagaatgtgtaaagtaactctctaggtagctgttatggatggcctgcaggaaggatcataccagtgacttcttttgagccccctgccgagtggctagcgtcaggtgggggattagactctggttctttgcttcctggccctgtgagccccaggcaagtcagttaacttcttggagcctcagtttcctgacatgcaaatcatactgacctggtaaggctattgtcaggattatatgagctattatatcctaaagtatattatatcatactttatagagcgtagtatatattcaactaactgcatttgtgttagttcctttattttgttaacatggggatcaatggctttttttttctgatttggtatttattttaagactaggttgggaaccaattttccatagtcatctgtgggtataagtactcttaccttcagccaggacttaattttggccaagagccttggcttattccagcagagagtggagttatttagagccaaactgtaggggactgaattctctgtgtagcactttctgcagacagtggtaacattaatgacttactgcatatacattcataagtgggtgatttatggttagccccggatccataactttcatttcctgactgatatatcagaagcttcatgtataaaggcgcattagatttagtaagtgtaaaagacttaagttgaggtcatttctgtccacaagctgttcatggtgtagctgttcatgtagctcagctgtgggaatggcctggccctatgtgatgcggaaagacagccaagggggacagtggcacatgcctgtggcacttggttctgtgtgtggtctcctttgtatccccaggaactctctgcaataggaaggtgatggccaggatctcattttacagaggaggacactgaggcccagagaggttaagtgacttgtctgagggttaacagctcctgggtggcaggatttacattggcgctcagatgcatctgaaccccaacctggagtggtgccagcacagagcaggtgttcagtaatgtttgctgacctatgtgatggttaatatcatgcgtcagcctgactgagccaagggatgcccaggtagctggtaaagcataatttcaagttgtgtctgggagggagtttctggaagagactggcacactgagtaaggatctgccctcaccagtgtgggtggatatcatccaatcattgagaacccagctagaacaaaaatgtagagaaagagtgaatgtgctctctctgcttgagctgggacacccaccttctgctgctcttggacatggagctcccggttctcaggcctctgggcttgagctggagtgactccaccggctctcctgagtctccagcttgcagacagtaggtcttgcgactcttcagcctccataataacatgaaccaattcctcataatacatttctgtctgtttatttctatatatttattggctctgtttctctgaagaaccctgactaatacttccccatctgaactttctctgccccttttgttcgacatgtggggggttgctggggaagctaattagaatacaggttcctgctgacaccccacccccactcccttccttcatcaagatcactagtggtgagcctttaaatgcctgtaagctgtccgaggggttcttcctaaattaaattaaatttttaattttaattacttaatttttttgagatgggatcttgccgtgttgcccaggctagtctccaactcctgggttcaagtgtcctcctgcctcggcctcccaaagtgctaggattacagatgtgagccgccactgttggtctctaggggttcttatgcacctagaatttagagactcattgctccaagcttcattgaatctttcctgaacagtcttgtgataggcgggataactcccacccctcagatgctcacatccgaatccctgggacctgcggatatgttgccttatacggtaaagggctttgctatgtgatgaagattgaggaccttgaggtggggacagtatcctggattaccagggtgtagtcactgtattcatgtaagtccataaaagtaaggaacctgtcccagctgcagtgagcccgagggaggtgtgactctggaagaagacgcagagatgaaacactgctggctctgctgacaggaatggctttgagccagagtgtggtggcctacagaggctggaaaaggcaagggaacagatccacccttaggtcccccagaggaaccagccctactgacacagtctccgtgggacctgtgtccacagacagaactgtatgaaaacacgattgtggtgtgtaagccactaggttgatttgttacagcagtgacaccgggctttgtctctgcttttgacttttcctccagtgtgatcccttcccctgcttctgacccgtggatcccagccctgcccaggcccagatcctgggctccaggtgggcctgggttggggctcccagctgcaggaatgcaaagttcatggttctacaaagtgctttgaggtgacgttggtcacatcagctcggcctcagatttgctgctttttttctaaagaagagacagctccaggccctgcctgactgacctagttggggatgcaggccgaggccatatcgagcagggtaagtttccaagaatctggctttaggattagtcgggccacacggaaggagttcctggtctcgtgacacctgcacaaatggtcttcaaccctcaaaacacttcctgttatttaaatcttggtcctttgattttttttttttttccttttagagactatgcacaatttatgtggcaagctagagatgctttctttttcagagcggcctttatgctgtgttcggggctgtctgtcggcgccacagggaatgggggctggtgagtcgtgctcagaaggtcccagtctagatgcttctgacatggacaaaaggagaattcctgactttttggtggatgtttgcaattcccagaatgcttattcttatttagtcctcataggagagtggcgaagggcagcagctttggagcaagggccaccctgcccctccccaccaagccctgagtcgtctaaccttcccggtgtattagtcagctctggctgctggaaacggggtcatagtctgggtgccttaaacaacaggaattcttttttttttacagtattggaggctgatgtctgagacagggtggcggcagggttggtgtcacccgaggcctctctcctcggctccgtgtagccctttctccctctgttctcacacggccatccctccgagtgtgtctgagtcccagtctccttgtgaggacaccagccctagatcaggagccacgcagtgacctcattttaccttcatgacctcttcaaagtccctgtgtccaaatacagtcacatctggaggtagtaaggattggggcttccacataggggttttgtgggggacacactcagtccacgttaactcacttcctgcccacggcaggggctctctgtcagtgtgtctccgactgcggaccccgatcatctttgtgagaatgcaggttcccaggcccacaccgtgctggttgagtcagagcttctgggtgcagcctgggggtgcagcaagcccacccctgcattcggagagccttagcgggaagcctgttgcttgtgcctcctttgcagccccggcctctccagttctctgtgtcttgccatcttggcttcttcctcatcccgcctctcgctccatctcgtggcctcccatctgctctcccggctgcaggagcggtttctctaagccttgcaagtgaccgcaccctcttactgcatgcgggccttgccaagagcctgcagagggcggggcgggctctggggacagcctggactctcctgcctgcccccaggtgcccccggcccagccacagggtgctggctgcctgttactcagcacgtccgcctctcctgcctcctgagcccacaggcgcccttcctgtcacccgagcgccctctccttcctcacctcgccacctacgcatcgtcacccctcctcctgcgtttcctcctgtctccccggggagctcggagttctgcaggcacggggctggctcctttcttcatgtcccttgtcccacaggacaccgtttctgaacccaggagacactcaggaaaccttgctggtggaacggatgcagcagcgaggttttccggggcaggaacaccctcccaggagcttttccacggccaagcgctggctggtggtggagctgcgctgaagtcagtgtgtgctttgggcccagctgcactgtgcccggggtccagggatgggtgtgaggctgtctgccccccactgcacgcccggctgtcagaggcatctgtctcttcccccgcatgcatctttctccccgtctggcatggtgtttctagtcttttgtggatggggacataaacaagccgccatcaactgcttggtgacattggccaatcctgtggtggccccagctgggcttgctgcctgtgtgtggtgagggtgcccttcttgtcacccgttgtcatttacgagacagccctgtgtcacctgttgattcagagggagctctcctcatcacctgttgtcatttatgagccccgtgtcacctgttgttgcttcacagggagcactccttgtcacctattgtcatttatgagccccgtgtcacctgttgttgcttcacagggagcactccttgtcacccattgtcatttatgagccctgtgtcacttgttgcttcagagggagcgctccttgtcacccgttgtcaggtgtactcactttgcttctcccttcctgcttttggggacgatcacaggacagtggcttcagaggggaagtacctcgacctggctgaggtcatgcccagagcctgactgctctctccacccacccatgatcccgtcagcttcttccccctccttctccatctgatctgagcatttaccatttccttccatttaagcttcatttgagttgcatcatgatgttctccttttttcaaagttccatctgcccacaggtttccattttctctagaaccctcctccttcctctctagcccctggcccgcccctctgcggttctcaggaagcccctcggtgccccctgccccttatctagaacagcttctgcctagggtgggcaaggcagggtgggaggtggggggtagccgtgcagggaaggggtgaagcgggcccctgtactccctagctgggctgcaggcttggaggaaaataagagtcagacgcttgttaaaacagtgaggacagctttattcgaggaaaatgcagtcggggttgaccttatcagcaggggagagatcagcccaactcctaatacagcaaggaagggacagagctgggaagtggagtgggctgggtgagtggaaagtagctgcgagaagacatcacaggtagggggattcttgccaaaggcagggggggactttgatgtcaaaggtggggatgaggactgattggatctcaagggtggtcagatgtgaagggcgtgagaggctcactaaactgactaagcaggattcttgctgagactgggccaggcaggctgaagacaggaggcagaaagagggctcagaggagcctgagtgaagtttgatcttggggtgaggggtgcaggggggaggggcagggtgggtctttgttggggctctgtgggagatttcagggctcactggatgtgtggggcacagtgggccctgcctgagccccatgacgcctggacgctgccaccaggggcctgacctgctgacgatctctgcactgggtctttaatcagcctcttgggcattgtaaatgctagacaaagattcttctctttttaaagtttactaatttccctacgataaaactaatgcattttcacaggagagactcgggaaattaccaaggagcgtgaatcaggtggtcacagtgaattgtggatgtttgtgtctgtcttggggaactggtgtaacgtttctccatctgacccctgctgtctgttggaggtcaaggagccagcctggcctcacaacttcctcctttcagcaaagtcaggaggccattccctccagggatgggtgggctgcagcctcttggcacctctcgggatcctgctggcagatgtatcaccgtagcccaagccagcctaagccagcctcctgtggcccagcaccttctcttcccacgtgggcagctgtgttcccaggcaaaccttcctggaattgctctgtgctctcagagctggtgtgctttggtgttcagctgtggccattttggctttgagtttgatttgatttttgaagaaagtttttatttctttacccaaatattctatgtctctttggtaagactggaaaacacagaaaaacagagaaaaaaattcccccataactaccctgcccacctccatataacttttattagcattctgagctatacccctccagactcatttctgcctctccagaagtgtgcataaagtctagaaacataggtgaagagacctaatgccatcaagaacatcaacctgtaaaggaataaaataatgtcatctgtgtccagattttacagatgctttgtagatatgtgtaacagaaatgtgggtatgttttagcaaaaataagaccatatttttgttttattttgattgattgtactataaattccagtagagcattacagagccagcccaagcccatctctcctcttctctactcttttctttccccagtgaccaatagccactctgcggagggaagtagggatcatatttgtgcgcgttttacgctcttgctacacatgtgcgtaaccttaaacaaaacattagtttttatgtgttagaaatactcataaatggtggcccaggcatggtggctcacgcctgtaatcccagctcttcgggaggctgaggcaggaggaggcttgaggcctggaattcaagaccagcctgggcaacatagcaagaccctgttttgttttgttttgttttttaaacaaacaaaaaaaccaacaacagttaggtgggtgcagcatcatgtacctgtagtcccagctcttcaggaggctgaggtgggaggctctcctgagcccaggagtttggggtgatagtgagctgtggtcacaccactgtactccagcctggatgatggagtggagtgagaccttgtctttaaaaaaaaagaaaagaaaacagaaagaaatactcataaatggtatatatatatatcactttgtaatttgttcttgactactttgtcaacaatttttaagctgtatccatgttgatacatagatgtggttcatggtcttcttttttctcctttttgttaactgctgtatacaattccattgacttttttttgaggcagggtctcgctctgttacccaggctggagtgcagtggcacgatctcggctcattgcaacttccacctcccaggctcaagcaatcttcccacctcagcctcccaagtagctaggactacaggtacatgcctggctaatttttgtattttttatagagtcagggttttgccaagttgcccagcctggtcttgaactcctgagcgcaagtgagccacctgccttggcctcccaaattgctgggattacaggcgtgagccactgtgccagcccccattgtctaaataagccatcgtttctctagtcatatacagttaggtcacttccattttttcattagtataaagagtgccatatgaatattgatcctccttgagtgctgtggaaggaagcctctaagatgccgccactggtccccacatcctggtcttcacacccttgtgtaatcccttccctcgggtgttggctggacttaactgacttgattctaacaaatagaacacagcaggaggaatgggacatcacttctgacatcaggttataaaaagactgcagctgccagcttgggtgttctctgttgccctcttggattgccagccctggagggagccagatgccatgtctcaaggcagtcctgtggagaggcaggcctaggtgacaagggaccaaggcctgccaacagccatgtgagtgagcttggaagcagatctccatccgctccccactcccagctgagccttcggatgagactgctgccctgaaaacagcaaaggggaacctcatgagagaccttgagccagattcccagcccagagaaattgtgagataatgtttgttgttttcggctgctgacttttggagggtcatttgttacacggtaacagataaccaatacgagcacaccctgagaattccttagaggtctagaatatttagcagtggaattgccaggtgctatggtattctcacgctcaacagtactgtttattactaaattcatctccaaggcatttgtggcagtttcactcccctctacaagggtcagtgagctccttttcctcatacctctccggcacttgtgttgtcagactttaacatctgaacactctgatgggtgtaaaatagtatctcatgattatttgaatttgtacttccctaagttctagtgaagttggacatattttcgatacattattgtcctttctgctttcctctgctgtaaattaattgcatgttcgtatcctctgctgtaaattaattgcatgttcatatcctctgctgtaaattaattgcatgttcgtatcctctggtgtaaattaattgcatgttcatatcctctgctgtaaattaattgcatgtgcgtatcctctgctgtaaattaattgcatgtgcgtatcttctgctgtaaattaattgcatgttcgtatcctctgctgtaaattaattgcatgttcgtatcctctgctgtaaattaattgcatgtgcgtatcctctgctgtaaattaattgcatgtgcgtatcctctgctgtaaattaattgcatgttcatatcctttgtccagtctccttttgggtggattatctttttcttagtgatttgtagattttctttttttcactctagagactaatcctttgtcagttcatgctattttatactctgcttttttcagttagcagcgtattgagaatgttcttctatgccaatgtatacatcattttattgacattccattgtggagatgggtcatttatttatttaggtggacgtgtaggttgtttgcacttttgcattagtaggaacatgactgtgtgtcggtcagctgggctatgctctggtactaatgaccctccaaatcttagtggtttgcagcaatgaagaattctttgtccctcaagtgacatgaccatcacctgttggttgtggctctgctctatgacgttgtccctcagggagccaggctttcagagcagccccatctgagacattgctggtctcatggcagagggaaaaaagatggtggaacaacataattctatttctgtttttcctctttagagacaggatattgctgtggcacccaggctgcagtgctctggtgctatcatagctcactgcagccccggaatcatgggcacaagtggtcctcctgcctcagcttcccaagtagctgagactataggtatgcaccaccacacctgggtaatttttactttttatatttttcgtagagatgggggccttgttatgttgcccaggctggtcttgaactcctggcctcaagtgttcttcccaccgcagcctcccaaagtgctgggattacaggtgtgagccactggacccggcaggaacaatatacctcttaaagcttctgctcagacgtgggaatggctatgtggtgcgtgtcagttcccctcacattgcattggctgaagcaaaccctggggcccaaccagtgttggcggggttagaagtagacccctcccatagggaggccagggagggaggattttgagccaagaccactcaccacgtgctgtgatgagcagttgcctccccctcctttcgtgtcttcgtgcctcctcacgtattcttacaagtagaattgctacattaggaatatgcatatttgtaaagtatttactatttattatgtcagctaggttttaactgtcactgcatttgctgtgaattataggtaattattcatcctgatgaccatttaaaaaagaagaacaatattattaggtagaaatagtccctggctccccggttgcccaccgtgactataacagcatatctagcttggtagttttcaaattatttccacgttttatttacttctcacagcctccctgtggggttgcaggtgcttctccactcctccactgacaaggtgcctgaggctcagagaggctgagaaatgtgctctgggctgcacagctggggatgaggcgtagaccctggccctgctctgttctgggctctttctcctccactctggcctttggaggctgtggctaagatcttcccccagccccttccttcccaccttcccttcctgctcttgtgccccgtttttcacagtcctcagtggctggtttctcagtcccccaggaggtgcaggctggttcttaggaatggtctctgtcaatgttcccggcagtacctccgagcctgccctctgaggatgggtcggccatggctgcgccggcttagtctgtatttaggtatcactgactatcactggacttggggaggggatttactatttttagagaaagtcaggggagctccataaatcctgttagtcaacagaactgcagagaggtggctgtttatgaaggagagtgacttttttagaagtggcgcatttagaagaccacatattctatcattctgtgtacatgagcggtgcagaataggcaattctaaagagacagaaaatagattcgtgattgcagggagtggggaggagggatgggaagcgactcctaaggggcacggggtttcttctgggggtaatgaaaagcgttctggaattagatagtggtggtggctgtaggacctggtgaataataaactgaaaatcactgaatcgtaccccttaaaaacacacaaagcaaattgacaaattattgggaggcaacataagagaatggggtgtgaactttggatcagtgcggcctggatatcagctgtgtggtgttcaaatagattgcataacctcgttgagtctcagtcttcccatctgtgaagtagggatcattcctacttcgtagggttggcatgagactccgtgagatgaagttggtgggtcacttggctggggcaggtgtcacggagcgggacctgtgattgttcagccacctactctgtgcccagtgctgtgttggtgaccaggtatgtatgaagtcagtaagccacagtcctgagttatggtgcagaccccacatgcacccagagtcagcttggcaagaccccttgacaccacgtgcgtggagggtgcaggtcggagagctcacctccatggattccgtagagctttgaggcgtatccacaaagtgtccaggagaggtggcgtcgcctccacttgatagaggaaaaagcagagatggaggcagccagaagcatggtgcagtggtggggtttggtcattaatttgataatcacatggaatacaagctaatgtttattgagtacttactgcctgcctgctactgtaactaagtgctttactcctgttatctcatttaattctcaaagcagccctgtggcactgaggtggctggagatggagggatgtgtggctgccatgtgtttgccaggaagcagcaggatgggagtgagggcacagacagacacacatgccaggacttgtttgcacgaagctgaggaatgggtgcccatcattcattatactcatctctctgttttatgtatatttgaaaaaaaaattttttttgagatagggtctcgctgtgtcacccagactggagggcagtggcatgatctcggctcactgcaacctccacctcccgggttcaagtgattctcctgcctcagcctctggagtagctgggattacaggtgggcgccaccatgcccacctaatttttttttttttttgagacctgtcacccaggctggagtgcagtggtgcgatctcggctcactgcaacctccgcctcccgggtttaagcaattctctgcctcagcctccccagtagctgggattacaggcacatgccaccatgcccggctaatttttgtatttttagtagagacgggatttcatgcctgattaatttttttgtatttttagtagagacagagtttcactatgttggccaggctggtcttcaactcctgacctcaagtcatctgcctgccttggcctcccaaagtgttgggattacaggcgtgagccaccgcgcccagccatatttgaactcttttacagtaaaaagtttaaaaaacaacaatcctatgaggtaggtcctcttatttgtgctttacagatggggaaattgaggctcagagcatgtaagattacacagcaagattcggagatagctcgccatgttcatgcccggcaggacgtagcaacagggctggcgaaacggaggccccaggcttgtgggcctcctggggttcctgtgcgttgaggcctgagcccctgcgtgcgcccagcggagccagcactctccctgtggtcctactgggcatcacaggtgtgtatgtgaggggtatggggaggggattcttggttagtctgggcttcatgacattgggatgagttctttcacttggttttgttgatctggtaaaatctgtggtcctgtgatatcaccttgcttctcatagtatgagccttcaacatttggcctcagtggtggggtgtgcctgcaccgccttcccccatccctgcctcggctcctccccacaacaaagcggaaggaagacatagacccaagggtgcacttcagcccctcaaccagctgtgtggctttggagaagcggcttaacatctctgatcccagttacctttcttgaacgggaaagatatcaatgcttccttcactgattactggagcttcttggtgtgcagtgtctaggctgctttctaaccatgtaaggtgtagccacagtattgtaggacctgttgctaagaactgtgccactatcttgataaacatgttttccagggactggtggtggaatgttctagttattaatgtgcctttaacgttggatgactcagaatatccctcagatagtaggaataggtagctttgagaggtcatctgtaggagggcgcaggaacatcccaggagggggtgtcatacctgttggcaccatggggatgcaggctcagaggggactgaactttccagggccacgcagtctgtaagcggcagagctgggacgcaaccccaagcttgctgctctcaaagctttgctttcaaactctcacttcagacatcagggcttcctttcagactgagtcttatccctaagcactgttggagaagaaagtctccaggctgcagggccccgcagttcccccatatccctgcccttccagccagcccacgcctggggcctgtcctcccctgttcctgaatccctgtcctgttactgccctccgggtaagacagcactcttataatcatgcttcatgccgagttcatgaaattaactctcaaactcctcttctctgggttaaattatttcacttttttcccttcctcatagaatatcattataaattctagatactatattggatatgtaataaaatcagaataaattacatgtgatggccactgaactaacctcccttcatgtgtctggaggcaggttttctgtggagttatgctttaaattggctgtccttcgcgatttttcttaaagcctaggttgactactcaagggtctagatttatgatagaaactgtgggctggggtgcagtgctggggtgctggggtgcctgtaatcctagcactttgggaggctgaggtgggcggatcatttgagcccaggagtacaaaaccatcctgggcaacacggtgaaaccccatctctacaaaaaaatacaaaaattagccagacacggtggtgcatgcctgtactcgggagactgaagcgggaggatcacctgagcccaggaagtcgaggctgcagtgagtcatgattgcgccactgcactccagcctgggcaacagagcaagaccttatcttaaaagcaacaacaacaacaacaaattgtggcacaaatgtatgcatggaggtactgagggccttctttatagtaggctcaggaatgaccaatgggtgggggctttgggggaagagacgggggtctttaagcagaaactctcccctcaacacaagaaagctgctgaaggacttcagaaacctaaacacgagccgtgggcctttctaaagtggggagggattccctcctgcctaggttatgttgcaaggctgcccgagagagggtggaagggggcaggagagtgggcattggctgggtccaacgcttcccaagagatgtgactgtcttaaaagcaataccttcctgattaccacgggaaaaattcaaatgttttgaaaagatctacaagtttggggttgaagaagtcctttatttcaaagtttctctgggctgggcgtgctggctcacacgtgtaatcccagcactttaggaggctaaagtgggaggatcacttgaggattgctttgaggccagcctgggcaacatagtgagactctgtctctagataaagttttttttttttttttaaattagccagatgtggtggtggtgtgctcctgtagtcccagctacttgggaggctaagttggaaggatgacttgagcccaggaggttgaggctacagtgagctctgattgtgccgctgtgctccagcctggtgacagagtggaccttgtctgtaaaaataataataataataataaagctttgctccccgtttcatttagatggagcgtttgtgggatttaagacagatttttccttgctgagtggttatcattaacctgttgaataagcaacaggccgaggtggggaccctgcctcgcccgcctccaggggcacactgcattctttgtggaagtgtccctggaatgccacagccctgcttctgtgcgaggccagtcagtctgggtcctgggatatagccacatgtgcagtccgtgcctccagcgcgcagcctgaaagggaggcgtgcagaaacaacgtagctccaaggaggactgatcagcccagcctgggggagggtgggaggggactcccagggagcggggcttgtgctggactttgcaggatgccagacttttggcaggggaggaaattgaggtgaaagcattccaggcctagggaacagcatgtgcagaggtgctggctggaggaaccccgtgtgtttgcactgtgctctgagctccctctcatgactctcattctttctcgttgagttttgttttgtcacccagccggactcctgggcaaagagaggcacaatctgttcccggttgggccagctgccctccagtagctacgcaggatgctctggccggcctctgaggattctcttcttctgtccatctcatggctgaagaccaaggctatggcctgtgggtggcagttggtacctctccccgctgccttcccccggcccctttttggacaggatgttgctccctggggcctggctttggagatggccagtgctggtttgaagcttctgtcttctgtgtgggatatcagtgccctgccagctgttgcaagttttaaactcaatgtgcctctggatgtgtgtgtagagtaggggtccttccccagctccaggccctgtgtgtttccaagtgggcccgcagctctgatgtgcagtgggtatgcactggcaagccgtgcactgtcacaatattaaaataacttccatggtagttggtaaatagccccatcacccctctcctgggaccctggacctctagcacaccatggaggcctgccccgtccccataaaacacaccacattcaaattacttatctcctcttcccctgccactctgctgagaaggctgatctcaatcctcggagtaatgactctcttctaggagcaagatgatgctaattctcactagcatgtgaaggactgatagcaccatatctccctccaggactcccgggtgggaggtgggtgtttgcataggcaggcaggtgagccagcctagtttgtccacagacttccatgcaagtgattcctgctgttccctgggtcttcctttcttttgcttctgaacttggaggtttcttgaagtctggaggatttttagggtgggcatggctttaggtgggacctccactatatgggtttgcaagctgccactgctttgactgcagacactggattgaccgtggccaatgccaagtccaagagatcaggctgaaaccaggctaaattttaagagcagaaacaaaactcatccttgcgaagggacttttagatcagtggcagatggcatagaaagtctttctgctgttctcttgtgctgggcgtggctcagggctgaggggagagaggagagatgagggcagaaagagaagagggggcaggcctcagggatgaacacatggcccatggctgtgcgcttcccaagcaagcagttctggagtgaggcttgggcctccatgcctcctgggaggctgcacctcttgggatatagagaacgctggcttcagacccggcaggagtaccggcggctgtgtggtgcatcctgcacagagctgttgctttctaactgggttactgagctgtcgaaggagcagggatgaagactcccttattaaaaactaaacaaaacacaacacgaaaaagccagaacaaaacaagcagacggttgaggactgcagtgaactcattaaccctacagctttgatctcgaagtctcggccgctcctggctcagaggaccctggggacgtggtctttgatgcttgctttccccataggcatcacttcgaccagcgtctgtgtggggtgtgcagcagccctgagccaaggattaattacgtaacaagcccagatcccatccctgcctgagcaggccatgtgccagcaaggggggccccgaagtgccgctaggtgcctcacgattagcataaggcccgtttatccaggaagccagaaccagtgcacatctgttaagcgcatgcaccaagcggcgattccatagttgtatagtgattgtctttatggaactccagaatagcttcttagatatcactcttcaggccctgaaatggagccctgtgcaaagaaatgaagaaaagctatcggggcatctgcagccactattataccatctggcagctcagaaatattttataatcaaatgagtaagacgggcgtcccacactccacagtactctgctcccccttcccttcctcccaggacttgctctgtctctgtctctttctctgtgtctgtctgtctgtctctatgtgtctgtttctctctccctctttctgtgtgtgtctctctctgtgcctgactttctgtctctttctgcttctctctctgtgtctgtctctgtctctctctttctgtgtgtgtctctctctgtgcctttcagtctctttctgcctctctctatgtgtccgtttctctttctctctgtgtgtctctctctctgtgcctttcagtctctttctgcctctctctatgtgtccatctctctctctttttctgtgtgtctctctctctgtgcctttcagtctctttctgcctctctctatgtgtctgtttctctctctctctctttctgtctctctctgtgcctgtcttgcagtctctttctgcctctctctgtgtgtctgtctctgtctctgtatgtgtctgtctctgtttctgtctgtcttgctctctctgtttcaatctctctatctctgtgcctgcctgtctgtctgtctctttctttctgtctctctgtgtgtgtctctctctccgtctttgggacagactagaggaacctttttcccaggagtgataatactgtactctgcgtttttgccacttgctagctgggtgaccttgggcggctttcaagttcccttatcctgggtttcttcatttgtaaaatggaagcactacttcacagtgctgttgtgtgggtcaagatgagatgaatgtgacctactgtggtactatttattatttgtcctagaaaaacttttttttttttttgagacagggtcttgctgtcacccaggctggagtggtggcacaatcttggcctactgcaaccttgacttcccaggcccaagcgattctcccacctcagcctcccaagaagctgggactacaggtgtgagccaccacacccagctaatttttgtattttttgtagagacagggtcttgctatgctgcctgggctggtctcgaactcttgggcttaagcgatcctctcacttcagcctcccaaagtgctaggattataggcataagccactgcacccatccagaaaaacttttaaaaattttgtgttttaactttttctgaatataaaagtgatacatgcatgttcactgtaaaatagaaaatataaagaaactagaaaactatttatgacgcccctcccccaccacaaaaggggcaaggactgcgaacttttgccgtattttggaagatttcctaagtcacacaagcacacagatggtctgttgatccaaaccaggaagaacaattgtgggaataagtggaagtgtgagtgtgtgggtgtgtctgagtgtgtgccctgggggtgtgtgtgtctgtgtatgtgtgagagagccaggctgtgtgtgtgtgtgtatgcatgcaaacacttatgtgcaatgccttggggtcctcagaccccccttggtccatcaggggctggtggcctcccagtaggacactagcacagctgcactcatgtccttctttgagggggggtgacggggagaaagttggggagcagcagtgactgctgatgttgtgggggccatggggagcctcctggtattctgtctcgaggctctggggatatggtgggagaagccctcatgccagaattgggaggggatggaatgggactgaccccatcacagcccacgtgcctcattcagggcttggctgtggagtcttgggggaggtgctccctcatcctcaaatgttaactttgtctgcctggccccagtcccctctgtggcttttttcctctttcaattgggaggcagttctgtcttaaagagatgtttaaccctctaggtctccgtgcaggcatttttgttgtgagccagtcaggctataaatggtccattaaaagcactgtccagttgacataaccggtctaccaggctgagacccacagacccgggactggcatttatttatggatatgatgtgcaaggagagtgttttccagtagcaggcgttggcatcatcaaacagaatgaagtgtactgtgttttcaccatgatagtacaaaaacgagactgtgagagcttctcacttctctccccttcctccccttccttctccatgtctttgtgctcctccactgctccctccccagcacagacaggccctggctccctccccccaccctcttccttctctctccttctaactggggtcaggaccaccctggaggatgttagattttaaacatttgttcctcttgtcatccccaccaccccacccacccacccagattagtttctaagggatttatatttgtttgcagagtggtgcgaactgttttcatcctcagaggagcagagtgctcatagatgagtttgacattactgggattcactttcagaagtctctagagagccccgcaccgcccccgccccccgcaggtgctggagttcagcctgacacacaggccggcctcagtgagagggagtgtctgcctccctggcatccgtgacccatacggtgggcgcctgttctttagaacaacttgctccttccgtcgttggcttggtcacccagcccccggcccacccttttctgagcctgtcatccacaccaggcagagccctgtctcagagtctcatggggagcagggccttcagggaaggcccatgtgctgggactgacttggctcacaggaatttcctgatggtataaaatgtgccccccagcgcctgataatggtcacttcgcctaagttccagccccagatgtggaccacggtggggcaaaggtgggcgtggggaggaggaaagaggtttaaaatggccacacccactacttctcctttggaagtgcctcctgccaccctggggtcccaggagctgatctgtgggtgtctgtcctcagcacccaccctgcttttccttcaggccccgctctggctgtctgggcctttctggtgctgttcctcacaggtttaaacactccagcagcagcctttcccatggcactgtgtctgcggggcggggttgggcattttctgaggcttcctgtgtttcacggggatccagtatgaagcctggcacggagtatgggccaaatcggtttaatgtttagctccccaaacccttcacttctgtgtcctcattaattcagacaaggttgggtttagcaaactgtgtctcaaacataagaaaatgcagcgtgggaatgggggaggggaggagtgctgtagaaggaccatttcagaagccctggtttacaggagaaagattggtatcttcataagtcactcttaagcttgcatttgttcatgctttaacacagtgattagatacctactgtaagcctagcatggtggggatataaaagcaagatcaagttcaagggggcagggatttagggtcagtgagacggacctcttaatcacttattttgtacacatcagagcagtgacattgtgtttctttaaaaatactaggggccagcccgggcacagtggctcatgcctgtaatcccagcactttgggaggccaaggtgggcagttcacctaagatcaggagttcaagaccagcctgccaacatggtgaaacctcatctctactaaaaatacaaaaattagctgggcatggtggtacacacctgtaatcccagctactcgggaggctgaggcaggagaatcacttgaactcaagaggcggaggttgcagtgagccgagatcgctccactgcactccagcctgcacgacagagcaagactccatctcaaaaaacaaaaaacaacaacagaaaaaactctgggccagctgtggtggttcacacctgtaatcccagtgctttgggagaccaaggtggggggatcgcttgagcccaggagtatttgcccagcctgggtagcatagcaagatcctgtctctacaaaaaaaaaaaaatatatatatatataaattagccaggcagggtgatgtgcatctacagtcccagctacttgggaggctgaggtgggaagatcacttgagcccaggagtctgaggctgcaatgggctctgatcccaccactgcactccagcctgagcgacagagtgagactctgtctcaagaaacaaaacaaaactctggattctggccttctcctgggaaatccagatttgtctggtatgatgttcgttgaacccatttagtccagcagcctggctttccaaaagtatgtctgcctctcacggtgcccagtagctttaaccaaagagctcaggaaagggcctgtctgaattcaatcacattcagcatctatttcagcgttttactagctttcaattaaagtagccacgcatttgagcctgatggtcttattgttttatgttgttccttttgcacatttcctgcttgtttatctttgtggcacaggggcatgttcttggctgcagttaacaatgctggccacggcagtgcagcgtttccaaatttcttccctttattaacaggcggtaatggaatctgaatcttcaaaaataaattttacatacttgttctctaccataaaagtcatccatacttattagaacgtctcaaacatactaagaggtaagaaggagacaaaaaataatattttgtcacccctgcccaggtagccactcttctatttgagtgcttgtaagaagcctgcttttccagtattatctgacctggcagggagttgggtaattgaaaaagattattaaagaggggatcataaaaatgatatagacgccgggcacggtggctcacacctgtaatcgcagcactttgggaggctgaggcgggtggatcatgaggtcaggagagaccatcctggctaacacggtgaaaccctgtctctactaaatatacaaaaaattagctgggcgtggtggcgggcacctgtagtcccagctactcaggaggctgaggcaggagaatggcgtgaacctgggaggcggagcttgcagtgatccgagatcatgccactgcactccagcctgggtgacagagcaagactctgtctcaaaaaaaaaaaaaaaaaaaaaaaaaaaaaaaaaaaaagatatagacatattgagcatttcgttttgacataaaacgtttcattttcatataaaaatgcatttattccccatctcttgatacagggccaagacctctcttggattatgggtccactggcttctgtcctgatatgtcttttttgcactatccacactgttaatgcattttctgagattctcagtttctgtttctgtcaagtaatgtaggaactagcaccaaatccttgccgatttcatataccactgatattatacagttattttgttcatgcctaattgaacagccatcttcccccaaacattcaactctgtttcataaaaccaactccttttaattcctcttctgagggtttgcataaaatttaattaactttggtaattacataagtactactggtataagcaggtttggaaacaaacgtaactgagtcttggtgggctcagagtgcacctgcccgaaggttcccacatgctctatgcacccagaaggggacagagcatgccccatagtccaggggcaattaggggaagcagctaatgaagtctgctttcttctggccttttaaaaatctatgtccttttttttttttttttttgaggcagggtcttgctctgttgcccaggctggagtgcagtggcatgatcatggcttactgcttcttgggctcaagcaatccccccacctcagcctcctgagtaggtgggactattaggtgcatgccaccatgcctggctaatttttgtattttttgtagagacaggatctcaccatattgccttggctggtctcgaactcctgggctcaagcgatccatctgcctcagcctcccaagtgctagtaagccaccacacccagccaaaatttaaaacacctgtgcctcaaagaataccgtcaagaaagtgaagagacagctcacagaataggagaaaatatttgcgaattgtatagattctagacttgcatctagaatatataaagaactcttacaactcaataatacaagacaacccagttaaaaaatgggcaagggacttgaatagacgtttctccaaagatatacaagtggccaagaagcacatgacaagatgctcaacatcattagtcacgagggaaatgcacatgaaaacaacagcgatatatccagtaagactgctagaatcaaaaagtcctataaactccagcggagatgaggaaatggagaaggtggaaccctcatacgctgttggtaggatgaaaatggtgcagcctcttcagaaaacagcctggcagttcctcaaaagcttaaatctagagttaccatatgacctagcagttgtactcctaggcatataagaatgaaagagaaatgaaaacttacacataaatgtttacagcagcattattcacagcagccagaaagtgaaaatgaccaaaatgtccatcaactgatgaatggataaacaaaatgtagtctatccatacaatggaatatcactgagcagtaaaaggaatgaagttgagattcatgctacaacatggaccaaccttgaaaagatatgctaagtgaatgaagccagtcacaaaagaccacatataatacgattccatctatgtgaaatgtccagaataggcaaatctgtagagacagaaagcagattagttgttgcctggggctgggactgggaggctgaggggaaatggggagtggcagtgaatgggtacatggtttcttttggggaagataaaaatgttctggtcaggtgccatggctcatgccaataatcattgcactttgggaggctgagtcaggaggactgcttgagctcaggagttccagatcagcctgggcaacatggcgagacctctgtctctactaaaaagaaaaaaattagccaggtgtggtggtgtgtgcctgtggtcccagctacttgggaggctgaggtgggaagattgtttgagcccaggaggttgaggttgcagtgagccatgatcgtgccactgcactccagcctgggtgacagagcaacaccctgtctcaaatataaaacaaacaaacaaataaagggcaaaattctccctgtctgaaaaagggggcagtgattctttacaaaattgatcatggtgataagcgatggttgcacagttgtgtcaccattgagttccttccttccttccttctttctttctttctttttttttttttgacggagtctcactcttgcccaggctggagtgcagtggcgcgatctcagctcactgcaacctccacctcctgggttcaagagattctcatgcctcaacctcccaagtagctgggattacaggtgcgtaccaccacacctggctaatttttgtatttttagtagagaaggagttttgccttattggccaggctggtcgcaaactcctgacctcaagtgatccatctgcctcagtctcccaaagtgctgggattacacagccaaccattgaatttaaatatgtgaattgtatggtgtgtgaaccgcaagtgttctgcctatccatatacctcccactcaccttccctctccccatctcactgttctggtgagggaggttcttgctttcctttcgcctgtttgggacctcacttcctttttcccttccccatccctttgtagccccttctcaagagagagaagacaccttgattcccacctacgctctgctaaaacttttccgttctagtcttaaatctctctctcttaagaactgatttcccagtagggtttatgtttggagctaaattagtcctcctggaagcagttgacttcatcctccagcagctgtgccatcagcagaggccatgcatgctggggcaagatccaggcctatctcttcctctgcagtcccctggggacgtctgggatctggttccttggttgggccacgcttagctctccttcgcatgggtgtctcaatgccagggtgtcaggagagctacagtagccagctcaggcccccccagggagagctggggagggagctgagggcctggtgccccccatcaggagggacctttggagtctttcttggctctgcccaggccttctgagcacacagagatcactccagccctctgccctctctgtagccaaatgaaaagactcttctagtctttctggccaactagtaagctctttgaaggtgggtaccattcttgacattagaaaaaactcagagccgtttggatactgaatatttttgacatgctctggtcactgaacgagaagactcttcatgaaaatgatgctttgtcagctctgtagagaaaggcgattggaattttggttgaccaggttagggtaagggaagaatgaatccccagtgtcctaagctggcaggcagtcgtgccgatgcagttctcatttctgctgtcaatttgccaggagactcagaaaaaggccgctatgcctttctgcacctcagtttcctcatctgtcaaatgggcagtgttttgggcgtgctgggcacaggtttgtctgagaaccagctgaggcctgtgttgcgcatgggacctactattattctttataatattaataccaaggacatttaacacctgcaacaacaagaacaagcacagtctcagaaggaaagcccgtcctctaaaagagtgtctgtagagcagagaagcccccagtgccatccttctctttctgccaagctcctgtgccagtgctgtcgtggggggccctgcctgcaggtgtggggatactggttcagggccagtggcccctggcaactggtttgtcttttagagaaggcaggactgaaatgatcagctttccatgtagggccagactctgggcaggtttctttttaaattttttaaatttttttgagacaggatcttgctctctcacccaggctggagtgcagtgacatgatcagggctcactgcagccttgacttcccaggctcaagcaatcctcctgcctcagcctccccaggtagctgggattataggcgtgtgccgctatgcccggctaatttttttgagttttagtagacgaggtctcactatgttgcccagattggtcttgaactcttggacaatcttcccacctcagcctcccaaagttctgggattacaggcgtgagccaccacacctggtctcaaataaaattttattggaacagctacactcatttgctttatgtcattgtgtccggctgccctcatgcagcaggcagagatctgctgacccctggtctagaatgtggaatgctggatccctgggttgagggactattttaatggtaagtacccatatttagatcttttttactgtggttttgtgatgtgatctgtcatctcctctgggcttgcatttctccagtgacaaggcgctcactcctcccacggcgatgcattccagccgtcgaattatgtagttctactgcttaatccttccttaacttgctcttcctgaagcctcaactcactcatcttctttctcaacccctcaggcccagcagaagtcctctctgtcttctccaggcgcagcccttcagccatgcaatcctgcgtgtcctcgttcttcattccacaaatacgttctaagggcctcctgcatttcaggcacttcagaggaccttctggaagcttcccagggcctgctatcttccctgtactgtaaggggacactttgctcaactgttcacttgaacagagtcttcaatgtcttctagtgaattctgggctgaaaccaatgtcgacttggccaaattaaggccacggtcttggtcagccaccttccaggttgacttgccagggtgtcctgggttggtttgttttacagaagcagagctcccagggctcatcgcacagccatggccgaggtgtcgggactcaaattccgggcccttggctgtgcttctcacattctttccattgtccgacgcactgaggcagagacaggaattttaactactcaaaaactactgtttacgtattttactttgacttctttctgggttcttgcataggcttcaaggagggaggatatggatgtgagcttattgtacaaatgccctgggttttccaaacgtgtctgatcttaaatacacagccctgcgtgctgaccttgtgttagaacttaatgatgcgacgtttgctttgcaaactgtggtcccctcctcatagatccttcaattcaacaattgaattcaacaagcccctgggcacccaccgtgcaccaggcactgtgttaggtgctgcagagatgaagatgaggaggatgatggcctgtgcccaggcaggtaacagactagcagaaggacaggaagcaaagtgggcatgtgtaccatgtgtttaaagcctgagggaacagctggtaggatcctcctggggctaggtggtggcagcagcaaagagaggggacatttgaattgggctttgaagggtgcataagagtttaacggggccgggcgcggtggctcacgcctgtaatcccagcactttgggaggccgaggcgggcggatcacgaggtcaggagatcgagaccatcctggctaaaacggggaaaccccgtctctactaaaaatacaaaaaattagccgggcgtagtggcgggcgcctgtagtcccagctacttgggaggctgaggcaggagaatggcgtgaacccgggaggcggagcttgcagtgagccgagatcccgccactgcactccagcctgggcgacagagcgagactccgtctcaaaaaaaaaaaaaaaaaaaaaaaaaaaaaaaagagtttaacgggacagccacaccactgatcactcagaagtaggtgggttgtgaatcttcagcattctggaaaatgtaaaaagttgttcagtgggcagcagtaaagagggtttcgttttcctggagacactgttgctactttgctggcttatacagggacacccagagagcggctgggaaaatcaagaactgtgtcacctcctccgttcttgcccactgtccagggctcaaggagattggggagcagtttgcaaaggcatttgaagattaggctccacagagatggacactttttttttttcctaaatagatacagagtagccttgtgaaggtttcttttgggtctgagtaggggacgcacagggcatggctatgagggtctcagaaactggtacctactttcctcttatttggcaccgggagcccctgccggaggacatgttctagtgacagccctgggctcaggcttggagagtgcattctcttccccaggaacgctagtcacagctcagtaattcaccccagggaccgcacagagcaggtgggatggtattgatttgtgggccttttggcaaaacatactcattcctaactggcgagggaaccgccagttcatttattcatttactcttctgagtccagcaacaaccttaagaggcaggtgttacctctggtttctgtttaaactgatggccagcaaggtagggcaatttgcctaaggacacgcagctcctaagctactaaacctcccgctcgcctggaagagaagacaggacgggcctatagtgaatcatgagtgcagcatgagagtgttaaaggtcacaggacgcctcttagtgccaagggagttcatagtggagaccccttttgcctgagggactggggaggtggtagttttgaactgggacttgaaggacagactggggtaaaagcaagaggagaagcttgagggaggacggtgtgtgccaggacggtgggactcagagggtggtggggggcacatccactgtccccttccatcctgcagccactccctgaggtggcatttccttgaatgacaggagaggagcctgaggcacgggaagattaagtaaccggtcctacgtataaggtggcatttgaacccaggtctacctggctccatagccaggccccgtgccccacacaccacaccacctggcgcttggccaacaggaaatcacgtcccccagtgtgtaagtcagggaggcagaggtgctgagatgctctcacctgtgggctcccgggcccagccatgctcttggtgttccctcaggccctggcttcccccctccctccaggtggacccatgcttgtgcccctgtgcattctcccacagactcctccctgcggggccacccatctccaaatcccagctgcatatccacaactgtagagtgttttaaaatagtgatggtagcctaggcaacatagcaagaccccattacccccaaaaatacaaaattagctaggcgtggtggcacatgcctgtagtcccagctacttgggaggctgaggtgggaggataccttgagcccaggaggttgaggctgcagtgagctatgattgcaccactgcactccagcctgggtgacacagcgagactctgtgtctaaaaaaaaagatggtgatgctgtccaggcttgacgtaggagccttccgttcctcctcagggcctgtgctctccttttgaggaacagcctccttttagtaaatgtgagggtggctgaggtgggacatgagaggcttgcagtacccaccaagccaggccagccacatggccttctcaactcctggcccagcccaggttgtcagctctctcaggttttgctctttctcctgcgtgctttccccgtgttcttctgcactgttatctttcctcttcatctgaggccatgtctttaccttatgtggtgctgatgtgggccagggaagctgtggcaggggcccgggaaccaccccagggggatgcagagggagtggaccctgtggggctcggccatggcagaattctgctctgattggctttagatcgtcgcctgtgacagcgtttcctccgcggagtgtgttaggaagagcagaaatgcctcctgcatctttattagatccctccaaatggaaatccagcagaaagccgatgttcttgtaaatatcacgacctccctccccatgaggtgtttgtagaacagttatttactcgttttgttttccccacctgcagtttacagaagaaaatcaagaaagcgtgtttttcctccatgcataatcccatccccgactgtaacaacaacaaaaccgtcctcctgttaggaagcagcagtgacttctttaggcaggaaaaaaaaaaaagcgtgctatgccagaaagcaggagcagctgggaagggagagggagggggccacacctggcctacccccagtcaccttttacccagggatcccctgaggaaaacaagctgtgaccttgagccggcaccagccccagggctgaaaccccagccctgtctgaagggttcctttcccgtgtccaccacggccccgtgctgtatagcagccccggtggaaagcctctttctcctgtacctggaggagttgctggaagaaggagaaggctcagcaccagcttctggctaaaatcgtggccgatggctggatgattccggccccactttaataaacaggatagatgtgcggtaacatcaggttgtcaggccctattttgtgatagaaaggatgaggagggaaacaagcacaaatcagtagtgtcacaatctcaaccacttcttccattttcgttaatagaatcggagtctcactatgttgtccagactggtcctgaactcccagctgatacggaagtggggcagggaagtgctgggaggagaagggcgggtccctgtcgagggctccacccctgggcccatgcccacagccctaggtgaggacagacactcctgcctttacacccaaatgctgcatttcccaagaccaccctggcccaccacactcccatcctgtgcctataaaaaccgcgagagcctagcaggcacacacagaagcggctggacattgagaggaacacgtgggtggaagaagacacacgtggctggatatcaagaggacgtcgggggaacatgccctggggaagagcacacaacagatgccggcacgctggcaggccactgaccagcagaatgccccggagtttggctggggcggtcggagaagagtcaggaaaaccatctcccttctggctcccccatctgctgggtgagctcaataaaaccttgcactcattctccaagcccacgtgtgatcttctggtacaccaaggcaggaaccagggatacagaaagtcctctgtccttatgataaggcaggggtataattgagctgactaacacaagctgcctacggatggcaaactaaaagagcaccctgaatgcccaccggggcttcagctgtaaacattcactcctagacactaccatggggttggagccccacagcctgcccgtctgcatgctccccttgaggtttgacccgtctgcatgctcccctcgaggtttgacccgtctgcatgctcccctagaggtttgagcagcgggacactgacgaagcgagccatacccccatcacatgccctttgagggggaaaagggaacctttcccgtttcacagccacagtttcctgctgttttctgaaattcctggtggccactcccttggtgtccatgggtgtctggtgtgtgcctatgtttgctgcgggctggctcggcgagggggaggtgggcagctgggggctctctggaccctgcggctggcatgggttagtggctccgtgtcacctggttcctctcacctctgttttcccttctagcccctgcaggcaggagacttcaacgcagagattaagaagttgagatgtctttgttcccagaggaaagtccctgcaggccccggcctcatggcctctgtgacagcagcaggattagaggcagagttggcccagagggaacatttctcccaccctctgtccctcggggaccccacttcccaggtggcctggaggatgaagtcagggctctggcctcattgagggcctggaactctttagagcccatcaggaccaagctctggtggccttccaggcccactcagtggctggcggtcccacctccaaatgcaggcagaccacactccctgaagggcagtggcaaggccaggccagcacctctccactctgaggaaggggccttacccagatccccgtgtcccccacagcggtggcggttttattgatgtattgtgaaggcacagggagggccctttccagagcaggctgcatctcccctcagcttccacactctgaacctgcctcctgcctccttccacagtgcccgccgggtccacagcgcccgccgggtccacagcgcccgccgggtccacagcgcccaccaggtttgatgtgggctgagcacaccgtcactaactcattccttcattcattcttcactgtgtggggtgtcgggacccagcacgggctcctggcgcagcaggcctcagaccctggggagagctttgctggaggaagtgcagtgccaaggacccatgtcctcattccccctgggtagagcgtgtcgggtgactctgctgcggtctccaggagctggcaagggaggggtgcaccaccagggaagggaattccaggcagcaggcaccaggagcctcatccaagagaaagagaagttccctagactcccaggcagggtgagccgaagggccttggagagtccctgaggtcccgtttcatgggagacttctctcacaaagcgaatgagctcaaatacggaagatggagaaatggaaaacagaaacagaacagaacctccacctgctgggtagatgttaactgaatcttttttttttttgagatggaatcttgctctgtcacccaggctggagtgcagtggcacgatctctgttcactgtaacctctgccttacgggttcaagcgattctcatgcctcagcctccccagtagccaggattccaggcacccgccaccacacctggcaaaatttttgtatttttagtagagacaggatttcaccattctggccaggctggtctgaaactcctgacctcgggtgatccgcccacctgggcctcccaaagtgctggcttgagccaccatgccgcccggccttacctgaatcttatcacacattcctttggaaaatgaatctcctgtgatgggaaaccagccattttcctggtgaggcctcagccctgtagccattccagcatagttaacctgggactctcttctcctctcttgtctctcctcttcctcctatctggcctgcttgctccatcctcccctgctttctgtctctctcctcaccacgtgcctttggatgttctgaatatgcttttgtttgcctgtccagcagtattctctccacggtctcctcctgggtgtctggcgtgtgccttgcgtgtgctgcgggctgggatctgtgggaatgacatagtcggacatggtcctgagcctgttggcctggggactccttttctgtcatactagatgagacaggcgagactgccctggaaagcccggcgtgtctggcctccccagtgctggacggtggccagtgtggttttccaggcgagtccgtgggctcctgggtgggtggtcgggctcgtggggagatcccaagcaatggttgtagagggatgggagggaatgggtggatcccagagagagagagagagagagagcaggctggttccactgtggcctcgttgtctaatgaggagagtgtacagataagtcatgctttgttttgctctgtctctggaattttaatcagttgccctaattgccttcaaattattggaagggaaaaacgccagcagagggtcctgacagatcccagctgtctagctgaggacttatcttctcattgttcttgggaaaccagtcaggtttagggacttgaggtggatgattcattaattcttttaaactgatttcctcagccatgtacacaggtgtgaaagcccttcttatgttatcagtattaccctaatatatcagagggctaggatttctcataaggcgactgttatcttttgataatcacataaataacgtttccatagttctcgaaagcttgccagatgctttcatgtacattagctaacttcttaaatttttttttttttttttgagatagggtctcactcttgtcaaccaggatggagtgcagtggcatgatctctgctcactgcaacctctgcctcccaggttcaagcaattttcctgcttcggcttcctgagtagctgggattataggcgcccgccaccatgcctgcctaatttttgtatttttaatagagatggtgtttcatcatgttggcctcagactcctgacctcaagtgatccatctgcctcagcctcccaaagtgttgggattacaggcatgagctgccatgtgtggctgacattagctaatttaattcttacaataatcttatgaattgggattctcatctcttttaaaatgaggaaactgaggctcagagaggttaagtcatgtgcccaagatcacttagctagtaagtgatgggcagggctgtggagctggttcacttgactctgctgccattgcatccagtttgctctgccagcgagtcaattgagcatttggagcatttgctgtgtgccagcctcatggaggcaaacggagcttcggaacccaggtgtcgagaatgagctgttggcactcagtcctggagtggcagcatggggggcgggggcaggagcatgggggacaacagtccagggagggccacatgacagcaagcagagcctcgaatgcctgagtcctggctccagagagaggccagcctgagctcctccatgtcctactcctgtggatagaccccccggaatgcagggggccgggctgagcaagaggaggagaggacagggaaggaacatgtctgcttctttccttcaggaaaggaaaggtgagctgggcgatggggaaggcctccacggtgttctgttgtaatgttctgccacttggcagcctcaccagggacatatcagccccaggctgattatctgcagaccgggatcccatttctgctgctttgggagagaagggagggtagccctgaggccatcccaaatgcgagtctgttcacagaggggctctcctggcaccttccccagcccagacgctgaggagggcagccagaagcccctgcatcaggtaggagtgctgagtcatgagattgggttgaatggcggctttagcacagctgtggcctgtgttagagagggtgagtttggaccattcctgagcagagggggacctcagaggacagtcggactggggaatccctggcccagagagggaaactggttttcccagagtcacacagctaggtgcccctttgatggttctctcagtgactcacgcctgtaatctcagcattttgggaggccaaggtgggaggattacttgagcctaggaggttgaggctgcagtgaaccatgatcataccactgcattccagcctggccaacagagcaagaccttgtctcaaaaagtaaataaaaaataaaacccattctcactctaacccatgctgtatctgatttttttcctgaggtaggcttgagatgggagggttgttattttttgtaaatgcattaggggcggagtggtgggagagtgattcccctgcagcccttctgaggtcactgccacaccatggcaagaaaagtatttctgactcctggagctccacggtgtgacaggtgggcaggagctgctgggggtgctgggcagacgtttaccgtccagcacccccatttctgctgctctgataacttggatcgactgaagaacctcggggctttcttggctgtttgtaggagcttccagaagcgacctttcgggatgcctcttacatagtcctgcctataccctctacacgtggcgtttcaggtctggagagtcatgtggtgtagctgtatttctgggaagtgtgtgacccgaagcctcctcctgtcagaaccaccggggagctcacaagctaaagtgcagattcctgggtcatcccagacctgctgaagccaaatctttagggtggggccaggaatctgcattttaaacaagctccggaggtggctctgaggccagccacagtttgggcacggcaaggctggggagccaggcttgtttcggatctccagtccttgtgtgggctgcgtgaccttggatgagttatttcccatctctgagccttggttctctggtctgttaagtggcaatcttgccccttctgttttaggcactgtcggggttgcctgccttctggtaagcgtttagtgccctgagccgactcagctggtgctcagggaggcctgatgattcggggcgcttggccgggtggtggggtgggacaccccagagggaagggcactggtcccagcttggtggggcaggccacctggaggaggggtggaccttgggagtgggttatattagggcctccaggcctcagtttgggaggagcttgcagtgaccttggagatggtagtgaccttgtcctcctgccctgcctgggtgcacaggctcccagcacgtgggtggcaaaggtcctagagagcacccagaggcgggtgtctgcctggggtcgagtgtgggagctgggcccagagcccccacttctgcctggcatccgggggtccctccgggaagctgaggttgttttcttgaacagtaaggactggccagagccctgagcaccgagaggtgagggtgaggccccccctactctttcccccaccctcctgggaatgactgccgacatcagggaagggaggggccccaaggccagtgacctggaatgcgatggccagggaggcaggagctggaggctgtgtggggcacgaggaggccgatcgggtgtcccgggggagactcctcgctgcttccctcgggatggtttccatgaacttccctccccggccctgacggcctcctctcctaagctcccgcctcctttttttttttttttggagacagtggctcactctgtcacccaggctggagtgcggtggtgcgatcatggctcactgtagcctcgacctcccccggctcaggtgatcctcccacctcagccttccaagtagctgggactacaggtgcatgcccccacaccagactaatttttgtatattttgtagagatgagttttgccatgttgcccaggctggtcttgaactcctgggctcaaacaatcctcctgcctcggcctcccagagtgctgggtttataggtgtgagtcactgcacctgaccatccctccccgcttttatgtccttttctccctctctgaggtagggggaccaagccctcctccccaagccctgtccactgtggggccttctacaatgtgagcttgtacatctctgtgatgtcacccaggtgccaccaggtgtgtgtgtcctgatgcctttggccaccagcctcaaaatctcccagagttccaggtgcttggtggaagggattcatgtacccctatccccatccctaaatgagagtgtccacaccacccgccctgagttctgaacttagccacctcatgtacggaaggagaaatggaggccgccagagaggtctaggcctccgaccctgaccttgctcctcttggatggtattgggtggcattccaggacagctgggatcttgatcatccagtgggtgccctcactgtgcacctgcctccaggtggtggcgcggtaattgcaagagcgtgagcccctcctctggggcatgttcttggaaataaatacacctcgtgtcatggagatgggcagacgaggtgccagctatttgaacggacagcccggagtctgtgcaggagttggaggtagagcgggtcgaaggcttgcggagggacaggtgggtctcccatggatggcttttcttggaggctgcagccaggagccattgtttctcttcccacctgaccttgggtggttccccttcagccctggcgttatgatgtcccgcccaacccccgaccgcacacctccctcccccttagctgcttcgaagccaaaggtgtggcaacagctaacaggtgcttggtggtccccgcccaccctccttcaggctccctacacccacctgagtgggcctttctgtgttcacttcagggatgaggcttggagaagagggtgtgtgagggggtgcgggtggccctccagactggacctaggcctgctgcattctgggttgaggtcctcttgctgcctctctgtgagcgagcctcgcctgctgggtgctgagcccacaccgcatgtcctcggcctcccattgagatcagctatacgtgatatagaccagggatgcacgcctcatgaggagacgctcactcccccagacacactgagtactctttcctcaagctcagtgcagttcgtccacgtttgcccagcagcacgcctcccgcagcgttgtcaatatttattcgtggttgccgctgcctccctcctggaccgcccattccctgggccctgtctggtggtggctggccttggagagctggcctctcagcacagcaccgggcaccagggctcaaggtcagtgggtgtgtctttgggtcccttaaggagcaaagtctcataatttgctttattttgttttattattattaattttttttgagacagttctcgctctgtcgcccaggctggagtgcagtggtgcgatctcgtctcactgcaacctctgcctcccgggttcaagcgattcttgtgcctcagcctcctgagtatctgggactacaggcacccgccaccacacccagctaatttttgtatttttggtagagacggggtttcaccatgttggccatgctggtctcgaactcctgacctcaggggatccacctgccttggcctcccaaagtgctgagattacaggcgtgagccaccacgcctggccccttaatttactttaaataaagatctggttctcccagatgaggttcacagacagatgttccaagagcacatctgtctggcatcaggagactcacccataccaagctcacagtgctggccatgatccgactcccgccctgcagctcaagcttggtctggagaccttctctggcacctgccccggctccccagccccgggcttcctgcattgtgtgcttccactcccgtcttctccactaggagctctgtggtacgggctttctgcaccttgacctctgggcctcccaccacagcacggtgaaggcaccaactatttcactgctagatccaaggatgctggggccgggggcagctctgagtgtgtctcatacagtgaccttgtttgaggaggctgtgtaggcccaggattttcctggggtgagggacgccaggttccttgatgtgttgggacaaagacgttggctgggcgaggaggctgcctgagatcccacagtgaggctggccctgcccttgctcgcccagctgatctgacaccctccagatggcccaagagagaccgggaggagcatctggtggaggacctgggtgttctgtctggagatttcccattgcttttccagtttattgtcatctgcttgggacttgagggtaacttcatctctcaaaataggctgagactttttacagttagatatttaatatacagatgacgggcggatggtagtgttgttttaaggggggattttgttgctgtcgttgttgttgttgttttgagacagagtcttgctctgtcacccaggctagagtgcgagctcgatcatagctcactgcaacctcaaactcccaggctcaagtgatcctcccacctcagcatcctgaatagctgggactacaggtgtgcgccaccacgcatggctaattttttgtagagatgggatgttgccatgttacccagactggtcttaaactcctgggctcaactaaaattttaatctccaattcatacatttcagaaagtataataatatgtaaagcaaaatcataatagcaacaacaatcactgtcatcccacgggttggtttagatgtaaattttatgcttccttgcaaaaatttgtcgaaagtgccagaaaagcccttgtcccatatcacagtcccatgacccacactcccatggaaagccttagaactgatgtcagtgtgagccctgtgctggagtggagggtgacagagcttcggacatgagcagcctctgctgctgcggccaccctcgccggccctggatccccacacagtgtggggtgttcaggattcctcatgtgacccttaccctgcctgccctgggactgtgtgcctgtgtgcttgcatgtgtgtatgtgcgtgtgtgcccatatgcgtgtgtaggtgtgtgcatatgtgtatataggtgtgtgcatgtgtgtatatacctgtgtaggtgtgtatgtgtgtacatgtgcattgtagatgtgtgtgcatatggtgacctcagttccaaagctttccatgtgtgtgtccatacacatgtgtaggtgtgtgcctgtgtgtgcatatgcgcatacacatgtataggtgtgtgcatgtgtgcacacgtgcatgtgtaggtgtgtgtgtgcattgtgtgtaggtttgtgcatgtgtgtgcatacgtgtgtgtaggggtgtgcgtgtgtacacatatgcatgtgtgtgtgtgcattgtgtgtaggtttgtgcatgtgtgtgcatacgtgtgtgtaggtgtgcatgtgtgtgcacatatgcacgtgtgggtgtgtgtgcagtgtgtgtaggtttgtgtgtgtgtgtgcatatgtgtgtgtaggtgtgtgtgcgtgtcagcatatgtgtgtctgcattcactcggccagagctccttgagggcagggtggttcccacctctctgttcccccagctcccagctccggcctggcttttaatcacagagtaagtcaagcctgctttgggagccttctgactcccccagacacactgagtactctttcctcgagctcagtgcagttcgtccacattttcccagcagcacgcctcctgcagcgttgtcaatatttatttgctgttgctgttgcctccctcctggaccgcccattccccaggccctgtctggtggtggccgcccttggggagctggcctctcagcacagcgccgggcaccggggctcaaggtcagtgggtgtgtgtttgggcttgaactgatgtgtgtgtttactgagctttctccgcagcctgctccggcagctccaaaatggcatttcaggaattgaattaccgacatttcagtacttgcggaatccaggaatagattatttgattgtatctgttggaagtcattgccgtaactggcttcgttttcttcaccaacatctaaaccgagtggggagggaccgcaggagaatgctgtggtgacttgattttcccaaaagcacatctcccaagctggcggcagccgatggcgttgccctgtgactgggggaagcctgaggactcacggtcgcctcaggctggccaccttcgcactggaacctgcccatcacatcaaggagccctctcaggctgaaaaccctgtgccggggtggctgcagcaacacaaggattcccctccagctctgtgatgtggggagcagagggccactgagtcctgccatgtgagtcacatgatgcccgtggcctgatttctgtgcccccatcttgcctcttagagtttgttgacctcagggctcacatatcccttgtaaggggttgtgatggcttccacggccatcatggctagttaggattttcctccagcccttgaggaattctctcgggattttttctggccttgcctgtctgcagaatccatagaggacctacaggaatgtctgcctctgagtccatagtacttgcaggcctgggaggctggatcaaggtggatgttgacacttggtggggccggagccctggcttcctggctgcctcatagctcaggcccgtttgacagcatttgtgagcacctgtcccaggcaggagcaagttcaacagcagcaagggctccaggcagagggaggtgggctctgatgggactcaggggcagcctaaatgtagcagagaactgagaggggatccctgaggccttcttggaggaggtggtggttaagccagctaactttgtccattggaaactgtcaccaggtccttattaatcaaataataatgaatatgccgtgttcggatccactagggaaagctgaaattgagctcaaaggaggcatagaagttcagcttgtaattttgaaaaaggaaaaggctctggcctcattaggctgcccccagtgtgtccttgagacctccttactccttgaaatgtgcttcttaacgttttggaaaaaacaactttctccttctatacttagcccttatctcaatgtgcaggcgcctacctggcccacttatcttcaagaaatgtgctgggttaggcctcaggagtggcaggcacatagatactgtatttggccttggccttctgcccaagtggagtctccgcattcctttgtatgggcccattgggcatgcctggctaatctgcgcaccctctttccactctccttcctgcatttctccttcccttcagtagtggctcccttcccattccccaaatcgcctctgcttttatcttcttccaatcgaattcccgtcagtcgtggagcaggtgggacacctgtgtatgttgcgggggcacagagaagcagcctgtgctcacccatgcctgcctgcaggtgcatgcttgggacttggcagtgggggaagattttggggttaggatttccaggctggcttgacactgacctgttttgttccaacccatacaagccctaaaccctcatgtgcagatcctgctggctctctggggaacacttagttggatgcaggtaggaagaggcttcaaggagcagaggaggggctggctgagggccagccactttgtctggtccccagagcggggtctaacatgtgggaactgagcagcaactgtgagctagccctcaggcaaggctgccccatgatgccagggcacatagggcagactccagatgatggggccactgctggcattggccttttgcagggcacaggagtctgccaggggtgtgttttggagccacccatacaggtgtaccagcttttggaaaatcccaaagatgtggtgccctgctcctgggggtcttgggggctcccaggtagcaacagcgttctgggaggacgtgggctcaaattccaacttttctaccaggttttggctatccttcatccccgtggggctcagtttcctcatctccaagctaagggggcccacctaaagttgtcacagaattggacgtgtgacggggcagcccccttcacctgtgggatccgaggcagagctggcacctccaggctgtgggtccagtgacccggcatggagccagcaaacagaggaggcacctccaggctgcagggtccagtgacctggcatggagcaaacagaggaggccagtgggcaggtgggtgttaccagggcctggagcagcaggggtggagccctggggccaggcagggcgggtttggggtggcatgtggtttgttgtggccctgtcatttgcagtttgggttagtgggtctggctggccaccggggttggaggggaatgccagtgggactatacattgtctccttggaggtgactgtgcccccagaactgagtggacaagccaggcttgtgtccacacctgcccccgtcttttaccctcttctggctctcctccaagaagagcttttcctaaatcattcgccctgttcacctgggctttgaggccccaggtgtaggcccagggggtggggtggggtggggggatggtctctgactggatagccccacctgggtaggaagcccccagtgtggccccaccttggctgtgacctgggggtcctgcagagtcctgtgtcctgttgcagtgaggggtcagtcagtgggaagagtggacaattaggagacaccatgtctgtctcctcgacgccagtcaacactgttgcctttgttcccagggcagccttccccttgccttccattccaaactcctcctcctccctctaagattccctattcacctcctagaggaggccacctgagtgtcagccaggcactggacctgggcctgcccggaaaggtccctgggcctggtgtgctccaagaacctcgctgtcaggggtcagcgtgccatggaggatagggagaggcatgtgcccttggggacgtctggctttgtccggggggttttctgctgctcactggcttcaggtcagggcttggctctgtgctgcagccttaagccagcgggcccaaccgcctcctccaggcccgccagcgcctcagatgtttctctccttcttagagggtgtttcacatcctttcttttgtttgccctgattatttttgcagatgaaggaatacacacaatggtcatctttgtcttatttgaaagccaaacacgttgcttacacgttgggtgcacagtgaatatgtatcagtccagcgcttttcaccatctggtctggttttagtgttgctttatttctggtcattcctcaatcggggctaaagatcagaaaaatcgcatctccaggtcctgagccatggcgaggaagctgggtggtgccctgtgctgtgtggctaaggtgggggacgagggttgtcggtgggggaagccccatgggggccccactggagtcataggagcgaatggagcacccactccatgccttctgtcaattacaaagcacctattatgtcccggatactgtgtccaacacagtggacacattgatgggtaaggcataatccccccccaggagctcccagttggattgaggaggcagacaggcgagcgtatggctgtgacacacccagcaactcccagttggatcggggaggcggacaggcgagcgtatggctgtgacacaggggggcaagtggcgtcaccaaggcagaacccagcagccggggcctgaagccccctcacccagctgcagccttcccgaaacagctgagatcagcctggagagctcttcctccctgcctgcccggagggtggcgtgggtcccatcgctctccgtcagccacggccagagcacacctgtgctgctcctcagaagggcatcacctgtggagacggtgacagctgttcctgttccctgccccaaggacaggatctggagcctgtgggtgtgtaaggagccaactccctgaccccaaaactgtggccagttctggagaaggtggccaggctctgggtcccgggactgtggcccccctcctgcctctaaagcccctcttctggcctccatgacttcagcccctcctgcccccagaaggagggatcagccctacaagggacccaagagagggagcctcacacacaggcgctgcctgactctcctccaagctggcctgagccctgggcagtgttctgaggctcagccacacggctgtgcagggcaggtgagagcggcagcctgagagctgcgagccggggccggggttttcctggagcagcaggagggatgagttgggtttctgtaactacaagggccaagaagagggagaggatgatctgggaaggagagtggctttgggccagcatttgggccagcaggactcagaggcgagggaggtggtaagatcccttgcttgggatgagaggcagatggggaaactgaggcttggagcagagggaggggcagggcctgggcccccagcaggtcccagttcatgatggcatgctgcttctgcatgagtgagacatgagggggtcacagacgcccggaagcatcggcatcatcagatcatccgactcgataatagaaaaattaaaatttaaagtcactgaaagtgacgagtgacagaaatgttcctagaaactggagattgggtgctcagcggatctcaggatagatgatatcagacacaatgtcccctgggctgaggtttttttttgttttttgtttttttatgtttcagaattctaaggcaaggatgaaagtcttctctattcttgaggtgctggggttcctcagcctccaccgtccagcctcgagcagctgccccctctcacctgctcctcagccttctggaacagacaggccccccacagcagcccagcccaggccaccagcaccacccccagaggtttatgccatcttcatgcagtgggaggctcagcccccacactgggacctgtccactttagccccaaggatcttaccaaggtcaaatctttggaactcagggtctttgggaacttctgggccagacaacccggccatcacaggggcttctgcggggttggctttatgatgcatttgggtcaggaggtctgtttttatcctttgggcctctgggaaagtccgtcctggccaagtcctctgtcccctagtctcatggctggctggccctggagctcgggtggcctggcccggcccgcctgcttccccacaggcagcggctcttgcttctgctgcctgcagtgctccagatgctgcaggctccttccttccttcagggcatcctaagtcccccgagtctcgaatccccagtctcagctgagtcctcgaggtcagtggggcagaacgccagagccctgggacaacgggctgcataaaacacttattttaattataagagtgatgtaagaacatatcagaaaattggcaaaatacagggcaaaaaaaaaaaatcactggtggtcgccttctcacacagtcacacacagtggtgtgcagccttctggcttttggttgctttgttgcagtattggcacctgcgttacaagattttgtgttgaccattcttgttcttgctgtggtctttaaggtttacagcgacagctgttcctcttcaggatgcaaggagaccgagcctgcctgccctcagggagctgacggtccagcaggaggcatcctgtctgcagggcccatgcgggggacagggcaagaggtgcggtggaaccagaccttgccctccagaaatgcagggagacagacacgggcgtatttaattcaactatagcatgtggttctgagaaggcttcttggaaagggcctggggttgagctgggcaccagcagggaggtctcagagtggaggcggcagttccaccctacggcgtagaggaggcgccctgatcactgcctttcagccgtggccctgcctgtaatcttatcctttttgttgattgttgttggctgatgttggctgttgctgtgtcctccaccagagtggagaactccctggggctggaccccttgtccttattcacccagagaataggtgccttaaaatactgactggacagaaggaggaagagatgggttggggggccgtgtcatggaagaattccttgggccagccgcagaggagtaggccttggcagagagctgggagcctggaggggagctgaagacctctcccatagtcagctgcctttagggaagaaatactagaaagtcacagaagagaaaagaggcggggaaggggaggaaagcatttccacccacagtcctgtcgggagaggtaacattttggagtacagtgtgccctgccccagcaggccctggctggatgcatattcctatagatataattctataagtgagatcattccatatctactattttacaacctgtttttgttttttgttttttccacttagcaacactttgttcttacctagaattcaccaggcaggacagggctgatgagggagcccctcccacctggacactcagtggcccctcccaggactcggggctttcctgggggcctcagctgcggagcaacagctccctgtgcatcagagccgtgggggaggggggccagggggcataggtacgaccaccactcccatttcgtgtcctttaggaagcttgaagaaaagtggttagccaagaacacaaattacggtgatgttgtttgcagtgtggcgtgttgggttaacataaactctgaagtcagaattgacatcaatttgagcccagatcatcctgttagcagctgtgtgacctgggacagggtgcttaccttccagactttagttccctcactgtacaacagggacagggatcatacctttctctgagagttgaaggaagaagtgaaaccaaacacagccccatgacagccccttatgcatggtaggcactcagcaggtgctggctcccttacggcccgaaggaatcgattgacaaactctcaaattaatgacataattcaagagagtagctgcggagacaataaataattatagtagctgatgtggtttggatgcgtgtcccctccaagtccatgttgaaatgtgatccccagcattgcaggaggggtctggtgggagttgattggatcaggggggcagattcctcatgaatggcttgggccatccccctggtgatgagtgagcaatttggtcgattaaaagagtgtgtcacctccctattcttttgttcccactcttgccatgtgacacattggctccccatcgcctcccaccatgatcgtaagctacaccagaagcagatgctggcaccacgcttcctgtacaggctgcagaactgtgagccaattaagacacttttctttataaattccccagtctcaggtactcctttgtaataatgcaaacagactaacacattagccatagccatttattaacataattttaaaagatttcagtcttgtgctgaaattgttatgttgatggttacacatttgtcaaaacttagtgacctgtacacctaaaaggatgaacttaattgtgtgtaaagtataccttaataaacttgactttacaaaaaaaatccctcttttttttttttgagattgggtctcactcacccaagctgcagtgcagtggcacaatctcggctcactgcaacttccacttcctgggttcaagcaatcctcctgcctcagcctcccaagtagctgggattacaggcgtgcatcaccacacctggttaatttttgtattttttagtagagatggggctttaccatgttagccagactggtcttgaactcctgatctcaagtgatctgcccgcctcggcttcccaaagtgctgggattacaggtgtgagccactgcccccagcctttatatctcttgactgtcacaaaatgcatattttatttaagtttgccataaacagaacatttttacatactgtattgtaacagtatataatacaatacataccgtattgtattgtgtgtagtacaatacatagcgtattgtattgtgtgtagtacaatacatagcgtattgtattgtgtgtagtacaatacataccgtattgtattgtgtgtagtacaatacataccgtattgtattgtgtgtagtacaatacataccgtattgtattgtgtgtagtacaatacatgtatgtaatacaatacatactgtattgtattaatcagatatgttgtcctgtgttattaaaatcatcccttgtggcccaaatttgaaggcagtactctgttcctgggtgtgcaccgttaacttctttaatgaacatcctgctgttcaatagtgaggctgcatccttctagaaagcgctgttgagaggtgtgaggaggctgccacgcaggccgcgccgccccgaatggcaggtggaaggcggctgagtggagccgcagcaaatgcaaccctgcccccgagccaggccccaggctgcacctttccactgcttcacaccagcagtgctttacctggaaaggtgtctgaacagtgcttgcaaaggtaactggcattctgccggctgctcaactctgtggacaccagtacagtcaacaactctcactcgccgcgggcacctgctgtgcccacctgctgccatctgagtgtcacgaccacacccccatccctgtcctttcacgcactgtctgcccgcacacactcttccaccctctgtcggcagggcccctgccacctctgaagccccctgccagctctcggcagccccctcctccccctggctcccgtgtcctgcccacctccccacactggcacctcctgagcagccctggctgagcatgcactctgagggcagaccctggccgggcaccaagatacaaaaggttatgagggtgttctcttgaggaactgagtccagtgtgaacagtgaacacagaaacataaagggacaccagaatccccatccccatccccagggtggtgagccaccgaggggggccaggcacgggggagggtattcaagggcggcaagccaccaaggggacggggcaggcacagggagggcatttcagagagtgcaaggaggcggcgaagatgctggttgagggcacgggtgaggcggggaggcgtttcgactttggactgaaggccttaattgaccaaggcggtaatttccagtcctgtgacctcacgacaggctggacattggaggatgggatgacactggctcttctggggtaacttgtctgggtttaaggttcttgatggggtttaggacatggcgggaccctaaggatggtgccagcatctgaattctctgccgtcttgcagagtcaggattctgcagctacttgcccaagaaaaagtagagaaaggtggtttcatgtttttttttttttttttttttttttactgctttgaagggaggtgtgggactcgtttgcacacacagttaatatttccaaggcttgtgcagggccagacagatttggttgcagctgttagttttacttcctgtcccgataaaggagggtgcttgcctcagctctcacctgctgccataacaaagctccatggaccgggccgcctaaatgcagacacatactcagctctggaggcgggaggtctagatcagggcgtccgcattgtcaggttctggggagggctcttcctgctttgcaggtggcttttttctctgtgtcctcctgtggaatgagagcaaactatagtctcttcctcttcttacaaggacactaataccatcatgggggcctcactctcctgacctcaccgcaacctaattactttccaaaggccccaccccctaccaccatcgccctcggggttagggcgcctgggtacacatttgaggagagggcacagccgttcagtccatgaccacattgcatgttccagggaggaactggagagaggctgctgtttgctgggcacctgagctggttatagatgttaaatcctcacggtagaaaatgtggaaaatacagaaacaattataatgcataatcctacaattcagagatcatcacagcagacatatgggtccatttcttctggtcagtattcatttacagcgaggcggacagactcatgctgtaattgagtcatgctatgtatttgtttcaggtcccgctttttctttccacttaagacaatatcattcatttcctgtatcattaaaaatatttgcggtcgggtgcggtcgctcctacctgtaatcccagcactttgtgaggccaagacgggcagatcacttgaggtcaggagttcgagaccagcctggccaacatggtgaaacccccatctctactaaaaatataaaaatttgtccacctgggccagtgcgtgattccgaagactacatttgaagtccagccttgcagctttccaaaaacccgtgcctccctctttctgcttgtaaatgtccctcacaactggtttcccagaaaaattgtgaggatgagcgaggtgttgcttgtggaagttactttggagggaaagtgtttgtgacaccccatgggtgtggcccatggggctcctgagggtggatggatgtgggagtggacaggcctggctccttttcttggtgggctgggctgggctatgagcaggagctatggccgtggctgacccttctgcaatgggagctgagcagtggtacagttagatagctgcgcagatggtccgatggcccggcctccaaggccttgagtgatgggatgaccatgaccactggatgtctctcaataggctttgccttaaccatgccagcagttcccccatctgctttatcagccctggtatgtacatcagattggctaagggtgcaaaactggaatgctattaaattccagaggctctggtcgcttgaaaagatgagctgaaaataagataaaatttcacagggttaaaggcaggctttgcactctggtttaagtatagagtcgtccattcatgagagtataggtttgggagacaatagcattgaagaggcttgagcgcacactcagaaccagtggctctttcttagtctgtccatgctggctatactgcagcccccctcaactggaatcagatgtggcccaaccatgaatactttggacaaagctcccccaagtcaggcatgccctcttgttagggaaggtggattcctgacctgagtccatctggaggtccaggcaggaattagaaccacttcagaaaagctctgcacagatttaattgcacgagtacctgcgtctcagagctgcagactgagtgtgttgtgcaattgttgggcggcttttcccttggccacagtagattcgcaattaagaaaaacaaatgcagctctcagtcagaagtgtgcaaggtttgcttggtctggagacagcagcttctgtgctctggggtagtgaggaagtgtgtgggcaggttggcaaataagccacatgtatgtcccctgggctcagcccccatcttagtgggcacaccagggcccacgagatctggggactatttatgtagggtctgctggggcaggggtgtgggtgggtgtgcgctgcttgtgttgttgaattgggatttttccagccagaccagtctgctgggacaagccttctggctctgggccaaaggcctccccagctgtgatccattcaggcctagaaagctgggggtgctgactgccatcacccactggcctccatggtgtgtccacagagggccaccttcctgcagggctgagctacttctgtctgggtgtagcttcttgtaaagtccctagcagggttgctccctacaacccacccctccccattttctctttctctctgcatgactattattcactcttcaagtctctgtttagatgtcacctcctctgggaagccttcccagattccaggtggggctggaggcccttctgcggactcccctggcatcctgcactcactcacctatggcacatatcattggccgcaaaatctcctgggcacttatcacactgcgggttccttgaaaacaggaatcattcttgttctctgctgcatcttaggatggtgactggcacatagtaggagtccaattaagaatgttttgaataagcgaaagagtgcctaaatgagacttctattccagcttgaagaccagcccaccaccctgataagaaagttcaagtgtgggaaccgctggggatcttgatggcctgggacctctggatcagtgcttgtgcaggacagaggcagccccggagttctcatgggggctggtgagcagagtggggccccaggatgcctgatggcccggtctgaggtgtgcaggtgcccctgaggtgggcaccacccaggagatgcatgtatctgtgaaataccagataggcccttagtctaagcaaggaggcatctaagctccttaaagattccacaaggatgttacgttgtgctttgaacaacagagacgtggctctgctgagccccagccaaagctctgcacagggaccttgactctcccttcccgctgtgtggctccagcaagtttcctcccacctcaggtctgggtttccaggcattaagtgacaaagtggatgcgacgctccttctggactgtaatgcgcactgcgtggagatgttcgtgttccagtgtagacagggcgttgtcacatcaggcaggactacagggacaatgtttgtcagcctgtcttctgggcaacttggggtatcctccctttatatcacctcctgcccaggtgctctgcgccgccagagcatcatgtcatttgggatccctgatggcaattttgagactttggttcacagtaaagattggtcctgtgtgatcttaaagtaatgtggcttaaaaacaaatggctgtcagggaattgtaaatcaaagcaaacaccgatgagaatggcccaaatccaggacactcagcaccaaatgcgagggaggatgtgaagccacaggaagcctcactcactgctggtgggaacgcaaaacagtacagccaccttggaagacagtttgacaaatccttagaaagctaaacacacttttaccctgtgatccaacaatcatgctccttgatatttacccagaggagttaaaaaaacttatgtccacacaaaaacctgcacatgggtgttcatagcgactttattcacgattattcataacagctggaacttggaggcagcgaaggtgtccttcagcaggtgaatggataaattagctgtggtgcatccagacaatggaatattattccacagcactaagaagaaatgagctagcaagccatgaaaagacatgggggaactcatctgcatatgagtaggtgagagaagccaatctgaaaaggctatgcctatggaggattgcaactctatgatatcctaggaaaggcaaagcgatggagataataaacagatcagtggttcctacgggttaggagggagggagggatgagcaggcagagcacagggcatttttaaggcagtgaaactgctctgtgtgatactgtagtgggggagccatgtcattgcacagttgtcaaaacccatagaatatacagcaccagcagtgagtcctaatgtaacctacggacttgggtgataatgacgtgtgaagagacaaggcgggttcatccgttgtaacaaacagccaccctggtagtagggagggcaggaggtatgtagagaactctgtgctttccacgcgattttgctgtgaactaaacagctctaaaaaataaagttcattaattaaaaaaaaaaaaaaaaaaaagggaaatgaccacatgcaaagcactgcgtggagggccacgcatcccaagcaagtcagctagagtagaggcaggaaccaaacagctctatgaggttctggatgagaagccgcatgcaccaccccctccctgctcccgtgtgggacccagtgaagacctcctgtgcccggctgcagctgctgagtgtgggagtgtgctctccacagcaaaccagccgtgaaggctgcacaccttcctgtttctgcccagccacaccacagggcactcagcccttttcctgagcacttgaagctgcgtttcctcgagctccttcctgtttaagaacaggaggggagtggcggctcgcttgtgcaccactctccagggcagtggtgtgcgggacaccctgcagcacctttgactcctcctctgggaatgaggcgtggtttaatctgcaaccccttaccattagagtctgcaactagtcaaaaggtgaatctggctgggcgcggcggctcatgcctgtcatcccagcactttgggaagctgaggcaggaggactgcttgagcccaggagtcctgaccagcctgggcaacatagtaagacctcctctctacaaaagtaaacaaaactagcctggcgtggtgtcatgtgcctgtggtcccagctactcaggaggctgaggtaggaggatcacttgagcccaagaggttgaggctgcagtgagccaagatcgcgccactgtgctccagcctgggtgacagagtgagacccaccccccttttttttcagaccgcatcttgctctgttgcccaggctggagtgcagtggcacgatctcggctcactgcaacctccacctcccaagtttaagcaattcttttgcctcagcctgccaagtagctgcgattacaggcacctgccaccacacccagctaatttttgtatttttagtagagactgggtttcactatgttggccaggctggtctcaaactcctggcctcaagtgatctgcccacttcagcctgccaaagtgctgggattacaagtgtgagccacccagccctgagtgagaccctttctcaaaaaaaaaagaaaagaaaagaaaaaaaaggtaaatctaagaggtgaccagtaggggaatatatttgtcgagtctcctcacctcagcactgttgccatttggagaagcataattctttggtgtgtgcggggaagggggggctgtcctgtgcattgtggggtattgagcagtatccttggccctacccataagatgctggtaggcatgtcccctcaactccccagttgtaataaccaaaaatatctccagacattgccaaatgtacccgggaaaatcactcaggttgaagtcactaaattatatgtgtgtacatataattacacatgcatatacatcgcgtacacacacacacccacacacacacacaccttttgctggtggctctggattggtaagctggctccatggcaagaatcagcatcctaatacttgccccaccctttaaaataaacttcccaatcctaggcagacaaaagaacaaccccagacctcctccctcagggtggggacaaggtgagggaggtggcggcccggcaggaaggtcatttctttcttcagtcacatcagatgagctgcttcccctcactaggagtggatggggctgccagtggtgttcttgcaaaataccccttgtgggaggagaggggtggagggagagaacaccctccacacatccccgtgggatgtctggagggaagggttttgggcacccaccctggggagagaggagagcccaggttaccatctgtggtgtcccctcgctcacactcactactgccctccacaaactgccatgcttgcttggtgcacggtgctgtgctgggcactggggcaaggccccctcccccatggggctacagatgctaatctgcaaatcccagaaaagtggaatctcggtggcagagtggatgaaggggaggtgctcagtgctatgaaagccagcagctgggagtttcaggggcttccctagggagggaccctgagctggggtctgaaggaagagcagttcactggggagttagggagtgttctaggcagagtaaacagtgcagtggcagccggggctggcacttttaaagaaagcctcaagacttctctttctgattgtgaagtgagctgagcagactgaaatcaaagatgtgaaaataaagatagaggcgacaggctgggtgcggtggctcatgcctgtaatcccaacgctttgggaggccgaggtgggtggatcacaaggtcaagagatggagaccatcctggccaacatggtgaaaccccgtctctactaaaaatacaaaaattagctgggcatggtggcacacgcctgtaatcccagctacttgggaggttgaggcaggagaatcacttgaacccgggaggtgaaggttgcagtgagccagcctggcgatagagcaagactccgtctcaaaaaaaaaaaaaaagatagaggtgacaggaagaccccaccatgagtggcctccactgagtgcgcatgtgagtgagcagctgtgcggtggtccttgccatcttcccatcagcccctcccagcccctgggcctggagaggctgagaatctgacctaaggctgcccagtggcgtgaggctggcctgccgagcttacgtccctgggggactccaggaccccagtgcttcctactggtggcttcagctcccggtcacttgtcgggaatgcagggctgaacccctggaggttgtgtgggacagggcccaggaatctgcattctagcaagcacctgctccaggcttgcttccctggcagggaggcttggtgatccaagttccttgggtgcagacacttgctgcttctctcggaggccgggctgggctgtgattttttcatccaatgtgctgggctgatttcacttgcggatgcagaatgagaagctgtagaggagatcacggcaagctgtctgcatggacgatggcagaatccggtgtctgcttggccgcgtggtgtcactaataggatttgccgagccttttggatgtttgtggcgcgacggctgctgtgggaacccagaggctgctcatttgcagggaatgaataatttatttctgttttcagatgacttattccttcatctgcagccgagcccccacatgttctgtaggctcctgattaagtgatttcagcaggagaatttggcttaatcccccactgccctggacgcctggttccaggctgctgatttgtcggcctcgtgtcggggggtgtccggagcctctcctctctgggggcttttcttcctgctctgcctgtttgggaagcctctggccactgagcatgtgctggccttgggttttacggctgtctggcaattagaatattaatgtcgataacacagcaggacttgcgtgtgacaagctgagccacataacgtcacagtcgctcttgaacatctcggactttcacatgggccagccacaccccagcctaggttgctccctcacctcctcagggcctccctgatgtcggtttagacatgtgccttccatcttgcctgggccaccatgttgatcctctgggtccattgctcaagagcccaccatggctccctgttgccaaatgcagcctgaattcagtattcaaagccctccgtgaatgggcttggtccttcctccctggcctctcttgcgtggctccatgctctgagctgcctactcgctgactcattcatttaatgtttattctttggttgttgtttcagcactgagtgggtctgtggaatcatttacatgtttattgagagtccccctggctgcagatgctgggcaggggctttgatgtggggagaaagacccccccccaggttacaggtaagccctcccaagtggcccagggccctgggagggggtgaggttgtgtgagatggcagtgtgggagagtctcaaatttttggcatctttaatctgcccactgggtgagattgaggactcaggtgggtgtcaggggctttgaatgccaaaccacaaaggtctgcaggctgggggagctgcaggaggttgtcatcagtggcaggggccttggagcttggtggaggagaccacgcttcagatggccagctggagcaccccccaccagccccgctgcctggaccccttccacctctccatggacccacctcaggccctacccaccctctgcaccgccttgcacggcattgcttaatttcactgcaatggctcactggggctgctttcctccctctcttattgctctctgggtgagagttggtctctggcctccacatgaggcagggacagtgcccagggagtggccagtgggagaagcggggcttgcaggccaggtgggcccaagtgtgattcctggtgcagtgctggtggctgtgtcgcccggggcaagtggctcagagcctgtttctcatctgcagatggggggatggtctgtacctgtccagcacccatgaggagcaggtggaacaggatgtggcagtcaagggctcctgaggggacccgtaagtgccacattcagccttctgtgttaaggaccatgagtccaaagagtagtcgcgtgtgaatccacctccttgtgccagcctcacggcctcctcaggaagggcatggaggagcagtgggatgcccacggtaccgtggaggaagcagtcctggaggaagggtgactggccgagggccatgcggtgacgcactggggactggctctagctgctgtggggcacgtccacgtggagaagcgcttggtgtattcccccaccctctcacccccacagcgttcctggtgctctgggtgcctgctgtttctgagccatctaggtgggcacagggacaacctcaccagggacagtgtggccccatgctggtaagcaggcgatactgaccctggttccaaactgcattcctgttggtcctttgtcttgctcttccggtatcattacgaacacaactttagaaagtttaacagtggtactcagagaggcttgtggccccaactcatgtgacagtgaccaacaggtgaaaggtgacttgtggtctgaacacctgcaagggacacttattccgatgcctgaatctttgcatctctgcccagcagatgacagcacctggagtgttagctggtcatacctggacctgcgagtgtaggtaagacccttcttctcagggcctgtttgctcaactgcacgatggaagggttgggcaagatggatctttcctttcttttcttttcttttctcctttgcagttgaacatttttcttgccactgaaatcacaggtggaggtctgtgtgttcggcaggtgaatggccatgcaggggtggagggaggcctggatgctttttcttccctgcactcgcaggccccccatgggaccctcagcccccagaggacaattggaggcttctggactagggttctaaggtctcctgagaaggtcagaggctcgttgtccggccaagacagacagcagacagttggcgtgtctcagggtaggaggctccccaaatagaaagtactggattgggagcggatttattgttccctgcctccccggggccgtcggcatttcccctgtggctgcctcactgttctgatgttggcaaaggtttgttttatcttcctccttccagaacaggaggtgcctcagtgcctcagatgctgcctgagaaggtcagtggcatctgggagccatggtgagggtggcagtgactgggctcgggaggttccagaattctgttagtgagcagtgagctgttttattttccttcctgcctatggaaggtcctgagtgaacaaacaagtttcagtctcaagacaacacatcgtgtttcgaggtgacctgtccccaccccacccctgtcactgggagaagactgcaggtctcacggtctcccgtctgtctctgctgcccccaggtccagggactcctgcgatttctctccctggtgcctggtatttttgtagcactctctggttttcaaagttttcctacaacaattgtgcttaaaatgaaatataaactccatccccagcccccaagtcccactccctgccgacctcgtctcttactgggaaggcccatctttgtcaccagcagcagctgtgagtgcctcgtcagtgtttaagagtccaggtcgctgcagcatcttggtgtgtactgtggacccattgtgtgtgtgcccccaaattcctgtgctgagaccctcactccgagtaggatgttattaggaggcggggcctttgggaggtaatttggtcattagtgcccttataggaagaggatgcgagccagacctgcctctgctgtctaccaggcaagtatataatgagaaggtgacgtaggaggcgggactcgactccagaggcaggactcagacaccagaccaaattgaggactagctacaacagggccagggtagaaacagctttccctaagacgtgcccaccagtgtgcatgtcagtttaccactgccatggtaatacccggaagttacggctcctttccgtggcaatcatctgacgacctggaaattaccacccttttcctagaaatttctgcataatccaccccctaatttgcatgtaattaaaagtgggaataaatctgattgcagtgccgcctctgagctgctgctctgggcacactgcctgtggggtagccctgccccgcaaggaacagtccctctgctgccgctgggcacagctgcttcagtaaaattgctaataccaccggctcacccttgaattctttcctgagtgaagccaagaaccctcctgggctaagtcccagtttgggggctcacctgccctgcaagatcaggagccatctgtacaccaggaagacagccctccccagaactcaactgtgctggcaccttgatcttggacttccagcccccagaactgtaagaggtaaatgtttgttattgaagccacccagtctatggtaatttgttagagtggcctggaggaagacacagtattaagtaaggcttcgtgtctgacttcactgaacactgcggttgtgagacgcatctgttgtgtggggcactgaggttcattctgattgctttatgggactctgttgtgactgtactccagtttctctgcccgtggaatgtacatggatgtttggatagtttccagggtggggctgggacaaattgtgcagctctgagtgttcctgcacatgctttgtcttggacatgtgtccttctttctgttggacatacatgaaggaggtcagctgctgcttcacggggcatgtgtgtggtcatctttagtaaatatgccagtttttcaaagtggtcatagacagtagattccttttattatgtgacaagagctcaaatgccctggtagtgggagtggcagcaggagctacagtaagacattgcacattctctggaagtcagggatccctgccagtcagttcccagtgccccaggaaccaggggtttggtgctgggcactagtcatgaccactcgcggctcaggtgttgggtggtctttccagaccttcacctgtgtgaagcttgcaacctggatggtctcatgtggacatcttggcttccaccctgtgctctgtgtctggtctcagaccacagcccaccctggtggtctcctcaggacacataggctcctctgtaactcagtttcttgaattgaacaatggaagaaaatgcctctatgaagagaggtcattgtgcaaaacgtctgtgtgacagtattcttggagcaactgtgcttatcacccggaggccacagtggaattagtcatttgaaaaccagtcacctccaaaatagtcataatccaaaaccatccatctttgacttcagactccattataattttttctccctaagggactttgctttgtaattatgttggatttcctaatatattaaaataatttgtcatctcttgagcacacatctgcctgctatgagcaagcaggagaggccacttccggttttctgcaggtcccagtgagcatgtgaagcctgcgcctgggcaagaggttggatactgggaggaagaagcttttccagtaccctttcccaaagaccagccagtgagggaaatgggcaccgaatgcaccccaccccccggcctgggactgggccaagaaggaggaactgaccccagaaatggccccggaaccataacctgcttacactgtgacctgcagtgcccatggtggcagcctgggctgtttctggagttgagcggagagttcctccagtctaaactccttagagaacatgaatattcctgagggcctggggtccggcaccaccttcagtggactggatcaccttcttgaaggcagagagatcttaagagcttatgtctgactgcctacccgatgcccagcactaatctgcatgcaccccactgggccatgggcttctcaaaggtggggacgctgtccctgtacctaacacacatggtgggcactcggcctaggtttgcagggcctgctggggagttctccaaggcagttttatagctcagctccagcaccttcctgggggcccagtcctggatttgaggctgccaggggggtttgcagtcagctaagttggtacccatccatcccttcccctctgtaaggggtgacaagcactaagacctgttatgtcccctggaagctctacactctgtccccttgctcttgtgactctgctctttgctctcctgtccactggcatataggagtaggaggatattgacttagattcctttttattatttttgtttaaatcagctttgtggaaatgtaattcacataccctaccatttacccatttaaagtatacaatgtaaagtatacaattcagtgatttttagcatattcacttgtatgtgcaattatcaccatggtcaattttagagtgctttcatcactccaaaaggaaacccgtaccctttacctgctagcccctctttccccatccgctcttctgccagccccaagaaactacgaatctactttctgtctctgttctggacattttatatagatggaatcataccacatttgtccttttgtgtctggcatctttcattatatttttggggtcttgttgctgtttttgtgacagagtctcgctctgttgcccaggctggagtgcagtggcacgatctcagcttactgcaacctctgcccctccaggtttaagcagttctctgcctcagcctccggagtagctgggattacaggcgcgtgccaccacacccggctaatgttttgtatttttagtagagacgggatttcaccatcttgtccaggctggtcttgaactcctgacctcgtgatccacccaccttggcctcccaaattgctgggattacaggcatgagccactatgccaggctgttgttgttttttaagacgtggtctcgatctatccctcgggcgggagtgcagtggcatgaccatagctcactgcagccttgaactcctgggctcaagtgatccttctgcctcagcctcctgagtagctgggactacccccatgcaccaccatgcctagcttgtttatttatttagtagcgatgaggtctcactatgttgcccaggctggtctcgcagtgctgggctcaagcgatcctcccaccttggcctcccttagggctgggattacaggtgcgagccaccacacctggccaagaattggtattccttaaatatttgtagaattcagtagtgaagctatttggccagggcttttctttgtggatagtgttttgattactaattcaatctcttcacgtgttataagtctttcaaattgtctctttcttgagacagttctggtagtttgtgtctttctacttggcttagattttgcaggcctcccctgctctttcagtcatagttgacatttattgagttctttctatgtaccaagcatttgttgtgcattagctcatttaatctttacaaaaacttgatgagctaggtagtactattgtcatctccattttacaaatgcgggagtggaagcagggagaggtgagataacaggtcaaggtcacactgttaggaaataggaaacagtccagctgggctttgattccagacagtccagccatgcagcccctggccttgccacctccctctgccattctccagagactcggagaggggcctaaggcctgacatgaacgaagggctgggggaggtggggtcggaagggccccaggaaaagcgtgtgtgtgaagggctcagactcccagttggggagttcggatgtccccttctggggctttcatcttctaacctcctctcccaagcgctcagccaaagggcagcacagagcaccctaccctaaggtgtgacgccccagctggcaggactttggagcagtagatctgtgcccagcaggtctgtatgaatcacccaggcctctgcattttgcttttctagaggaagaggcatggcaatttgtaagacaatcgccagacagaaatcgggagcaaccagacataactcaacataattatttctgcataatgacttctgctacttgattctgtctcgagcaatgactgtaatctctatctgtcactgggaagctggtggccagggagcccctgtggcttagagatagagccaggaggaaatttgcaattcgagttaatggagtgttcccaagcagcctgagcgccaattccttcaaggtctccggaacagcagacccccttcctgctaggaagcctggtgtcagagctggctgggcctcctctgcggagtccagctcatccactttgtcacagatggggaaactggaaatggcagaggtcacaggatgtgcccaaggcacaggccaacctggaaccagcacttcctctccaccctcccaccacccagcattttccccttcagctggcctggctgtggtgggacagaggaaagatgcctctgtggagctggtcactgagagtgctggccaggcagggctgcccccaggaagctggagacagtggggcctttgcaaccagatagcgagggacctcaatgtggagatagggtgtgcttgctgagcgtgccagcaggcttgtgctcacctgctccagctgggggcatgcagaggcccctcctaccccaggaggatgcttattcactgcattccatggccttttaaaaatcccctttaggcccgggcgtggtggctcacacctgtaatcccagtactgagggaggccaaggcaggcagatggcttgagcccaggaatttgagaccagcctgggcaatgcagtgagatctcatctctactaaaaatgaaaaaaaaaaaaaaaaagattggggtgcacctgtagtcccagttacttgggaggctgaggctggaggattgcttgagcctgggaggttgaggctgcagtgagctttgattgtgccactgcgctccagcctgggtgacagagcgagatcctgtctcctgaaaaacaaacaaacaaaaaaaaaaccttgtaactaaccagagcagctgaaaagaacagagcatgggtttggggatttgtgttttgggcgccccacaccccatttagccgagtgtcacctgagctggtgtcccggagtctctttccttctccataaacagttgagaatgagctctctgccaggccggtaggaaggggatgatgaaatgaggacctggtacattctgctgctggttccattgctgggtttctcctcgtggagagcccttgaccctgtccaggtcttgatttctcggagtgtcaaagcagtgcgcacggagctgtgagataaattggctgagatcatcgatttgaaaacgccgtgagaaaatatggggcaaggcagagagcacagaggggctttagggcagcgagcccgcgctatgtgatgctgtaatggtgggtgcgcatcggtacacgtttgtcaaagcccacggagtggcccacgccaagagggaaccctaacgtgagctgcggacctggggggtgatgatggtcagtgcaggtccctcagttgtaacaaatggcctgctctggcaggggatgtggatcgtggggaaggctgtggccgggagtggtgtaaggggtgtgtgggaactttctgctcaattttgttgggaagacctaaaaaataaaatcttttattttattttatttttttgagacaacatttcactgtcacccaggctggagtgcagtggtgtgatctcggctcactgcaacctcagccttctgggcccaggtgatcttcccacctcagcctcccaggtagctgggactacaggcacgcaccaccacgcatggctaattttttgtatttttagtagagatggcatttcatcatgttgcccagggtggtctcgaactcctggagtcaagcaatccacctgcctcagcttcccagagtgctgggattacaggcgtgaacaatggtgtccagcctaaaatctatctttaaaacacacacacacacacacacacacacacacacacacacacacacactgctatcttaaaagcatagggaccttgcagtgagaatttctggtgggaagatgtatgactttgtcaggtcttgaattctagcagtgagtttacattccataattggcctacaaaattctatatttgggaaacagtagaaatttaactctgagcaagatacaccctatttccaatcacacgtgatgcatctcgggggcattcatttgtcaaacattatttgttgagcacctgctgtgtccaggctctggacgcatagacgtgaaacggacgatttcctgaccttgtggcgctcacagtcaggggggtgggttggtgggtgggtggaaggaggggagaggtgcagcacccccattgtgcaggagcgaggggagccccgctggcacgccgcactgtgctgaggctgggtgttctagggtgaacaagccacttcgtctagtgggtgcttgtaaagcgggatcgttgctatgagagagagaaccttgcgttgggagaaagtaattagggagtgtgcggtagatgcggaagagaaacgggccgtcaggtgaagtgactgtcaggattccatcctggctcggccccttggaagacacatgatcttgcaggtaattagctcctgtaagcctccatttttccccgtctgtcaaatggggatgatgattgtgcctgcctcccagggctgctgtgtggattacgttggataatgagtacaaatgcatagacagcctttagcaaggagcctggttgtatagagctgtcggcctcaacactgttaatacacatatgtaccagaggctgcaggttcacggaggaggagtcaccaatccatgcccggggagcaggcagagaagagggaggcgggcccgtcccgagttcacgccacgtgaaaggtgcttggaacgcttgtgccagagctggcagtgagggttgagggtgggagtggccgagcacctagacacccgcaatgcaaattttccttctcagtctctggatggttttctgagctgagctgcgggctgaatgtcaggtgatgcgtcctgacctcttcctgagcacctagtgtgtgccctgtgctgggcccaggaggcatgctgggggcaatgtgggcctcaaggaggaggtcgggtgatgaggggccaacccaggtatgccagtcaagaaaccgtggaggctggagagaccctgaagggagcagggcacagtcgtgggtggcaggcctgggtgtgcctgattccactgaaccctcgtaacagccctgggtgcagagtgtagagtgctgggtgaggacggaggctgtgcgtctgtgatggccccaggtgacaatgctgttgggatttgaacctgagtttgtggaccacagaggtcccggccacacttagtttccatgccagttttgtagtaaccagcaacctcactcgaagggtggccagcatcttaccttggggcttctatcaacgttgtcctgggcttctcgcctgctggggtgcagcggccttgggcatgtgcccctgtccatggtggctggccggaggccgggagccagggctttctgtatgtagcatggcacttgcaaaaactgtgatcccccagcaggcaccacagaagcaaccagagggaggggcatgggctccgggccgggtcgtcacagcctgcgtgacctgtcgctcttctcttccaggggcatggtctagtggcccagtcaggacgcggaaacactccctggaggttctgacccactccctctcagcctccgcctggtctctggtaagtcactcccagaggccgactggctcagggtgggtgaggactgaggatggaagtgggtggctcctgctgtgccgtggggtcctgcccatgtgtggggactggacccagctcagcagaaagagcagggaagactgggcgtggggggcagcccagctagcacccctagacaggtcaggaaactgcggctcggaaatgcagagaaacagccccccaggccccacagccatctcagctctcgccctaagctggccaggtctttctgggtaaatcgcgtgaccttcggtgcttctgtttggcgatttgtcaggggaatgaggggcccagaactttgagaaggacgtgtgggtgagggcaaggagggcactgtcttagtgtccgggtttctttgtcttctatcccctgcagcccctgtacctggaagcttccttctcccaggctcctgtgcatggtcagggccactcagccctctggacccccacccacgccagataagctgtctgcgctgggagctgggcatgtggctctcccctcagagcagttaccgtaggctgccgggcccagggtctgtctgaatccgccaccctgcagccccccaggcccctgcctgctctgggtgcgaggaaggcttgagggagggcaaagtgcttacagcttgaatgcaccaccctggcctggccactggtcgcctctcccccagtgttagcctggcttaggggctttttccatccggaatccttcctggccctgcctgagctaactccgtgagctcgggagggctcctcatgaccctggtcatcctgccagctcccgagacaggaaggcctggccatgtcccggggctgccctcgggtctggagagcctgccagccatgctgtggggctgcccttccagcgttgagggtttggttttgtttgtaagcaaggaaccaggtatgcgatgctggagagtgtgtaattctggctgtgcctcttcacagccccttccaatctcgtgcatattaaggttgataaaaacaccctcttcagggtcaatgcgagatcagacctggagtgaagtgtccctgtggtatctggaccagcaggacctggctgccccacagctcctcctctctctccctcctccctctcatggtctcatgactattatggtgactcttgtcactcaccaccctgccccacctgctcctgcatactgtgagcatcagttggggccatggatgtagcaagggtcagctgtcataggctcccggggggacacctgggggagggacatttggggacagagccccatctggccatgcccagcccctgagagccctcatcaccgacttgcatctggtgagtttggcagggtcctgtataaggattaaagtcctccaagtcctcatacaaagtcgctttccaaaagtctggaattttcttggccctagacacgggagatgctctttataattttcatcttcccactcagaaggaaccacctttgaatactcagccaggctaaaatttggacccaaaacctgttaaagcatcactgtcttaatttcagtgttcatgatggggttctgggctgtgtgaggggtggagggcagataccagtggcaggtttcatctgtggccctggtagatgtgagtcccgcagccggtcagcccagggcccagggcagaccccgggcgtggctgctttcccgctgggcaccaacgcacgcacgtggtgtttccagggcaaagtgagctccccaccctctgcccgtcccctgccccgcccttagatctgcatcccgtgggtggggtgggttttcctgccttcctcttcctgagggaggcgatttctccttccgctttctccttgccacagtagctgctgggttgggaggagacatccaggctggggcctcagcctcagggtgccagttagcgtgtggttagctgagaaaaaagtatttttctcagcagaaaatagacacaactgcatgtgaaggggccacttccactccttcattctccatccaccagccttactggagctagagagtgggggaacatctgggtccgtgttacctggatgtcacctgcatacaaatgtcctggcccgaggccactgtcagcacgggtgcacaggggaggcgcctggcccggcaggtcgtgctgaggctgatacccgtgtcaagaagctggagcaggcgaagagatcagaagagggtagaggaggtggtccgaggtgtccattcccatccccagacccctggggcatttcagtgcacgcacagcaaataatatcactgcaccaccaccaccaccaccaccaccaccaccatcaccaccaccaccaccaccatcaccaccaccaccaccatcaccaccaccaccaccatcaccaccaccaccaccaccaccaccatcaccaccaccaccaccaccaccaccatcaccaccactaccatcatcaccaccaccaccaccaccaccaccatcaccaccaccaccaccaccaccaccatcaccaccaccaccaccatcaccatcaccaccaccaccaccatcaccatcatcaccaccatcaccgccaccatcaccatcaccaccaccgccgccaccaccgccactgccaccgccaccatcaccgccaccactaccgccaccgccaccaccaccgccaccgccaccgccaccaccaccaccacgagttgagggactctgggatcagaaggcactttccagcacattcacaccattggccgtggatgttgtgggtcaggtgatgggcactggaagggccttccgcttctctctgcccctggcccttggtcatgtacagcaggccgctccccgggcagtggagaagcagcacctgcatactaaggctcgagtcccagcctcccctaccagcctccctctccacgtccccagacactcatgcgttccttcccttgaggtgggttcatggagcacgtaccctgtgtcagacaagcttccaggctctgggcttctgatggagaacagaccagagtaaacctggccccaaggaccttgagctccactcaaggggagacagacagtgaactcaacaaaacagaaatgagagaaaggatcaagctggaaaggggataaagaatgagtgtcggttttggatagagtgcttggggaaggccttcctgagatgagacctgaccaaaggcctgcaggaggtcagggacgggcgtgcttctagctaaggagcagctggtgcaaagggcctgtggcagacgtgcacccgtggcaaggagggggcgagcaggcggctcagccaggtcggagtgggtcacacctgaggggcaggacgctggcaaccccgaccgctgaggaagacaggtgcgagcagcatctcggcacagccagacccccaccatacggcagccctctgtgtcccttaaataaggatgcctcctcccaggcttaagagatcattgttgctcatagtgatttgtgtagccaacaattcttctggaagaagttagatgaacagggccatggagatttggggccggaagagcaggaccccaggcttgcctcccctctagtgctggccaggccgtggatcccaggcgggcatctcagagagccatctgagcggcctttctggaagtgccctcctaggcagacgctggtcatgaggcagggcagcggggaagggacaatcctcctgtgttgtacattgagggttatatttagggtgacttgggatgacttggcagtatcacttcctgtggtcgtcccctccagccctcagccacggagggcagatcctgtctgacaagcattgtgggcagacacgtgcctgcacacacgtacacacccacatgcacacatacacacacgcacacacatacacacattgtgggcaggcacaacttggcattctcatctgccctggaattggtggagggctggggacattgtcctggcccttctgcaggaccgccaggtgcctggcgggggaatcctagccgtcagcatctccggagcatctgctccatgtcgggctctgtgtgaagggctgcatccagatcccacatgagcaagaccggcctagcctccccatctggttgggagatgccaggcagaggtggaaggaagggcggctgacctgccccttagtctgctcagccacacaggcagccacagccgaggctgcacaaggacactcccctgaccttgctgcctgctggccccgggtctccaggccaggtccgagccagccaggctcctccccacccatgtcaccggcctctctaggtggagtccacagtgatctttgctccccttccccaggcatccagcaccacaccaggcacagggcctggtatttctgggacagcccagattacacgttttctctcagttaccccctagaatattcttggacttctcagaccccatgtgcaaatttttagcttagaagtaatcactgggatcatagacgatgtttagcaaatatctgttcttttgggtgttcctaggcccccagagggtctccgggaaactggctcttttgctgaggctagagactatctgggctagaatgtgtctgatggggctctcggagggtgcacagacagtgccgcggtggccgaagatccactattccaaggccggatctgcagaggatttggaagttgtctgtaaggagcgcctagatcacccggaccttctctctccctccttgacttccttcctgcctctcgtcaaacaattactgtgtgcttcctgtgttctaggcgctgtgctaataattggttatgggattattcctagccacaccctgggtaaatggaacccagctctctgtccttgggaaaagggtcaggagagaactggggcccagctgggaagctggaggcttgaggctgctggtccatgttggaatgctgtctccctctgccatccagcacccaagcccggcgccaggctcagagcaggaactgaagcttttgctgttgttgttgtttttgttttttgagacagtctcgctgtgtctcccaggctggagtgcagtggtgtgatctcagctcactgcaagctccgcctcctgggttcaagcgattctctgcctcagcctcctgagtagctgggattacaggcgcgcaccaccacgcccggctaatttttgtattttgagtagagacggggtttcaccatcttggccaggctggtcttgaactcctgacctcaggtaatctgcccgcctcggcctcccaaagtgctgggattgcaggcatgagtcaccgcacccggccaggaactgaaccttggtaggagaaggaaagaaggagttcctgtcttgctttcccgaccagactggaagcgctctgagggcgttttacacttcggtgtcttcccagcacttagcattgtggcctgcatgtaaggggtgttccgtgactgcgtgttgattacactttgtgtgtatgggtgggtgcgttgccacaactctccctgcagaatctgtggcctctggtgctgtgatttaaagactaaagatggcaaagagtggcttttatgagctgccccactcctgattataaacacactctctatgagtcagaggcctgggtgatcatggataagtcacttgccaacagttaactccagactgtagctgctggggccaccgagggcggctggaacatcaccattctgtgcctagcgtttcagccgggctgaggccattttattaataatgatttattgtttttattgcttcccagagatattaaacatgaatcaaataatgcatgtgatgattcactggaggttcccttccaaatttaaaaaagaattaaagaaaaagtttttgacgggtgtgctggtgtggacaccaggcaggcacctgagagccctcccaccttgagctcagccgtgggcagcacagcacagggtggaccttgccctgcagacagagccatgcagcctgcgcaaaaccccagggaggacgcgcgtctcacaaacacctcttcagtctaacatttacaatggtatttcttacaaatggtttccacccgagatatattacaatgtggccaaaccccattcatttgggacacataaattcaaaatttggaaatagttcctttggggctcatgaactgatcaagtttagtcatttctcaagcagggacctggcagaaatgttgctttttaccatctactaagacaagagctaggcagctggttctgctgaacaaggtcccggggagagggacaccagtcctggctcagtgagcagctcctcaggtgctttggaagcctcctctggggatagactcaaagaagttttctatttatttatttatttttctttatttttaaatgtttttctcaaggatgttttttagagctagctcatacctcaggggccacactgtccaaacacatattggaccctgatgaggaaagtgagagccgtcagggtgtgtgacatagccactgtcacccaggcctccagctccattctgcagttgaaaatgatgccctcataacaaagagttcttttgtgtgtgtgtgtgtgtgtgtgtgtgtgtgtgtgtgtgtgtgtgtgtgtgacggagtcttgctctgtcacccaggctggagtgcagtagtgtgatcttgtctcgctgcaacctccgcctcccaggttcaaatgagtctcctgcctcagcctcctgagtagctggattacaggtgcctgccatcatgcctggctaatttttgtatttttagtagtgatggggttttaccatgttggccaggctggtcttgaactcctgacttcaggtgatccgcccacctcaccctcccaaagtgctgggattacaggtgtgagccaccgagtccggccaacaaagagttcttatccgttcattacaaacgcccactctttccagtccttacctgatcaagaattcagaggcaatttttcaggtatttttttgactcggactttacaaatttgaactaccattcaagtaattggtctgaattcctaagtttcgatggtatttttctcttccttcttctggctgcctctcctccccataccctgcatttgttaatgtacccatttgttccatattctgtttgttctttattgctctatacactgctccataatgttctctatcatttgtccattcattacccatgaaggtacatgcagaggtcaccagcccagaggtttgtagcagggacaagttacttgctggtggtggtctccccaaaagtttgggcctgcgagtcattgacacctacacactttgaaaacaccccaggatgaagtctgggactggaaggagctcccaccttagccagactctggcctcctccccagctgtgtccccgccagcccttctccagccatgcccttttgcctcccagcacactgaggattcctcctggaatgcccctcaccccgtctttgctgggtgagtgtttccccagccccgctgagctcaggtatcagccccagcgctctgggtaagtctgggaccatctcctacattgtctgcaaaatcctgcagaaagcctggcctgtgctggtcagcaggatgctgcgtttccttttaaacagacccaaagcagtcagcagccacagactccccagagacggagatgagaggagggacctcatgccctgaggcagccccagcctcactcccatgccctgcaggcgctgagcagcccccagatcccgggctcctttgctgccccagggtcgggcagttcttgcatcttggaccgagtgggctctgccctgctgtggcatgactgggcttcttctgtcctttttctttattttctctttgaagaacaggagttggaatttcactcaccctgccccagctggatgtgtctaggccaccgtggtcccaggctctctgcccagctgggcctcaggaccaggttttaatgccgctgcttgggtgtgccgagcgagaagggctcgccaggcagtgcagagattccaccgagcccaggccgcagcccccacctcccgccgggctgtgctcagtgtcaggaatcggctcccaagatggccgcctttcttgtaaagctgtgccaataccccaggcatctgactggtgctttccagctggcactccttttacagattccatttccctttatcctcacaactgctcagtagaacctgcaggcagggacccttattcccattttacagtcaaggaaaataaggcccagagaagttgagacagccaggaccatatggctggagacggggcaggctgggcagagcccccagcagggcccctgggtctgcgggctgctcccagcagcacccctcatatacacaccctcatcctgactgcaggcccctgaagctggcattctggttcaattttacagaggagcaaacaggctgggtctggagcgttgacactggcaactctagcccagccttgcctgactccagggcatggctccaagaccctggaagagctgcctgtccctccatggcccctccagggcgtgctgggtgctggcagggcaggctgaggcactcgacagcagagttggccccgtagtctcagttttgctcccgctagggtgaaacacggttccctggggaagggctgttgctcacctcttggcctggaacatcagggtggaatttgcagacggaattctgccatctgacgcgtagatcttccccccaggcatgggtcagtgcttgagtcattctgcagctggcacaaagagccaggaagaatgcgctccaagatgcctgggagctggcatgccaaatcaccaggcgtcatcagcacagccaagccagggtgggggcctcgggcaggagcagcgccctgccagctctggctgactgcacgaggggccacatctagagggactgatgaaggggcgtctaaagcctcagtatctccagcctgctgtgccctcttacattttctcccaaagagcagtcagcttgcagtatgcgccaagtccccgcaaatgggacgttgggtgattcacatggttgtttcagcttttgagtttttgttgtgtgattgaatagtaatagaattattcttggtgttctatggagcattaccgggtagtggggaggtgggcacactgagcctctactgtttctccccttcacccctccttgctgtcatcaacatgcgttctcctacagtcatgctccgcgctaattcctttagtcattccttccagcattactgaaactggaagagtcttttgtggcatgtggggattcctcgtcgtgcagggcttgagtgccacaggacccagtgctcgctgtccccatgccctggcacacactgttccctttgtcccagctggagaactcctggaacctttaagccctggctcagccctcagctctgtcccatcccagctgacctctgtgctctgcgcccgagctcctgagcccacgtaagtctcttcatgcccatcactgctgtttcatgggcgtgtgtggggggtcacttcaaggagccccaggaagggtctgtgtcttgtccatccacgtgtgactacacccagcatggaacaggactcgggaaccactgaggtgtgggtgaaggaaccagtccagagactccactctcacttcagcctgatgtttctggggtctgtcactgaaaaccccaacttcgccttcaaagcgagatcctgggtgggggcagaggaagtcccaggctctgtggccaggactccacacccagatttccaccgggctcgctctagcctggccctggcacgggtgctgcgtggctctgctccccgcctggcatccggcacccttcacctctgtagaaacacggaactgtcacagggacagacgtacatgggtcgggggttgctttcagaaagtctatggtctcattttggtcctgcctttgagcttccttttcctgctgggttagggttccggacggaaggggagcattctcttgggcgtttcccttttcctgtctccctgttctctccccagaggctcatgtatgtccgtttcactcacctccctttctctgcttgggaggcagctcaaagagctcctctccaaagactcaagctggagtgatgttcgctctatgatgacgccgcactggtccagggaatgatctcactggagagtagcaggaagtcccccatcctgtcccccaccccactggctgaggaccatatagctgggatgtgttcacctgggaaggagattggcaccagtttgataaatggacacccccaagtctggcatggccccaaaactctactctgctgcagctgtttccatgccagaaaacagagatttccagaataccgagtctgaatgtgccttcttggagcagcttcaaatctgagcaggagagcacttgaccatcctaacccctgaccttcctccagcaattcctaaaactggaagagtcacagaatgttagaataagagggatcctagaaaaagaaccactcactcattgctttgttcatttgctcaggcactgtgctaggcgcttggaatacacaaccattcattcaaacatatttattgactgaattgtgtgccaggccctgttttgggccctgtgggggtacagtggtgaacaaaaggaggcagacagtcaagagattttgtaaatatagtgccaggtggcaggaaatgctgagaaaggggtcagggtgagggaccagagggtgagggtggatgctctttgaggtgggtccttggaggaggtttccccacgactgttgagcaagaacatgaacttggagggagtgagccttgcagacactgaggggaaggaagagcagacaggtggagggaactgcaggtgcgaaggccctgaggctggaacacgctgagcagcttctctgactgggacaaatgaaggattctccttcccccaggagctcccagtctaatgaaggaaaaagacaaagaagtgacgcgttcaaagctgagttcatactagaaaaacgctgttagaattcaaagggaagagcagttgtaggggctgggaaaggcaagcctgaggagtgacctttgcattgggctttggtggatgagtaggggttggcagggtggctgaggcgagcgtgccacacgggtgaactcatatctgcagaggcacaaggtgtgcagggacagccacccacacattcctcttcctgtcgcagtagcagcttctgcaagagaaagtacagctcttggggatttcccttttcctttctccacctcttccttctcaccagcttcatttagggcatttcagccttgagagggtggaaaagaaggagagattggtagaggaaggggatttctgtgccctgctgggtctctctctctctctcttctcatatgttatgtttttcttgtaaggttttggggagttgtggggagtttaagaggctggggatgggtaagaagtcaagaaggtttcggttggatttctcaacaacaggtcattggcctggagcccctccagtgggtaaaatgccgtgatgcaacagctttcaggaaggcctccagaaatgagctctaggtcagtgggttgggtttaggtgcaggcacgccctggaactgtcactctagaggtgttactaacctcctctttccccggatctgactcagcagggttggctgttccagctccaaagagaaggaggaaccttttccttctgcagcccctccccaccagcctcattccttagctggggtcagacctggggtcctcactgcagctggcctctggcagcgttctcaggctagccctccctgctgaaaagagaaccgtgtgggactcacaggtaattatgaaatacaaacgccatgatctttcactcaagggcactaaggagtgaataaataaaggataccacagggtgctaatgagcttgaagagtccctgtttggtagccccagatccagggtccctggtatcacccactgaatgctacttctacccagcactgcccacgggaaataaagtgggagacacatacctatgtgattgtaactttttctatagccgcattgaaaagtaaaaaagatgaaatttaaaacttgtttgatttaaaccgttagatcccaaatggtatcatttaccatttcacatgtaatcaagaaagagaaagtattaatgagatattttatgttgttttttttcatatgaagtcgtcaaaatccggcgtgtattttacactaagggcacatatatgagttcagactggcgacggtttatgtgctcagtagccacgtgtggctggttgtgaccatagtggacaaagcagccctagcttataggtggagacacggaggcacctgagaggggcggggtctcagctcaggccctgggagcctgttcaacagctccctctagcgtcggcccagccacacttcagcctggatggtcccagatgcatcggctcctccctgcacctgggtcctggcagccggcacagcctccccgcaatcacccaggggcaaaacgggcccctccttggagaactaccgggaagctaaggctgcaggcagcttgactgtcacttgcttatttggaggaaagaaggacacaggcccgagttgttttgaaaaatgcaatcagccctaggagaggggcttagctgcaggggccgtgtgggtccagcggtcaccgggagaaagaactgggttgggtgctggataagaaagagcacaaacctgtttgtcttccaccggccccttctgccttccaccttcctgttccaccccaggaagaacaagctctcatctcaaatggcctgagccctctgattccttgaagttcaaattcacaacaaacgcctctccagcctcttcctgagcctcagtcttttttttttttttttttttttttttttttgagacagagtctcgctctgttgcccaggctggagtgcagtggcaccacctcagctcactgcaacctccaccctccgggttcaagcaattctcccgtctcaacctcccgagtagctgggactaccaggtgcgtgccaccgcacccagctaattttttatatttttagtagggacggtttcaccatgttgctcaggctggtcttgaactcctgagctcagacaatccactgccttggcctcctgaagtgctgggatgacaggtgtgagccacggcgccccggccagcctgggtctctcataagcatttggtgtttcccacctctctggtcgccttccctcaaagcatctcagagtctggttggcctggcaagcttcggggatctgactgatgaaagcattttggagcaatgggatgagatgccaaccaatgccgtcagccggcactgaggtgggattaacaggacaatcaagccctcggttcccaggagcctcactgagcagctgctagaactgtgccactaaacaggctttaatttacaggcaataccgactctgggttaactatttctcacagggctccccagctgcatgtttacatttctttccttgttcctctttttcttcttcttctttttttttttttttttttttttttacaattcagcagattaagaacaatagcagggtaactgagaaccacagaggtggctgtaagtgactcattaactccctctcccatgtttccatcaccgtgaattacaacgtcatctctgatgccctcagacagctgttactagtttgatccgagccttgcttgaatatgaatctttttaagccgagcaggagatggttctgctctcaaatagactgccctcccctgggcctcccatttcttaccccaccatcctccttggagatgaaagacttcctgagaaatgaaggctgggtttgcctaattactggagcaaggtggctgttctgctgggaaacgtgagtggtggctttctgtctctgcagaaaggcttgcttttgctcggtcgtcttactagacagccaagcaccaataaggttggctcctttgcttaatgaatgacagaggggtcacagcagcatgcagcattccccccgccccccgtttcttgtgaggcagcctgcgtcgggcccgacagcctccaggagagagctaaaatgaggtccttcagattacatatttcatctgggcccttgttaataagcaaatgctggctgtcccagtgagtgactgggagtgtgtgtgtggccgtcaccttcatttggcattcatgggctccatttaccagtttcataaaagttccagtggggaggccatcttgcaaagctgtcctggcgagcacaagcagagtgctggacaccagccaggagcaccctgggtggcctccacggctgcttatggtcttggcatggaaagggcccagaggaggttacaggacaatgggaaggaggtgggctctccactcagacctcctgggtccacagcccaccaccccaccgaagcctcggtcccttgtccctaaggtggagctgacattgcctcctctcggcctagccaggagtgaccccactttcccagctcctagaatcttcactgtgtcctcccctggatgtggcctacagggactgggcctcctgcagcctttgaaatcctccttgtcattcagttgtgattccaaatgccgttgtcctaggcaagccgccgagtgccccgggaatgagcgactcccctggaccccactttattcactttttatgccccttcctgggcatgcctacaccataactcaagccccccagggagctggtgactggggaccggcatcccagtgctcagcctgggattcggcactcagagggcccgacagcctggaatacactgagcaccccgctggcaccaggccccaaggacaggctgatgtttccacttccctggagaaagatcctccagtcccctgctcggaggctgatcccggctggctgcccgcttgctcagggcaaggaggtaggctggagagggcagacttccctcaactcacccatcttctgtgggttcctcaccagccttcctctgggcctgttgttctcctgtccagtgtctttccagagaagattcctcccccaagctttggagatggggctggggtgggggtggttacctgaccgctgagtcgcagtacagggttccatgttggtcaggggtggctaattgctgtaagaagcaagtgccaacctttgcttggcccagtgaagtggtgtttcctgatgtgttgcagtgggatgtcaccgcaggagacgaaggctctattccacgcagtcacgcaaggacttaagtttcttctttttagaaggtctttcgtctcacagcctttctcagccggggttccaggagggaatcaaggactcacagcaaaggcatcatggtgtgcagggaacgactttcctcctgcatacctggaatgaaaccagttacacaccatccttaggtacatgactggttggggaaatgggcacaccagtcattgactgcaggctgtggttcagatgagaaagcctggttgagaaatgctttagggtctatgccctctggggcctccaagtcctcccctggatagtctgcttccaggtgcccagcaagaaagggcaggaaagggcgtgtgcagcaagggctgccctgacagttatggaggctcaggccagaagtgtggtcatcactctggccacatcccattggccagagtgtagtcacatggtaccacctagctgcaagggaggctgggaaatgtagtccggctgtgtgccctggaagaaaaggcaatagagtaagaagagcacatggtctcggcacaggctctattcttgcacattccttcagactctgcctcccacacctcctgaggctctggggataccctatccctgagccttctggaattttggggccccagttgccctgtttctccttcctggcccccctccctgttcagctgtttgccatctccctgcccacttcccactgatatgtgttggggcttgtggatgtgatcaaggtcataggcacagtctttcttttctttttcttgttctccttgttggggtggggattttttcaaaaggaagcggcaaaggtattgtactatttttgggtccctacactcttctgcctccacattcttctgttgtgtttatgctgctagacctggaaccttaggatgagcaggtcttggcatcagactttgtttgcatcagcagaatcctttctttgaaagagaacagatgcagaaacagatcagagggttgctgctctggtctgtgctgggcctggaggcccagagtccttcctcctcccctgcccatcctgtggacccccaaagccttaggaaggtccctggggctcctgggacacagctcagaggctcctggctggtgtcactcctctctgtgaggcttgaattctctcccttgcattccgaaagtgggtcacactggaataccagctttgtccaaacctccctgcctctggagttagccaaaccttaaagcaggttcttgtgcatgtgtgtatacacagcaactgcaaccacagcaagagtgtccattcacccaacacagacacccaccttgtgccaggcccagctgggtcacctgggagagggtgaagggtaggaagcccttccagaggaggtgctgagtgaggcaggaggccgcaggcgcacacgtctgccctctggcacacgcaggaaggtgctgggaatgcagggagcttctccccagcagaccatgatgcactccgcctgttaccttctagcggtgtgctcactgggtttggcactgcccctaatctggtacctccctttctatacgcatctgtgatttcaggcagataagtgttatgagtttggcattccaatgggatcggtaagaacataaatcaccgatccatcctgggataaatttctcccttcgttctgagaggtgatttggttttcactgaggtgagtggattcttaaggcagtgatcctcaactcccagggcctagaacttcacagaaggtggctcattttgataatgaaaaatgcaggggtgcaaatcaggcagaaagggcctgccactagccaacaatgtgtccatcaccatgtcgcccttgcctgggccagcctcccctctgctgcccatgcaaggcctggggaggaggccagaccgcctgggtccaagccctggctttgcctctcagaggttccggggctctcccagggttggtttacttgtggtgaagcgtgactaataggtaaagtatctgacaaaatgggccccacaggccatggttgctgcttctggctgtccctgctgagagcaggtgtaacgtacctggcatcactcctgccccagagacaccgataacacatgtttgtcagctgtaggtcagttccccaagggtggctgctgtgctactgtaacacgggactgcagactgggcacttaaactacagaactctgttttctcacggtctggaggccagaagtccaaggtgttggcagggttgggtgttggcagggttgggtgttggcagggttgtttcctccagaggcccctctcctagaattgcagatggctgtcattttgctgtgccttcacacggtttcccctgtgtgtctgtgtcctcatctcctcttcttataaggacaccagtcatattggattagggcccaccctggtgacctcattttaacctaatgacctctttaaagactgtgtttccaagtacagtcccattctgagggacctggggttaggactttaacatgggaatttgggggaagcacagttgaggccatagcagcagctgtctcattctgctcacagctggttctctctggccacgtgccagagaggagtacgatgccatccccttaaaccacacacggacatgctgccaggaggaacgtcatcacctttcagctgaaaggagtgaggaatgaggacaagcaggtgcagaacacagccttctcacgtactggtccattctgcacgtgcgctgctgctgttacagcggcagacgggaggctgaactagagacacctaagacaaaccctgctttcccctccagatgctggctgcaagaacgccacagtttgagaggagtgtggacaatagaaagccttgagagcagctgagctgacgaagggatgggaaaatgggcccttttgaagcctaggaatgaccaagtggagatgtgcagggtttgggggtgccccagcttgagtctcagtgctctgagggacatagcgcagagtgggacagcccggtgggtcaacccctgcctggttctgcagacttggagaggtgggacttctgccccaggccgcatggagggccggccctgggctgggtgtgcctcacgctgcctgggagcctcaggcaacctgctgcagctgcttgttttgccactcactggcctgactgcgggagctggaggggctgggaggtcattccctactccacagcttagctcaacctcccaggtgccccgcacccccatccctcccttcccataaaaccagttattcctcatcctcataagcgctcctaggacacttgccatgttctatcagtttgggggttctctggggcagccatccacagatccatgccccgcctatgagccatctcccctctccttctcacccccgtgctccccgtgtggtgtcggcccccgaggcaaggaccgtatgggttttgttcactgcccacactccctctgacacacaggaagttctggaaaagcttccgcatggtgaaggagccacatgcggtttggtcgggtgccccaggcctcctcttgatcatcacgaccaccctgccatccctgttattcggggggagtccagagctccaggaagttgaccacctccccaaggtcccccgagcaggggtgggtggaactggctctgagcccacactcaatgcctttcccctgtgccccggagcctggcttggtgccacccaggacttgtttgtggaagtgacatgtgaacacctagcgagctccatgggctctgcgtgtgtacgtctttgctgactcagtggccccacacagcaacccgagggccagggcagaaagcacaggaggagccaccacgggtgctgcagggcctcaggctgggcatccatcctctacctgtccttctgccgtccatctgtgggttctccctcaggtgccacgcaaggctggtccttcacaatggcccaggccctcaaactcagtggtcaggagggttcccaccacctcagggcttagcggcagtcaaggtaacctcaggtcctcaggctacctttgcaaataggtccttgcaaagaccctaattcacattcacagatactgggagttaggacttcaacatcttttaggcgggccatgattcaacccatgcatctgggcctaggaagtggaactgccccagtgagcgatgccctgggcactgtgcagttctgggggacacagccctgacagccggaggggggctttctgggcacagagctgtctgggatccgccaaggcaacacaggaaggagtccagagctcacctgggtgagacccgagagctgtcagtgacagcagaatccagagggagcccacatctccaagccaggtccagagctcttccaacaggatagcagtcttgtcaggcactctgggaggccaaagtgggaggatcactttggggccaggagttcgagcaacctgggcaacatagcaagatccctatctctacaaacaaaccaaaaacctcagtagcatctttgttgttttttctcttctgtcaggtattttggtagtagtgatcttctgattttacattccctttttttttttttccatgtagaaatctctatggccatttcctcttgtgaattaattgagtttctaaagtgaactagctgcatgttagaaccaggacttttttgagccctttagagcatgctggcaggcgtcatccccaagccccagggtgggtcatatttctggatgatggaggcagggggtgcaggggtcccctatctgcacattgttctgagtctgatgtgattcctcaactcctccatgaaacaggggccatgcttgtcctcgtctggggcaaactgcagttggagaggctggcctcctgtggctgcatatccagagctgggcttaactggccaggaggagagaagaatcctctctcttaataaaaagtccccaggggctgggcacagtggctcacacctgtaatcccagcacattgggaggctgaggcaggtggatcacctgaagtcaggagttcgagaccaggttggccaacatggtgaaaccccatctctactaaaaatacaaaaattagctgggcatggtggtgcatacctgtaattccagctacttgggaggctgaggcacaagaatcgcttgaacccaggaggcggaggttgcagtgagctgagatcgctccattgcactccaacctgggtgacaagagcgaaactccctctcaaaaaaaaacaaaaaaaaaagtccccagggcccatgtccacccagccgtctctctccctcccggccaatgttattctttcctcataagcccttccagagcacaaacacacaagcacgtatgtttgtcttcttttctcataaatggtaacaagctctgcttgctgttgtgcagcttctcttttcacataaaaatacaccttgaagattatttcttatgagtacgtaagatgggcacctgagtagtttgctgttacagaccacgtaggcaatggccacctgcacagattatttgcacaggtgggagtatcattagatgtttctggaagtgggatggctgggtcaaggtgaatgtgtgtttggaattttgaaagataaagtcataaagataagtaaaaacacctggcatcttggctcacggctgtagtcccaacacattgggaggtcaaggtgggaggactgcttgaagctaggagcttgagactggcctgggcaaaatagtgaggccctgtttctacaaaaaaaaaaaaaattaactgggtgtggtggtgtgtgcccatagtctcagctactcaggagactgaggtgggaggatcacttgagcaccggaggtcaaggcttcagtgagtcatgatcacacactgcagcctgggtgacagagtgagagcctgtctcaaaaaataaataaataaaaaatagatagatagattgattgattgatatagagaggataagtaaaaacaaaaacatgtatgtactataaaacctgggatgggctgggcgtggtggcttatgcctatactcctaacactttgagaggccaaggcaggcgaatcacttgaggtcaggagtttgagaccaacctggccaacatagtgtgaaaccctgtctctactaaaaatacataaataaataaataaataaatagccaggtgtggtggtgcatgcctataatcctagctactcaggaggctgagttgggaggattgcttgaacccaggaggtggaggttgcagtgagccgagatcacaccactgcacactcctcataagtgcctggaagggcaacacagtgagactccatctcaaaaaaaaaaaaaaaaaaaaaaaaacaaccctgggatagaggcagagaagaaaggaagtggtgggcagtgtgggtggtctgtcttacctttcataatggagagctggtgcctactgtttagaattcacaaacacagagttcaaagtggttgccactgtggctagggtaggagacatctttttatttctcattcttccatgtacttcaaaaattatcacgccctgtatatcagttaactgttaatgtaagaaaataacatgaggtggtgcagtggcagccgtgtgaatgccggttgatcagtcttgcattcaggacttgtggagaaccgccctgggggatggttttgagcagagcagttcctcgttcccacaggtgcctcatttttccctggttccattcagaacatcatttactgcctagagctaattccagatcctcctcccacccggggcagtttatcaaaggcaaaataaagagggtgggccggggacagtggctcacacctgtaatcccagcaccttgggaggccgaggcaggtggatcacctgaggtctggagttcgagaccagcctggccaacatggtgaaaccctgtctctactaaaaatacaaaaaattagctgggcgcggtggtgcatgcctgtaatcccagctactcaggaggctgaggcaggagaattgcttgaacctgggaggcggaggttacagtgagctgtgatcctgctactgcactgcagcctgggcgacaagagcaaaactccatctcaaaagaaacaaacaaataaacaaataaagaaggtgggtgggggtgactccctgaaagtttctagacgcctcttctaaagataaaaacataatgtgatgcctgaaagagggaagaactgccccaaagagtctgggatgtggctgaggtggccactttgccaggagctgatgagggggatgaaagtaagaactgattttaatcttcgcctctcgtacaacccctggtgggcaccggatgatgccctgttccactgattttaagttgcattttcccccccgcatttccacattctccaagtgagaacgtgtcccgcagtgtgagggtgagctgtcgtgatataattagagtctcttggccttcttggtggtccataagatagcggcatgccttccgatgggggacccgggagttgctgagtcgcagcgcttgcacagcgatgggcttatttggtctctccggcacatggctcagccctgctccgtggccgtgggtggcgtccccggctgaccccctgtcttgcaggtgtagtcgccgccgccagccgccatgggcaaacagaacagcaagctgcggcccgaggtgctgcaggacctgcgggagaacacggagttcaccgaccacgagctgcaggagtggtacaagggcttcctcaaggactgccccaccggccacctgaccgtggacgagttcaagaagatctacgccaacttcttcccctacggcgacgcttccaagttcgccgagcacgtcttccgcaccttcgacaccaacggcgacggcaccatcgacttccgggagttcatcattgcgctgagcgtgacctcgcggggcaagctggagcagaagctcaagtgggccttcagcatgtacgacctggacggcaacggctacatcagccgcagcgagatgctggagatcgtgcaggtaccggcgcccgaggccccgggtctcaccgcgggcccaggtcccctcccagctcccagcccccagcccagggcttttttttttttttttttttttaagacaggaatcttgctctagtgactggagtgcagtggcactatctcagctcactgcaacctctgcctcctgggctcaggtgatttttccgcttcagcctcttgagcacctccatgccctgttaatttttttggtatttttgatggtagagagagggttttgccacattatccaggctggtcttgaactcctaggctcaagcgatctgcccgcctcagcctcccagagtgctagaatgacaggtgtgagccaccgtgcctggcctccctgtgttctttatgttcactcgacattgggtctttcttggccaggttgctacctggtgcactttggaaagtgagcagttgtcacctgattgggcagacccttgcaaagggcaatggtaaaagccaatgtttattgatcacttgctatacatcagggccgggtggagcactttgatccgttttcatcttcataacccaacaacgtgggtcattctctgcattttacaaagtctgagactcaaatagatgaatttctaaaaattatattttatatatatttggagatggagtctcactttgtcgcccaggctggagtgcagtggcatgatctcggctcactgcaacctccacctcctgggttcaagagattctcctgtctcagcctcccatgtagctgggattacaggtatgtgccaccgcagccagctaatttttgtatttttagtagagacgaggtttcaccatgttggccaggctagtcttaaactcctcacctcagttgatctgccttcagcctcccaaagtgctaggattacaggcatgggccaccgtgcctggccaagaattgtatgattgctgggctccttggcacttgcaagaggtacctgccaagacctggggaaagccctggatttgagaactcaacagatagcttgtgatgtccccaggaatgcgcagtcatcaagtaaaactgaagcattaacgatcacgagaatcagctcagcacgggaaagacgtcactttaggaggcatctcttcaccttcatgcctatcaacagctctagcagaaaggccatgtttcagaaggaaaccaagttttgttcacttggccaggtgcctaggtatgcgagagagagtagagagcagagctgcccctccctggcattcccctgagtgcctccctgagcccaggagcatccaattctagaactcatggccaggcctgtaatcccaacactttgggtggccgaggctggaggatcgcgtgagcccgggagtttgagaccagcctgggcaatatagtgagactccatctctataaaaaattaaaagagtagcagggcatagtggcatgcacctgtagtcccagctacttgggaggctgagatgggaggattgcttgagcccaggagttcaaggtgacagtgagctgtgattgcactgctgcattccagcctgggtgacagagtgagaccctgcctccaaaaagaccaaaagcaaaataagaaaaaaatggaactcttcagaaggggtggtcccatggtagggaacttcaggggtgggcctccagtagcgggtatcaaatccgtgaacttctgcagcagcagtggcccgcctcaggaatgagcgacccatttcccacgtagatggttttcacactgtcagagtaaattaacatgggctcggggaactctggtactgtcgtcactttctggctcttagcttcatgcagtggcggaagtaagaattctattccccaggaatcacccgtcctgtcctgtgtgttaacccttaccctttgcaaataggtgtgcctgtcactggccgtgcagaggcttggtcagaacatcaaggcactggtagaactgttccaagcagtgaggagcagccacttctgtccaaacgggacagcccccaaaccaagtccccaaaccctgaaagccttcccccgacgccatcgatggctccctggccggctgggtggtgtttctcatgggacacttggttgctacctctttctcacaatgagaaaatggtctgttgtcaggaatgagaatatcaagccaccttcacgtggagtgctcagaaaatcccacagcagtgccaccactccccacgcatgtcactctgctcagtggccactcaccagtcccatcaccgtctcctctgtacacccaccagcagcacagagtcacatgccccaggctgggccactcaggcagagacacgcagagagaccagtggctagactgagccctcggctgacagtgccctaaacaggccatggagaccccagtgctgctgcttcctgtcctgtcggggctggtgatggggcttgccctgtgagtttcagggactcagtctcttttaaactgaggggtaacagccatggagtaaaatgcacacagctcagcaggcagtgtggggaatttcacacatctgtgaccaccactctccctcagcattcccagcccccgacagggacacttaggcaccttcctggcactacccacccccaggcagagataccagcaccctcaccaccctcccagtagaacccttctgccagctctgctcttgaacttcacatagacacccgtgaggttcactagggaacattctccccactggggaagggtcccgaaggccaccgggagcccctgacctctccgagccttgttgtgggctgggcggaagcccacccttgctgcacccgcccaagcccccgggcctctgagcacagtgtcattgcccccatccgcaggccatctacaagatggtgtcgtctgtgatgaagatgccggaggatgagtccaccccggagaagcgcacagacaagatcttcaggcagatggacaccaacaatgacggtagtgcggggtgggggcggggctgcatgtgtacgccacggtaggggcaaaaccatgtggtttggggcaccccctcccctctgcagcttcttggtctcctgagggccacccccgcccgccacctgcctggcgcctgccatgcccagggaagagcgggatgcagtcagggacacccgtgctgtatcctggctcctctgtgcagctttgtgatgctgggcatgttgtggcctctctgagccactgtctccccacttatagaatcgggcatacccatattcccgtgggtacaatgtttaggggcagggaggcaagcatgctggtggccctgaacctggaggggttgagatcaaaggatcccagatgttggggtcctggggtgctggccatgcctctcttgctgccatcctgagagaagaagctgcccagatggccccagtgtccaaggggaactgtcaggatgtacgctgccaccttgtccacctacagcagctctgtggagactcagccccactgcagaagtgcaagtctcacgatggtgggtggcagcagtggtgacagggctgtgcctcgagtgccctcctctgcattggctgtgaggtgagggcggctgtgcggccctcccattctgctcttcttgccggctttgtcaagagcagccacagcaccaggtttgctttgcttttgagcaataaagaaacacgaccttaagaagagaaaatacaggctgggcgcagtggctcacgcctgtaatcccagcactttgggaggccgaggtgggcagatcacgaggtcaggagatcgagaccatcctggctaacacggtgaaaccccgtctctgctaaaaatacaaaaaaattagccaggcgtggtggcgggcgcctgtagtcccagctactcgggaggctgaggcaggagaatggtgtgaacccgggaggcagagcttgcagtgagccgagatcgcaccactgcactccagcctgggcgatagagtgagactccatctcaaaaaaataaagaggaaatactccctgggttgtgctggggattaaacgataagctaatgcccaagaagctgctctgcgaagtctggagtgcagccctcgggtgagttaagcatggccccagcgggagacgggatgtgggggagctgtaagcagcaaagagcattccaggcagccaggtcacagtttcaaaacacacacacacagaaaacaaggctgcctggtgcctggcgttgcctttgggctgatgggaaatgtgtgttccaccctccagcctagcagggcacctgctgccgctctcctgaggctgtccgctcctcgtggggatggtgaatccggtcccatggggttgtgaggtttcagcgagatgatgccttaaagcttttagcagggcttgcactccacaaataatggctgttgttcccaacttcacagtgtccctggggaagccacccatggtcactcgctgcccgaatctgcctcctggcttggccctgcccacctcttcagagggcatcttctaggttggttgggaatttggatggcatggtcgttgctaatgtgcctgctgggatggagcacttcctcctgtgagcccaggggacccgcctgtccctggagcttggggcaaggagggaagagtgataccaggaaggtggggctgcagccaggggccagagtcagttcagggagtggtcctcggccctcaaagctcctccggggactgctcaggagtgatggtgccctggagtttgccccaacttccctggccaccctggaaggtgcctggctgctccaggcctctaggctgggctgatgggtttctccaggacacaagtatcattaaagccaccctctcctcagcttgtcaggccgcacatgtgggacaggctgtgctcagcaaccccctcgcctgccctgccctccatcaggaggagccagtggaaccttcggaagctcccagcatctcagcagccctcagagtcgtcctggggcagctctggttctcctgactggaggtccatctgggctggcctgctctctctcggcctgagacaggagggcctggggtcaggaactggaagtggggaggctggggccgtggactctgaggccccacacctagccaaggagatgaccacacagctggctgccctgagtggtcagaggtggagggtggggagccactctctccattggcagaggttcctggggactgtctgctgagggcctggctgtccctccctctccctacccaccccttagcccgggcattgtttgggctctcttggggccagcaggctgcccaggccccagaggcatcaagttcgtgccctggaagaagccagcctgcccaagcctgggccagagtcccatgaggacaggtgtccctgcctgccagtgggctggaggggctgaattcccagcagggccctactgtgcaggggcatcctccgtcctggtgctggtctgagtcctcaaatgcatcctcccaggtgcctttgagatgggtgttcccattatcccaccttcgagacgaagatcctgagacctggaaacgttggtggcttgccatgcgccagagccgagagcccctcctgcatgccttcccctgtgctgggcctggctgcatgcgtctgtgttgcctgcacagacattttgcagggtgccctagtgattccagctgacagcacagagcctcaaacagacacatggaggggctgccccaggaccaggccgccaggacgcagccaacctcaaacctcatccttccccaccagctggagccagagggaccgcctcctgcccttgaggccatgtctgaacgggcagaatccttacagcctatcctgcttgtggactagcagagccagggctatagtgaccacagtgtgagctcattgacagcggttatgggatggggagcggagggtcagaaaacctcaccccacccagctcagccgatcagccttacggagccctgccctaggccacgagcctccagaggccactcagcccagtgtggagtcaccgagtctgtgtcctgggagagggaatatgttgtcaccagcattggatgcggaggatgagggggcagctgattccttagcacgaccaatctttttctaggttttcctctcaccgcatggggccaaaacagtacagagcatgagtttggtaccccaagcctgagcagcgggtctacgctgatgccagggaggatccggaccgtgcttccgggggcccccaaccagcatggccttctcagcctggattctgtatgggttagaggcaaatgcttcatttttctgcacagtgtacacgttccttaataagcgaagtgtggggtgatttctaaaaggatttaaatggccctcatcagccacgtcctgctgagcttgctgggtaagccctttgaggtacctgatgtattgcagggagcagggaaaggaaaaaggattttttttcagaaatgcctgtaaagtgaatggagactagacaccgtccagcttcaagaaggctcaggactttcaacaaagggagcatacctgacctgagagctgtccccatcctctctggaagcataaagaacagtgagcactggctaatcccattgtctctggtcccctgcaggcaaactgtccttggaagaattcatcagaggtgccaagagcgacccctccatcgtccgcctgctgcagtgcgaccccagcagtgccagtcagttctgagcgagcggcccctggacagttgcagagaaacacaggcttgtcgtgccgtttaagctttgcttgcaagagtggatgccccgcaatcgttcctgctctcccgggccccgggcctggggcatgcgttgcacctgcccagcccggtggctgcgcctccctcctccacctgaccaacgcgacattcctcccctcacgcctggcccggtcccttccagggcaactcccagggatgtggtgacatgcagggttcaagtgttcttggttccaggcacctcccggctcacggggagctcagaggtccatgccgaggagaccaggcaggacctcccgaggctgcgccccggccggcccatgcgttttgtgatcccaagtgactctgtgggaagggtggggacgaggcgtcgggagggtatacagggagcccctcccgtgcatggctgcccccccgttcattttctccaccacagccgcttgcacgtatagatactgtggtcccctttcttttaatatataaattatgtatggtgaagtggagtgtattgtgtaggtcccgtatttaatgcctctgactgcctttgaagcgcagccctctgtggcccgcagccccctgagcctggctgttgtgtggtatttatgctctctttgtctgcctgtttctaaggaaatgcatgtgtgccctgagccgtgatgatcctcccatccgtgttgtgagcacaggcatttgtgtctggtctgtcctccctgttgattggtctggcatttccggtattaaaatgataaaataaatggcattttctgagttttgcgtctgcccgcgggagcccccattcctcaggccgtggcccctgcactctccaggcaaggcgggtgtgctgcgtgccaccgctgttggtaaatccggcccctcttacgtccctccagctgtccccgcgtttataaatcttgcacagcctgttcttcaatatctgcctaatgccaagaaatactcgtggaaataaacgatgactgttcttggcagatctgacggtcaggcttctgcctccccccagcccttccctctccttctccttccacggtttcaggtcgtaggaaagccacattccaagagaggacgggcatagccaagggtgcagtcaggctggacccagaggtggcaggcctggttctccatccagccttcgccgctgccgtcagtgcttctggtcccagcagcagaaggcccagctgaagaagtgggggttggttggtctcgcctgccaagggatccaaaggcagcatcgctggggatccccaggcatcagcttgtctttttttttttctttttttaagagagagtgtctctctatgttgcccaggctggcctcaacctcctgggctccagcaatcctttcgcatcagcctcctgagtagctgggacctcgggtgaacagcactgcgcctcctaatcacagtcagcttttcacctcaggcttgtcttcctggggtgcctacaactgctgttgtggttctgggcagtacagctgacatgggagcatcaagaggcagggagagaagcctctgtcctcccactgagggacaggaaaaccctccagaatctgcccaccaccccgtccccaccagccccacatctcatggctgaaaccatggcctgtgttcacaagatgaccatgtcatggccacggctggcttacgctggtcaagatggcccttggccaaggtggcatctgcctcccccagagggcatagggttgggaaggggtgagtggaatggaggttctattaccaggacgggcactacggcgtctgcccacctgcctgctgctgtcggctcctctgtgcctcagtgtcttcactgtaggggatggggggagctgggtggctcaaggtcacatatgcaaagcgcatggcttggaacctgcctcccagcaggccttcagcaacagcagctaatttgttgattttagtcattttaatattttttaagactccatgtctcttttaatagaaatggtgagtctgtttgccaagtgccttctgagtcaatggcactgctagagctatttcatagtaaaactctccatgcacccagagccaccaagccttgatgggggaaccaggtggggtgcgagatggaggccaggtgccctgggcagatctagcttgctacaaagaggcaagacggtgcctttggcaacactgcctcacctggaagaacagccagtgaacggcttgaattttataaacatttaactgggactggcaaaggttaaatcaagagtgcttgttgtggggagggctcacttatgatggggacagagtccaacagaaacagatgggagtgaccactacattagtcagggttctccaggaacagaactgataggagacatgcatggatgggaggggtgggtggatggatgggtgggtgggtgggtggatggatggatggatggatgtatggatgagtgggtgaggggatgggtgggtgaatggatgggtgggtggatgcatagacaggtggatgcatggatgggtggatggatggctgggtggatgggttggtgaatgggtgggtcggtgggtggatcgataggtggatgggtgggtcgatggatgggtcggtgggtagatggatggatgggagtatgggtggatgggtgggtgggtggatgggtccctaggtggatcggttgatggatgaatgggtggctggatggatggatggatgggtggatggatggttgggtgggtgggtggatggatggatgggtggatgggtgggtgaatggttgggtgggtgggtggatgcatgcatgggtgggtgggtgggtgggtggatggatggatggatggatgggtgaatggttgggtgggtgggtagatgcatggatgggttggtgggtgggtggctggatggatgggtggatgggtgggcaggtgggtggatgtatgtatgtatggatgggtgggtgattggttggatgggagggtggatgcatggatgggtgggcgggtgggtggatggatggatggatggatggatggatggatggatgaatgggtaggcgaatggatggttagatagatgtatttatcataaggaattggcttatacgtgattatggaggctgagaggtcccaaggagacaagcagccctgtcccctgtagacagaggtcagcaagctggggacccaggagagctaatggtgtagttccagtctgaatcttaagggaggaggaggccaatgtcccagctcaagactgtgaggcaaagaacaaattctcaggcttttgtcctattcaggccttcagctgagtggatgaggacccccacattggggagggggatctgctttaccccacctggttcccccattggtcaccagttccaatgtcaaattcatccaaaagcaccctcacaggcacacccaaaataatcggtttgcccaaatgtctgggtaccccctggcccagtcatgttgacacataaaattaaccattataaccacctctgctcagatatggaggaggtagatatggggatcctagtggaccctgccctacaaggagctcacagaagccagtatgatttgtccaggagtccagtgctctctgggaaggcagggaattgaaccccaaagatggtgtccctgtgccaagaagcccagcctatcagaggaggaaagaacccagaagtgaacccaaaactgtcgtccatgccacccacccagcaggaggcctcctcagtctcttcctttgtccgggatcaggatctttcagggcgggttgttagaaagtgtctcggctgggtgcggtggctcacgcctgtaatcacagcactttgggaggccaaagcgggtggatcatgaggtcaggaaatcgagaccattctggctaacacggtgaaaccccgtctctactaaaaatataaaaaattagccgggcatggtggtgggcgcctgtagtcccagctactcaggaggctgaggcaggagaatggcgtaaacccagaagtcggaggttgcagtgagccgagacggtgccactgcactgtagcctgggtgacagagactctgtctcaaaaaaaaaaaaaaaaagaaagaaagtgtctccacctgtccttccctggtaatttgcagtactggccctgggcctgcttcctcttcctccaaccacctccttctgcaagcttctctcttgtcctgccttctccttgccccaggggatcccagaccctttgccatcctgcacgggcactccaagttgttaaagttccttgggagttgcatacaagtgtcccttatcctatagacagatagaagatctaatcatgtacctgcataagcaaggcttatgtgggtggactcaacagaaactctggaaaatggctccggtggctccatggtcccatccaccagctgtcctgacactcactgcatggtgtcccatgctcactgagtaaatacagggtaatgggaacaactcctgagacaggaaaatgtttagactcgaaggaaggaagccctggagtgtggagggaagggtggcagtatgaggtgttagtcccaagacagttcatctagtcaggccacgatgaacccctagtagggcaagactgtcacctcccttactctgaaccttaggccttaattaatacagccccaggcattttctgcttgggtagactggcctcccgcgtgggaaccagcattgagctagcaaaacattagctcccatttatcaagggtttccacgtacagacactgtttaaaactttaaacgtctaatttaaccctcccatcaaccctgcaatgtggtatcactaccacattatacagattgataatgctggtttaagagaagttaagtaactagcctgaaatccttagcaagaggtggcagaatcaggaattgaaagaaggatcagctcccaagtccgaggtgcgtcttctcccgattccagaaaggtcttccagtagctgggctggagccgggtccatgtttccttgccagcggcctccttcagggcccctggtgtctagagaaatgaaggagtttctccctgggtccctgaacaagacttaaacgcactgtatttgtggcacccaggcctgactccctccccaccccgtgccaggtcacgccctagtggagaagggggcgcgcctccccaccactgcctgaggggcgccctcctgagcgcccgtttctcagggcggggcactggactccgaatggaaccctcccctccttgccgggcttaggcaggtacgtcattagatcttctatctgcctcttgagatcaggggtgcgcatgagcagggacccaaaacgggggtccagttaggatcacagccccccaagaggagacagaacccacaggaccttcaggcttctgagagggacctcgtgggccccggaaaaggtatttagaaaaacaggagttcggccttgggttcatccgtggcgtggccttcccccagccgccttgccctgggctgggcgccgttgggaatcaaacccacacgcctggggagctgccagccagcgggagcctcggccgtcggggaacagactccggcttggggcagcctggcagccctgaaaggaacaagaagaaaatggagctgtggggcaggggcggggctcggctcgagaggcaagtggtcccgcgctagtcccacctgtcaccagccacccagtcctgccgctctgaccccgccactgcggcgcaggggcctggtgcccgctggtcctgggctccggctccgggtcggcagcgatgtatcccggcccagagtggggcggggtagggcagggccaaggtcagtttcctttaagctgggcacgccctctccttggcttggggctcccttactgtggcctgggaagaggtctcagaggagaaggggtgatgctggagacacggtggcgaaggagcactgcggcctgggccccggggggcagctgtttatccagcaaacacctccccagggccagcgcggggcatggcacagcagggcactgccggggcgcaggagctgcgggggcgggtacagcctgcctggggcaggaggctggggagggtgggagggagctcgggaggaggggtgactgaggccagcgggggcgggcggggcggcagcccctggagggcccctggaaggcctcagctcctccggctcttcccagcgggctgtgtgactgtaccatggggccccgacctgaaggggccacctgcctcctgcagttcacgggaaggcagaccctggcccgccctggagccacctgcccacggcctcttccagctgcagccaggccctccgggctcgagcgggctcatccactaggtgtgtgtgtgtgcgtctgtgtgttgtcttgggtgtgtgtgtggctggggcatgtggtcttagtgtgtgctgtggatgtgtgtggtgtgtttgggtgtgtgggaatggtgtggggatggtgtgactttgtgtgtgatgtcgaggtgtgtggtgtgtttgcatgtgtggtggtgtgtgggcatggtgtgaccgtgtgtgcgatgtgtatgtgtgtggtatgtttgcgtgtgtggtggtgtgtggggcatggtgtgactttgtgtgatgtggatgtgtgtggtgtatttgcgtgtgtagtggtgtgtgagggatggtgtgactgtgtgtgtgctgtggatgtgtgtggtatgtttgcgtgtgtggtggtgtgtggggcatggtgtaactatgtgtacatgtgtgtgttgtggatgcatgtgtgtctgtgtgtgtcatggtgtgtggggcatggtgtaactgtgtatgctgtggatgtgtgtggtggtgtgtgctgtgtgtgagtggcattgcgtgtgctgtgaatgtgtgtggtggtgtgtactgtactgtgtgtgtgtgtgtgtgtgtgtgtgtggcattgcgtgtgctgtggtggacccgagtccacaggtgggtggcttctggagtgccacatgaggctgttgagtggcagccctgacagctcattccaggagggccaggtggggtgcctgtctccgtggcctgagaggctgggcctgggctctgggcaccctgctccccttcctggcccacctgggcccacagtggcctccctccacactgagcttccctgcaccaggcctgtcctaggcctccatgtcccctcctccagaggtcgccttcggtgacctcatcaaattactctggtcgtctccaccctgaagccctgcgaggctgctcaggaatgagtggggatgaatgaatgaagggagggtcagcaggtggctctgctctgtcttcacgcagctggaaccgcatgagcttatgccctggacacacactgagacccaggccaagtcccagctccacctcgaatgagccgcctggcactggacaagcgctgtgtcttcatctgtaaaccatgtggtcagggaaccaggggcagagggaggggctgcagggccttgaggggaatggcaagggtcctcaggggcaggacctgacctccaggttcctggggacctccgaaggtgggggccccagggttagggtcaggcaccctggcagggatggcagagcatgggagccatgtgtgcgggtgtcttgtggggtgtgtgtgaggctggggcatgtggtcttagtgtgcgctgtggatgtgtgtggtgtgtttgcatgtgtggtagtgtgtgggggatggggagggcggcacaggcagcctcaggtgggctctgcctctggctcagggacaggtgccaggcaccagccccacaggaggggtggcggggggagatctgccctccgcccactcagcctatcatggggggtggtcaggggaggccgggtggggtcaccagtcgctggtgggcacaggggaggattgggaacacctcagaggggattggggccacttcggggacgggcagggggacaggcaggaccaaggctgcagggccccaccagctgtacacagggctggttctacaacatggggcaggggtgcaggggctgggctgggggcttcacctggggggcctcaggaagtgttttgggggtcaggggagtggtctggtcggggactgggctgcctggtgccccttcctcaaagcccccgggaccctggagtggctgagtcgggagctctggatcgaggccacgctccagtctcacagccctgtggctgtcaagggccccctgcgatagtggagctatcagtgtttgcccagtggtcgagtgatttgactgccttttcctggccccgaccgcgctgccaccgcggggtgctgctgccccctggtgtccatagctaggagggccatccagggcttgggtgtgcgggttccagctgggcctgctttcgagaaaagctttctgtcctgggcggcatttgatgacagaggaggatgctgaggcccagaggagcccctgacttgtggtgggccaaacggcacacaaaagctgaggccaggctcccggtacccaggaccagaggccttattgccagataggaatgccagatacaatacagggcacccagttacacttgaatttcagatcaacgagaagcaattttgcagctgacatatgtcccgtgcagtatcttatctttgtgctaagtctggcaaccctccttgagaagccagggagtggggcctgcacagccctggggcgggtgagaagctggaagggccaggccttctgacaggcacccccagggccaggtgcatgaccctcctggcggaaccacccaggcccagactgaccctcgcccagcagggcaccaggtctcctcccctgcggagccacccccgagctggcccagcctggagacccccgctccccagctcacaagctcacgggcctgagctccacaagtcacctgactgagctccacctaggtaacccctggccagtggcagagcacgcctggtcacagccctctccagcctggagtcagtgctgcatgtggataaaattctccgaactcccaacagcagcaagaattccggaggcgcttccactctgtgccctgcattcgggccttcaccaatcctcccttgtagctgccctgccgtgggtggggggcaccagctcaacccccactcagaaggaggcggccgtggggacccctgtgcctagtgaggcatagggcctgggtctggctagtgcctagtgaggtgtggggcctgggtccagcttcgtctgtccagctccagccgaagctgaagccacagcaggaatgcagggccaggtgccaccgtctgtggtattccggagccatgggtgctcggggctgcctctgccaccctggcagggaataggattggcagagagcaggggccgggaacacgttgcccttggtgagagaaggatgccgcattctagtcatggtcattgttcagcaagagcccaggagcagaagctggctggcgaggcagggccctgaggacacccaggccctccttctaacttacagactcgccttggacgagtcacttggcctctctgggcttcatcccatctgtaaaaaacaagaactgggagaactctgcaaagcctttgcttcacatgacgtcctaccttgaaacccgatgggtgagattgggtgaggcggagaaggcagagccccccacttgcccccctcacccccaggcactgaggcttctcgggaatccctggtggggacagagcccgatttgaaatgggtcgactcttgccttcaggggcagttttccagccgggcccagagatggtgcaaagcaaacccccagatccagcatgggggagggcccatgtcaaagagggtacagggtgacagccagaaaaccccctaagcggaaggggctagccagccacttcgagtcacttaggaaaatctagtaaggagggaacctgcgaagagatgtgtggtcccagtagcagaggtcactgctggggtgtgacgagcacatgacttcacaagacaagccgagtgaggcccgggaaggggcaggccctacccacgagaaagtgcaaagtgggcatcagccagggctcaagagggccgcagggggcacacgtggcttgctctgcccaccggcttctggcctgcccttggttgctgcaggctatctgtgaggggcagtgcctggccctgacactgtcggggagggaggggttgaccacctgctgatgtgccaggaatgttcccatctttggcttctgatgggtctgctgccttcgtcggcctcatgagctgggttggcatgagccagccctcctggaccctgcaaaggtgaggaccaggtcgtgagcaactctaccatgtccccctgagccagtccactgcccaagccaccctccagctgcttaacagcatgttcccagggtagggaaacaccgaatgaatgctggggtcctctgacctggcttgaatgctgcctcactatctgcgtgacttgagttcatctctgagtttatgtcttcacgcgggaaacctattttacaatcctcgtaaagtcagtaatacattccaatatcaaaagcgcagtgtggagccagtccccactctcggcccaggcctctggttcttctgcctagaggcaacctctgttacccgtttcttacaagctcttccagaaatatgccatgcatatgcaagtatgtatgtacacacacagtttgttggggtttgattttgctttttacacacacagtagcatactacacgtgccccttgctttgctatcctcactgaatctagcttggagcttgttccttatcagtactgatgaatctgcttcattccttaaccactgtatatcccgttccattgacaatttcatcagtacctgcttgtgtacaagagattgtttacaaatgatgccacaatgaataattttagaagagtatcatcagagaaattcttagaactgctgggtcaaagataatgtggattattgatattatcaagttccctccaaagagactgttgctctaatttacttttccgcccagtgcttgagcacacctgctcaccccgcgagctggggaactcttgtctttgccaatctgataggtgagaaatagattctcatagttttactgtgtgtttcctttggttgacaaatgtcttcatgttcaaaaagtttactgttggctgggcgtggtggctcatgcttataatccctgcactttgggaggcagagacgggtggatcacttgagaccaggagttcaaggccagcctggccaacatggtgaaaccgtctctactacaaatacaaaaattagcccggtgtggtggcatgcacctgtagtcctagctactcagggggctgaggcagaagaatcgtttgaacccgggagacagaggttacagtgagctgagatggtgccactgcattccagcctgggtgagagtgagactctgcctaccaaaaaaaaaaaaactttactgtgagccaagtttatgccttgcccactttctattgcatagttactttattgatttgttgtttttaatatgaagaaaattagtccttttcacgggcattgtagccgttggtcccttgccttttgactttgtttccagtaggtttatggtctaatctgttatatttaaaactttcatctatctggaatgtattttggagcaggagttggggatacttttatgtcttccagatggttctccagttgctccaacactactccatccccagagtctggggaaagtggtcagggggcaataatgagtatttttaagaagcaccctaagtgattctaatgcactctggctgcctttacctttgcccaatagttcaattcccctgaatcccctctcccgggggccagcacgccaggaagaaattcacaagtggtcttggtggagctgtattcacttcaagtcacgagtctagaaatgcccagtatctgtgcacgaccagacagcaccatctttaaaaatgacgtggagatacccaaatgcaaagcaggacttaagcctcctggaggacggtgcctggtgtcgacacagccccggctaccgtctggctgtcctcgttctctggtctctcctgccaaattcgcctgcctgctcccatgtacaagggccaaggaagatcacttgatcaagcctggccacatcatttcacagacccaagtctggctttgttggggcctgtaagtggctacgccaagctgtggtcagaagcgaggtttcaggggccactcacgtgtagcacgggattacctgcggctgtttctgtccccactggcactactgaccgttgttggattacattttccctaactggctgaaagagcattgtttccaaagccttagttgattttgagtggaataccccccttttcagtccaagctcaccactgccactaagcgatctcgggaatttcttcctttttaagatggaagacctaatttaccaagattctaggcttggtgtctagctcaaatttcttggcacacagtacatactcagtgccaactctcttaacatagtgggtcccggatcccagggaactgcccttgttggggagctcagagttacccaaacacaccagcatcctacttctcaggctcccggaaggtagggctgtggactacagcactccttcccgccctccccctccagtcagaaccaacctctggctcctgaaaaaatctttcatgttttggcaaccctggcccagggagaccagagttggtgataagccaagccctgagctaactcggcagccacatgagggctcctggcttctctggactcagggttcaggggaaggtgatgcttttgagaaaggaagtcactctcttcagctttggtaaatgggtgacagcatcggcttgaccttcccaccccgggaggagccacagccttcctccctacacatttgctctcttcctgtccccctcatgaggctggtggggactccaagatgctcccactgcctggtggctctgacgtgtccttccctcctcctgcagctccagcgttacccgtaagacattgccacaatgggggttaaggagcatgagagcctgccacactttgggggagagcgggggtacacgttgagtaaaagaacacacaaggccagtggtcatggtcagacaagatggtgaagatacacaacatggtagggacttgctgttgctgaatttattaaaataagctgactgccaaatgtggtaccgtatacattcctaacttctcacaggcatgaaggtgggaggggacacggatggtctctgcaggccaggctcaaagggcctcccacaccttccctgggcactggcctggacaggacaggtccgtcagacttaagtaggtcccaccaccagaggctctggacaaggagtttgcagccaactctggacatgtggggtgggctgagcagatgtgcaccgtccacatgggaggatggggcttccgtctcacctgtcctcctacctgtgtgtgggtggacccactcattgttctctgagaatcagagcgagctatacgggattcgtgaactgtctggaatgaacacaccataaaaacgtcccaatgcctaattatttcaagatactttattttaaaaacaggtcacaacactaagcttttggcccattctgccattgtacaagctacaaatgcttgttcagcagctgaggggcactcttgagtagcgtgtctgaagagtgaataaaaatccatataaaacaaatattcaaatagtttccataggaacacagataagtgtgacccatatcctagtcttccatatggctgcatcatggcgaccctactcttacaaagacatttcaaaactagcagtaattaagttacatggtccccccaaatcccttaattcaagctaaacttgcagttaacagctaccagagtgctatctacacattaatactagccgaagcacaggctgctctgtggcgtttcatcccactctcccaggcacaagacacaggcagggtgctggcatcctgttcctctacttcgggtgggaagtcggggttctggaattgctgcatgagttgcctgagaaagaaaaagtggcatattaaaaaccctgactcactcctaactgggcatgagagtatttacttcccatcaggaaacaattcaatgtattttttttttttctgagacagggtctttctctgttactcaggctggaatacaatggtgctatcatagctcaccgcagcctcaacctcccaggctcaagcaaacctctcaccttagccaagcagctgggactacaggcgcccactaccatggccaactaattttttaattttttgtagagacagggtctcactatgttgcccaggctcgaactcctgggctcaagtgatccttctgccttggcctcccaatgtgttgtgatttcaggtgtgagccagcacacctggccaattcaatgtatttctaaagcaagcgtttcttcagtcaccgttttggtaataaggaaaccacaagacacatggcatgaacttaaatatattccaattacatagaaatacactcatcagtcttttctaaaacttttcttaggaaaaatatccatatatatttaatcttaggcaagacaatttcttattcgtctagacaagaagcacacatccaagaaggtgcctattcttggcagcaccatcaacatgcatggcttacttaccacgcaggccctgacatcacatagtagatcgtcggcctctggaagccattgaacgtagaggcagcagcaacagtgtaagcgcccatgttttcaaagagcatccaatcacccacatgcatttcaggcaggtcacagcgctcaacaatccgatcgaggccatcacatgttggtccccatatgctggatgaataatacttctcatctggtttaggtctctatataaagagacggagagaggaagtactacttaattacacgtgttgtgaccagtcctcttaattgttttatacagtatgctcagaaattaccttttgcagaaggggctttacatgtgcgtggtcatagagtatgcaattaaatgatccatagacgccatcattcacataatacataaaggtctgctcactcgactcatcttcgtctagaaaggcagatcaacaatcttaatgactttttgcatcagctttcagttatacatgaagtgattcgtcctttatacataccatcagagcccgtctgttcctttaatacaattttcttggcaatgatattaactgcaagcgtgaaagctgatgcaacatagtatctgccgggctcagctatgattctcactccagagtctgacggaaagtatttgtccaacgctgggttgattacgccggtgatctaagagagtgaaacagaaaagaaagagcagccttcattgtgggaaattcacatgggggagtaacatcacagggccttgtgacatgacatcatgagaccaggcatcaacagacaggtttatcattaaagtaacaaaagcaaaaaaacatcaacatctccctgaaaaccaggctacatatcccaggtggctcgttttcattcccctccaggcaccctatctcctttaggatgttatgggtatgatttttatcaaagaacagtacgcaactaactactacctaggaaggcatcaagatgtcaaaacattttaacaaatacatgccaacaggataaaaatcctattctgcctacgtcatgattttaacaaaccatgtggatatattttataaattcaagcaccaatataatggcttaacttcctaagtgactaaacatttcaagtattttaaggagaggaagcataggtctagcaaagcacatttggggtgatgatgtgctacagtcagcatattctctaggaagcccacagcaacatgctttttcttttttttttttgagacagggtctcactctgtagcccaggctgagtgcagtggcatgatcatggctcactgcagcctcaacctcctgggctcaagtgatcctcccacctcagccttccaagtagctgggattacaggtgcccgccaccacaccaggctaattttaaaattttttttgtagagatggggtctcactgtgttgcccaggctggtctcaaactcctgggctcaagtgatcctaccaccttggcctccccaagtgctggattacaggtgtgagccatgatttccaatgtaaccaattatccaagacttctgggaaagctgattcacactttagaaaaccaaatggtatcaagtgtaatgtcagacagcacaaagaaatcactcaaaatatcacaccaagacacttcagcccattgtggtattagttaagacacttaaattttgaaatattccaaaaaggaatttattagaacggctactgagtattacagttttgttctaaattacctcttcaaatttaagtttcacatcctcagatccaggaaagccaccgccaatatcaagcagatacatgctgaaaccaacctcagcctagaatcaagaaaataagtcagccagatccacagctaataacaaaaatgtatgcagcagataggctgaaacccatgtaatacagaaccaactgccataaaaagttaactctagaattaagactagttattgtcagttgtgtcccgcccttccctaacagggtcacgtatactcacccccatgtcaaaaacacagcgggcatcagagattgcctgcacgaaggtctcaggatcggtacagccgcttcctacatggaagctggggtaaaataaagagacgagacactgtgtcttagtatttcttaaaataatagcaaacactaggagaaagcctgtaaaactcaaactgttcaatgtcttgacctctagctatcccaccaaaatctcacctgacaccaacaacatcgatatttagctctttcgcccgttccaaaaggagcctgctggttctgagcgtggcaccgaatttcacactgagacgacagactgctttggaatcatcagtggcaatccgcaaaaccaacctacaagcaaggaaagtgcagcaaatgtctcatgatagatgttcacttatagccacaattaaaataaaaacaatcctgttctaaatactgtcgctgatatattctgtagtttgagtcccaggcttcatgactcaatgggggtttcaactactttctactaaagtatagaaatataataatcagaaatttaagtttgtttgataagaatccacatatcttatgctcccgatcttgccctcagatgggggaataactcactttgctttgggatgtgctctggcaactttcatcaactcaacttcactatcaaaagtcatcatctggactccattattagcagcatacttaatttgagatacttgtttacaaggatttgcatagataatcctctctggaggcacccccagactctgcaccaactgtatttcagtctgaaaaagaagagtggtgtcatgctatccatatgtggcttaacacgtggaataaacagaaaagcatgggaagttgtcatgtacccccccgccccatttgcctttagtgagcatttattgcccaaaaaacacaacttgtatctgcctcgtggggaataccaggcccattttatacaacgcttttgaggcctgctgctatcgcttaccttgctagcacagtcaaatcctgtcccggtagcagcaagggtcttcacgatggctttgctatcattacatttgactgcataaaagggggtgacacgagggagagcttttaaccacctcagatgtttctttagaatgtctcccaggtctgccacatagaaggcatccttatcatcctgaaacaagagtggtcacaggtgactcactagcagcctcaccacacaccacaccaatagccagcgaccttcattcccatcagtcacaatgaatcctgctcttttgagtctagccactgatatgagtatcaccattatcactattaatttaccaccagtgaattaatttctacattccataacaagacatgtaagcctcattgctcttccttagaccttgccaaagttttccacttgcctggcactctcagctgcactgccagcatgggcctcatatacttacagaagaagaaacttcattaattttctggtccagaatgtccttggcagtaaaaccttcatcgaggaagtggcagtcaaactcttcattaccaaagttgttcatgatttcttgatgttcctctgaaatgcaacaaaatgcaaatagagtggagaaattcacttagaagccttagcaatacaattcttaagattaacctgcaacataaatgtaaactgaatacttacatggaaaactaagagatggaattgaaagaaatatttccagcttctcacaaaggcaactctccaggaattccaaatccctctgcgtgtgcccttggaacagcagtgacaatctgagaaataaaatagggaatttgctgtctaccttaggaacacatcgagttgaagatggggcactggctgagcacacgcagagctaatcatgccccggatatgaaccactcactggcctggtcatcctaattattactaggcataaggtacatgattccataaaccttggcagtataaggacacaacaaaaaataccaggtttttccaaggcagcacactaagcatttcaaatatttgtaccaaaaaaatctagcatgcaagtttcagaagcttatctgcacttagctcactgatatggaaaaaagtcttataatggtctgatttatttcagagcagtttcagttccttagaaacttaaaatagcattatagacttttttattttttttgagacagagtctcacgctgtcacccaggctggagtgcagcggtgcaatcttggctcactgcaacctctgcctcccgggttcaagcgattctcctgcctcagcctccccagcagctgggattacaggcgcctgccaccatgcccggctaatttttgtgtttttagtagagacaggatttcaccacgttgtccaggtgggtctcaaactcctgaccccaggtgatccacccgcctcggtcttccaaagtgctgggattacattatagcctttatacacagccatacaaacatttcctacttccactaagtcttagaatgatttttactgaccaacaggcatcatggaaatgtctggagcatttgagattttacgagttaattttcatgtattagctgggtatatacttcttaaaaactgtaatcttcaagtcaacttatcacattgtattacagttgctgttacctgatcagaattcagtattttttttttttttttttgagacagagttttactcttgttgcccaggctggagtgcaatggcatgatctcggctcacctcaacctccgcctcctgggttcaagcgattctcctgcctcagtctcccgagtagctgggattaccggcatgtgccaccacacccggggcctggctaattttatatttttagtggagatggcgtttctccatgttagtcaggctggtctccaactcccgacctcaggtgatccgcctgcctcagcctcccaaagtgttgggattacaggcgtgagccaccacgcccggctagaactcagtattcttaaaccagcgttgcctaccaagtttagcaattccgggaatgccaactgtccttacagtcactctcgtatttgcttagctatgagaataatttggggctaacttcaccaaaaaagaaaaacaagcaagaacatcactctagtaacaataaaagccactgtattttgctttcatcaaatgtggcaccttgtgaaccagctttcttaaaattatttattttaacctttaaaaatttctgccaggtagagctttcttcttttccactgtgcaacccacttcagtgccagcagcctacgggcacagaggccaggcaatggttcggggacacagtttgctctggcatggggtactatgacaggcccagggtgacgggcctgtcataaatccaaacccatgcatagaatttgctttaaagctctatctattgtgactgcttggcattgtcaacctccgaagttgcctaaatcacccctcggagaagggaagagagtaacaacgctagcaaaaccatttttgttacagacatggttatatatttttgtttatatgaagaatatttacaatttaataataaataggctcatgcagtctcggactgggtcatttgaggccttattaaatatttttaaggcaatgttcaggcctaaacttggaaagttttgatttctttttaatacgccaatacttttttgcttttctgtatcttttaaggcgttacttaagtaacttacttgaatatattttactgaagaacacctttcggtctttctgtaacagctaagttatttaaaatggtcaatcaattagcacaagaggataatgttagaagagataggggctaattcaaacaaactttgaaaaaaatttcacaaatcaattaaagtctgcccaattttatgtttaaacaaagtcagccaacacattctttgtcctccccagacattcctgagaggttctgccttctacactttcaccaattatttcgacttcgcaaacagcacaatcagccttttctgcaaaccttagggctgtctcccctgtgtatgtccgttcatctaagccaagcttttccgaaatcaccgagtcattcacagtccttaaataaacacctctaagtcatggccgagcatctaatatcacagctactacagcaagactatcttag

SEQ ID NO: 5630 - DNA, 351819 bp, Homo sapiens
  LOC391353 gene - 16284352 - 16611369 of chr2; NCBI Entrez Gene ID: 391353; Build 35; sequence includes 20,000 bases upstream of initiation codon and 20,000 bases downstream of termination codon of the gene
aagttccggggacttctacttagccctctctaccattatcatcctcattccttgggttagagagtcaatgtgaagattctgccagttgccaaacatatctattccaactgtatattcaagaaagggaaataaccacagggtggatcctggaccaattatgcccactaagagttagagttaagctaagaccctacctatcacctgtccatcataagtgccctttttgactggtgggacacagtgtctattagggtccccaggaattaacatcaattcagaacaaacacctaataattgcaaaatgtctgagtatttctacttcacaaatgcacattcactcctgtaaatggccacattccctttcagaaatacttggaggaatatttatggtatgtactcgaagaaatggttcagagtcttttctcaaggagacctgatctcatttcaatccatagtttctggggctatgatttgacttaactctggaaagagtcctagaatgcccactttggtgatgaaagtcaagttttctctctctctctcttttcaatcagacataataggatatttcctcttacacatttagcaatagttcatgtcctactagatctttgtcatatgaaagatctctgtggcccaaatcaatccaagccctgatacttccctggtgcccttcatgatagaggctcccactttgtccttagcaggtaagtgcagtcatttggcctctttttctacaacagtcttgcgtcttcattcaaataaagaaacacatcgtaatggtggcatcccctctgttcatgactgatctgtaaatgacaggaaccaccatttttcaaggataaatgtgcttcccttagtaatgcatttgtcaatgtcttagtgaaggaattatactcccagcctcctcatggaacatagttgggaaatggtgtgcaggttacacgtaataagttcagtcacaatatctccccaacaatacagggaaactatgtaattttatccccttaaatgtagcccaggagtcagcaaactttttctgaagagtcacatagtaaatctctcaggcttaaaggccacgtgatctctgtcacaattactcaactcttgttgcagcatgaaaacagccatagacaatactcaaatgatgaagtatctctgtgtccatgtttcaataaaactttatttatgaaatcagggagctggcccacagactgaagtttatcaacccctaatataggccactattgagaccaagtttcagtcaaccaaccaagtaagcttttaaagccccctctggatgcatgagcaaacatgttatctggaatatctagtaataaaaaacttgaccctgtctattcttatattctatcctccttaatctaacacccataaaatccacttcttttccctctggtttctgccaacatttatttgcacaatttcaatccttttttgtgtaagctattcctacatggacatagagagatatggctccagctatgagtctaatggcaacaaagtgtagttgtggtgggttttgaagagattgattacccagcaacactgggtaagtttataataaggtttatcaaggaaaggaaggctagtctactaagacactccaaggccaactaatctcaatgtcaagggaaactcagagaaatttggaagttcagtgttactggtttcatcggggtccaacgagaacgagatgttctcatttcaagttttagtatcctaacctttcccaataagtgtccttttacatgagaaacttgtaaagactctgaatccaactgtcattataattcagcaactagcacaacaaattttgtgtcagattttagcaatatcagccctttggctacaagaagtaagagcatattttagggctaccttgaaagctccttgattcccaatctgtgacttgagctgagagtcaaaggaccagaacttgtcattttctttctgtggttgcttgaactcatttagaagaatccatcccacaccacagtctctagagtccttgtgactgccacagcaatcaagtgcagtagccactagagctcccaaggcatgtcctcagtgggcatttcatcacattcagccacaggtgacagctctatcaatcatgataccattacatgccatggattaccatctcacttcctattgcaaaaataaaaagcatagcactacactcaaggttaaaaataaaacaaaccaatcgccaaatcccatctttgtgtctatcttcttagacaactactaacagcaattctgtatcagtcagggtccagtcaggaaatagaaaccatagagttattcgaacagagaaagtttcacataagggatttttagctataacagttgcagttaacctgtaaaggagtaaaaaatacttgaaaggattccttaagattgatggagaacatttaaaaaagaagcaaacatggaaggaagggtctcttccccaaggttggactcccttcattgggaaggtggggtttgcactctgctggatggccaggaatttccctaagtcaccccacgttggagctagtccacagatactggactgaggctgatgatcagggaaccatggctgaacacggcagaaaaaaaaaatacccgcctcagatacaggtaggctgacacaggtggccagagactcacagaacgaactggaaagcaagaaatgcacctctggggtgcatgtgggccaaagctggcaggcagttagttacacacactatgactggtaagctggaaacccgtcacagtgcaggcaaggctggggagttagccctgagtgcccataagaatcactggggatctgccacaggggtaccactgaagattaatagaatatggtccacagggatgccaccaaaacttgatggggctgcgcaccagtggctgtcccccaaatgccacgctccaagtgtataccagaatccagaatccggaagagaaggccccctcctgacatgttcctgcagcgccctctactgaaggagctaaatattgcacaaagtggcaaggcggacacgtttacagggtccctctccattatcacagagcaagcaatgaaaggtggatgcgaaactataaaacagtaaattgctatttgcacaacagcattaattattatgatagtaacgaacgttctacgttttgtcatatcgcctgtacattttttattaccttatttaattcctccaattattaacttcatttaaaggatggggaaattgagggtcaaaggtgtttactaattcagagtcccacacctggtaaacacagttagagttcaaatgagatttttggatgtaacatgaatttttcctactgaactcgctgcctttcattggggggactagaaggaatagagaatacattgattttccgtagacaaatattaaacacccacttcaagccaggcaccaagtcaggtattgagatgcagagtagatgaaagagacgcggtctctgctctcctggagcttacagtctagggcaggatcagcaaactttatcgtcaaataggcgggcggatcacctgaggttaggagtttgagacaagccaggagtttgagacgtggtgaaactccgtctttaacaaaaaatacaaaaattagccaggtgtggtggcattcatctgtaatcccagctactggggaggctgaacaggaaaatcgcttgaacttgggaggcggaggctgcagtgagccgagattgcaccactgcactccagtctgggcaacagagtgagactctgtttaaaaaaaaaaaaagataaacatgaatattagtattttagggcttatgaagcaaagaagcaaaactgaggatatgacatagatgcttatatagatatttgaaatataactatttaagatgtaaaaactattcttaactaatgacaatttggtctcgactaagcagtttattgcactaatagtttgttgattgccggtctagacgaagagatagataacgaaataaatacatatgctagcgcagaatgtaagaaaggcacaaacaaaaggaaataattctatgagagaagtaatgagtaattaattgtgactaaggaaggacattagaaccaagacctgaagagtgagttgttagctgggcaaagatggggagttctgggcagaagcaacagtcccaagggaggcaagagcttggtgcattcaagaaggaatcagaacacaacatcaacaacaatcacacacacacacacacacacacacacacgcacaaacacacccacaaagcagtggagctggagtatgcagctaaagggagaagaatgtggagataatgaggaaggtggggcggtaacccagggtccggtgtagggaccagcctggaggtagccatgcctgggaacaatcaaaagtggagggaaaggaggaagacaggaggggagcaagtgcaagagcagaagcctgattcagcagcggggacctcacaacctcccagtggtgcgtgaaatgtcgttacgtgtgtcaaccttcagaggagggcctgcctcttgtgcccccaaccctcaccagcaacattcctttcaggtctggactttgatgcattcaaggagaattcaaaccgtctttctctttcatagtttaatctgttgcccaggccagaaagaaagcacaggaaagcagccaacggcctcccttgtagaagtcagggcaattcacggtcctggagaaggacctggaaacaggagtgagatgaacagggtctctgctctggctcagcctggatctcacctttcacctttgcaactgggttctgatttaattggtcacagagacagaatcatgccatggttaagagcacaggctctagaatcaaacacttaggttcaaatcaagcctctattatcttccgactcacagtttgctcttgtaaattatatccctcatgaatgtccctcatcttgagaatgaaatcattattgtacctaatcggcaggactgctgtgagaagcgtttgggttgcgtgaaggattagaacatttggaaaataagcgctcagtaaatatttgctagaatagctgtttcttcactcagttcttcaataatcacataatacaggcaggagagcaattatcccattttagggataatgtactcaaggcgcaacaagataatggccactgtgtcacagctcatggcagagctagttctcaaactcccatcttcaacactctaaggctcaagtcctccaacactcaagccccggcagtgtccttgggcaagtcactgcagccgtgtgggccttagtttacccaacagtaagacaatgggagtgagaatggacatgatctctacattctctttccattctaaccatccaaacacctacaatccactctggagacatgatcattttcaaactaattctggttgtggtgatatgcttttcctagtttgtcacagggacactaagagacgaggcccagctctctaagcactagcactttcccaggaaaggtctgtgtcagctgtcagcccctgctctgtgtgccataagttctcttgtcatataaaattctccttctgacactgtttccctttagaaagaaagtaaatcataacttttcacttaagcatttctgcttctagtcagacctgctttagcctgaagttgaaaaagagtatgtttggttggatcacatttcaactcagtctaatagatatttgcttaagggggaaaggggttgaagaaaaaagggaaatgtcaaaacggaataataaaatggtctataaacagaagcaggttttctgtgatacgttaccccgataaacccgataatggttcccaaatgcactgtcctgggctgatgccaggctgggcagtggggggctctaggttatttttaattttactgtagccaaaccatgacctcatcctgatggaattctctcccaccaaagagctgtatcgagttatttgtcggccgaaattcatttgaatgtggattcatcggaaacatgtgtggccacagaagcagccaagagggaaatgtgggggaggcaagagtgggattttcaaggaaacccttccttttgtttgaacgaaacatgccagtccttgcagggcctcgggcctttgataatatgggttttgggcctgctgttctctgtgaccgctctgtgccctcagcagccccagatcagatccttgctctcccccagcacaggaaatgcagctgtccccagcacccaccagaggcaggccctgggcagccaccctgtaaaatggatgagagcaggagcctcagccaacacccaacaaactcacagacagtacaggatactggcataaataataacagcaattcctactctatcaagcacctaccgtgtgtatggtggaactgctttgcatacgttagctctgatctttacaacaaagtaggtggtatgatcattctccctttcacagaattaaaaactgaggcttgagatgttaactcaagagtacctggttatttagtggcttaatcaaatttcaaggccaaacctgttttatataaaacttctcctctaacctcaatgcttttacaaacagaagtcttaaagggatttaaagaaaaacaagacacctttagactggcaggtcaaggaaggcttcatacaggagtggtatctgagcaaggtatgaagaacaggcagtagtatttggacaaagcaagatatattccagacagaataaaagtcaggaagtgagaggaggtatcaggaaaatgtgagttgaatactgcaaggagtcaagagcctggtttgactcccaaaggacagaagtagggcgtgaaatgggagatgcctcatgagagtgcagcatggagggcatctgagttttaggtgactggacaggcttgatcagaaggatcatggggagtcactgagaaacattgaaaaggaaagtgccgtgaaccttcctccagcctcagatgaagaaaagatggcgcgggacatcctgggaggggagcgggagaaggaaatggctgagtgggggcagccccacagaatgcagaagaaagctctggaggacttaatgactgattatatgtggggagaaaagtcaggaaaagatccagaatgaatcccaggtctctggtatgagtgggtggagtggagggtcacacactgaaacaggagtgagctgtggacaaaaggagcagatcaagcttttgaacatgtagcttgagttatgttattttctgttgccccagctgccatgtggatggactaaatcatgctcctctttgattcctgaagtctcctagcacaagcctcagcatgtaggatgtgctcagggaaaaacactgaatgatagattggcaccatcaccccattccctgtggcctgatataaatgacccacctaaatagctggattaggccagtctcaacatccagattgtgcagcagcagaagcaccatgtcagccagcagctaaaaccacattctcagtgcaggcagaaccagaggagctgctttctgagattgtcacatggcaatgttttgagtgggaagggatctggcatcggcaaaggactctgcctgttgccatcttctatgcagagatggatccattctaccagtagccatcatagccaaagatttcaaaggaccaggaagaaaagcctgctcagagcagacgcgaagtagaaacatctgtttgagttttcaatcaagctattttccctgcacaaagcaagcttgtaggaaattgattattctatttccttctcagaagtggagactccaatgtcagggagaatggtttcctataagactacgtgtcttggagtactgtaagttgtttctagtgtctttggtgatatatgcacagaagtcttgaaaaacaggattgagtatcttattatgtcccggttggacagaggtctctcattccatgtggctctcctgtcttctgtgtctaatggcagatggagtgtgggttgctcgttgcatatgttctcctttctgagtggccatgtttgcctgtaaaaccctatgtaaaccggagagcaagaacaagtcccaataaggacatatctgttttgaaattttttgtttttaggagtcttgattactgagaagatgtgctccattttaaacttgggtgtctctatttcagaaaagacacaattacaagcctgtgatgtgaagttttccagatgttaattaggtaaggaaagtaatatggtgaacctccaggtatcaatcactcaatttcagtatttgcccattcttgcttcctctataactctccatagactttcacttgctatgtttctccctgaattgtgaattgattgtgtcaggcagcaaggtacagtagagtctcagcagaatcacagggggctccactgctgctaggttagggggccttgatggtaaatgtcatatttatttttgtacccctgggcttacacaggacctagtatgcagttgacactcaaagaatgacatgactgttccgcactaggtgtgtgattttggaaacatcctttaatttcttcagccttggagttctcatttgaaaagtataaacaagaaatctgcctgactgaacagttgtaagcattaaatcagaccatgtatggaaaccgtttagcacgatgctgagtggtagtaagctcagtcatgctattccctcttctttctccattactctttggctgttggagcctaggccttcttcacctgatcttagccaaaaggctgagaagcgatacctaggccttcttaagacataggaattcaaatgagtaggtagaaaggaagataaaaagaaaggcagggttaaagtgatgaggaataaagaaggtggagacaaaagaagaaaagcagagaacaacatgggtttaatagaaggggaacaacaagagaaaaggctcttctagatatcctgaaatccagcttcatgacatatccgtggaagaatgtggcatgtctgaaaacgtctctcttgggtcccttatgtcccctgttaaaagaaagccaaagggcttggcactgtttgtcccccaggaaatgcccctttctcccctcactcacaccccaaccatccagggtccttgtgtccttttctcaattgtcccttcagaacttgctccctagagagcatcagaagaaagctccagatgggagtatgaaggatggtgggctttaaaatggccagggagggaaaggagcatgtgttcccttccttctggtctgtgtgaggtcctgcgtatagaccatcagagtatggggtgatgcaaactatggcagagctcaggttgctgagaggtcgctgcagagggatcaaagtggtcgatgtactcacagtcagagaaagcttctctaggacaatggcagatgttaagctgtgtcttgagtggacaacaaatgtttacccagtagagaaagcattttcagaagaggtaaaagtcctatatttgattagcccataggttaagctgattttttttttacttacatgcacatattctcattggaggataagtatagcattgccccaatatcatggacctcaaattctttttactgtccaccctagctttggatagcccaagatttttgcccccaccctggagactaatcaactgagctttagattctgtcccattgccttactagactacaacttctcaagctccagctccctagctgcctatgactggctattgggaacccctctgtgagacaacccctggatctagagccttcacctggcactttttgccttgggtagaattacctgtgaccttgcaactcattcctctagctttcaagttcttctacggtgagaatcattaatctctgtatcccctgccaccaacacaggctctagtaaaatgttggtgtaaacaaatgtttcttgaatttaaagtaactgaaccttaacccaaggataaaaagtgaaaactgcaacagtcaccagatggtctgcattcttctggcaaacactgccatgtgaagaacacccaaatatgtaagctggcttttgcgtatttcatccagatgttcggcttcaggtagaagcagacgaggaaatccttaatgaacagactagtgtttcttaacatgtctaacttccagacctccctgttgtctcctgtactaaggctgcagctcactcaacattcttaaatgggctgcaaaataaagtgccttgggttagaactgcaagcaacaagtgaagtggagggagagcagaggtacctccaaagccctgcggcaggagtactccaactgtagtgttggaacaaggaggctgtgtggctggaataagatgggcagagagcaggaaactggagagctaggagtggggtctgggccatggcagagccagcagtgccttactggattgggactctgagttccctgagtgaaatggtaagtcactgtagagttttgaacagaggaatgacatagtataaattaccttttcaaaagaacatgctgacttatttgagactagcctgtgaggtggggcaggggaaaagaaggaaaatggggagagcccttaggaagctaccacagtcatccaggtaagaaatgatggcaacttggactggggagatcatggcaggagtagtgaggaatggctgaattctggatgaattttgccttctatttcccaattgtctgtgctctgcctccagacaaatgcccatccaagaatgctgctctatactagaaaccacacagtacaccaacaatgtgcttttattttcaataagtgaacaaacaaacagatgcaccagatccagaatgatctagatgctggttctcagagacacactcccagatatctcactttggctttaccctgcctctttgaaggcccagaagctgaaggaacagaaactgtgaattatgcctccaactgtgatgtgggacaagaagagctgtttccagaaaaaaatatagacatataaagagaactggttgaatttattttctgatgcttttctcactttgtgccagaaacataagcagagggaataaaactgggaattttgatcccctgaatgtaatttaacagagaagtcaatacctgtagggaatgcaggtgacaatgagggacaaagaaggctggctgattgggacagaaaccaccagagggaggaacactattgggaggaaatgaccagattcaggtcctcacagttaagtaggatgaagggtctggtctcagaaagaccactcagatgagcttgcacatcctgggctcctcagagtggtcctctcggcttcccacactctgatgcaacatcaagcactgtctcctcactcagccaacttccagtgcgcagaggcaatttattgtgtgcagggcacaagtggttccatctacattctgatccaaaccgtgcagcactccggtgaggcaggagatatcttcatcttacaaagaaaatagaggccccaagtttggaagcgacatacgaagaattgcttggcaagttaaagagacccagtctgtgagtcacgtttgaacctcctctcttcaaaactatctgggcttcccagcagggccagcatacctcatctctgtgagcagtatgagggaacttggatgggctggggtgagcagcatgtcatgggtaggtccaagcactgagtctcttagccatgggagtagcagtgcctaacaatcattgctccagacagtcccatatcaagaagctggagtgcttgtcctcttgcttccgtttttggagaatatgagctagatccatttaaatgagccattttgatgactgtaaaactccttctagaacaatagcacctaaccttggctgcacatcagaatcacctgggcagtttgaacaaatactgataccccttttatcctgagtttttcatttaatttatccagggcattctagtggagagttaaggtgaaaaaacagtactttagaaagtcttctttcagtgtctatacacatgttgtctatgcaagaattaggacaactaaaatatttaattatacatgtattcagtaatatgtaagctattataaatactattgcaattttaacatccaaaaatataacattttcccccgctgttttggattctcttggtagcataaatttcaaagaacagaattagcttattgaactagcagaattagctgattgaaacgtaagaacaattttaaagttcctgatgcaaattgacaaatggtcctccaaaaatcgtacaccaatttgtgttcccttaattttttaaaaaataggaatgctcatgtccagcttccccatcaccacagcttttcagtcatggaatgggctttcttagggggtagggagcttctcattattggggatgttcatgtgtatctaaagggcgatttgctgaatgtgaactgtatgcagccactccctgagtttgggtgggaaatgcaggacacacagaaagcttggctgcaagatcccgcccctggtcctggctatttactacttcagggagagcctgaatccacaaggctgttttcaggcgattgatgggcaggtctagggtgggaaggaaggtttactatgtaaaatgctcaggagaggctgggacccatcagtgttagggaaatactgctggagtcaatgtgtgagaatgactgtgagcaggacaatgagggtgatgaaatggaaaggaagattgtgagcttcccaaaaggcttccctgggcttacattatctttcagcaaaaaggttcgtccaatatttcaggtggttttaccattggtgttactgacatacatttggagtggggaaacaatttgaaatcattctaaaatgtgttgttcatctctccaaaacaggcagcttgggataatagaaaaagcagggtatacagagtcagacagacctgggtttgaaggctctcccagacagatcccctggactgtgtacaagatgcctgacttttctgagccccagtaaaatgatggtaataatgttctctccatgttcttgggaaaactaacatgctaatttgtatgtaaagcacctaaaaagagacttggcacatagtttataatcaataagagggatccgttattgcattattagttagaacatacttacatccttcactttacgcacaagtaattaaatggtgagaatgatggcgttcgtgatcattataataacagttacaaaagcaacctcctactggggatctactatatgctagacattgccaattgtgtaaatataaccccttctatttatctggcaccttaataatcgtccaagaagttttacctttgtcaaaaaaaggaactaaataaatcttataaagtcagtagagactagatctaaaatgaagaatcaagtggttctgatgatttgtctaagggaataggaaaagtatgttaaatttttttggtaagaaaattgaatcctactctgcaatctctaggtcttgttatttaaaatattgttgtagaaaatgttttgttatgtaattaagataaaccttcaattttatctcatatgtcttatatgtcttataaaatttgtaatatataatatagttatatatcatattaagaaaataaagcttgcctattgctgttttaattccatctttacaatttttagaataagatctgatgtcaaagatactgttggagctcccagcatctctggtttttgggtcttccccctatgctccaggaagtttcattattgactccagattctagcaaattcccagagctcaggcattttacatgtctgtggtagggagagacaaagagcctgtttcccaggccaggttctgtttacacttccttgatcagggataatgatttgtttataggagacattctgtcttcattaaactcacttctggacaatcaatgaagggactaagatgacaggacacatgtgtgtttgaagttcacacatcctgccttgctcaaacaggaccaaggctcagccaagactttcttgtactgacacctaggatcaggacatcaaaagctctagtagaattaagaaaggatgacccttcccaaaggaacataaataaagtctcaacaaatgactttgctaattattcttctctgattagtttaactcagcatagggcagaccttgcctagtatatttcatatatagtgcagtctgccttccattcctattaaaaaatcatactttcaggtatttaataaattaaaatcatttctgtaattaaattaggtacttatctttgcaagctctatacagagaagcagccaccaatcttaattggcttatatgccttataaactgcaaggctcatgctttaatttgagattaaatcagaataaaagaatttacactaatctttcctgcaaaaaagtggaatatttttaactagctaggcataacactttttaaaacttctcatttatgaagatactttacagtgcaaggttaaaaaaataagcacaatgtagttcctttgttattaatcactggtttgcaatcacttgtttgcctcatcctagttttcttctccaagctaaagtagtatggttcttccttctaatctgccttacaccttctcatcacctatgttacttattgcagccattctcatgggtgtgtagtggtgtctcattgcggttttaatctgcattcgtcaaatggtgaatgatgctgagtacttttcctgtgtttatttactattcatcatatcctctttgatgacatgtctattcatatcttttgccctttttaagttatattatttgtcttatattattaaattgttaaagttctttgtaaattctagataagtcttttatttgatatatattttgcaaacatctcccagtatgttgcttttatttttcattttcttagaattttttttgaagtgcaaaagtgtttaactttgattgcgttaatttatcaggtttttttcttctatgaactgtgcttttggtgtagtatctaagaaatctgtatggaacccaaggtctcaaatattttcttttatgttttcttctaaaagtttttattgctttagctcttacctttaattctatgatccatttagagttaagttttgtgcatggtttaagataaaggtctgagctcacctttttttaatttttattcatttttatttcttatttcaataggttttgggaaaacaggtggtgttttgttacatgcgtaagttctttagcgatgatttctgatattttgatgcactcctcacctgagcagtctacactatacctaatatgtagtcttatccttcaccccctcccaccctttcccccaagcctccaaagtccatcgtatcatacttatgcctttgcgtcctggtagcttagctcccgcttatgagtgagaacatatgatgtttggttttctattcctgaattatctcctcagatgaggaggctttgctacttgaaccctaaagctatacttaggtctgacatcctcagtttcaactgcatagcaggtgaacaaactgatgcattaagaatagagaggatcttttccatgacatgtagatagtaggaagtatttaaagcaattgcattggtaataataacctggggactaaaggaaagcaattctgttgaccttgtgcccagcctgaaaactctgttgaagcagctctctgaggtctttcctcttcatgaacagattcaatccttgtattgatgaaggtgtgaaaaatgcgtttatttgttctttaaaaaaaaaaagtgtttctgagtgacagacgagcatcccgtgggtactctcccctccacttaggcatcgcatccaggttgctcacagtctggagggcctcagggatcaatggcaacagctgcagccaggacaaggtggcagcctttattgctgagaaccatcttaagtttggacttacatgttttcctactgtcaactgaaaacaacactgtggtttgaagaattatggctaagacaatgtgagtggtaaatatggagttagtgttttaattgaagtctttataacaccaaacctgagtcctttttcccttgccataatttatcatgaaaaggcaagtgggtatgaggtgtggggcaagttgggttcttgctgagccagtgcccagaggtctaagctcctttgaagtagtacccagatgtcatggtttttttcccagaaagaaagaattggaaagcagcctcacctgcaaggttgaaaattttagcacttcactcctggccagaaaaatcactgggaatacacaactccctgttaagagatctggatcctaatgctggctccactcccaaccaagtgaccctgactaagatatttcaactacctgggccccagtctccttatttacaaatttgtgatgtcaatttgtggtctacctacttcttggtgataacgtgtttaaaagacaatatctggagaaggcaatacttaatcaaagaggctctgtcatgtatataatctcttttttctagtcctagttccatcaacatttctggctggccatggaaaatcatcctcccttcctggccctgtctctttaactgtataatggaaaggatgatctaaatgccttttggagttcatctagctctgaaaattgatggccctcggcctctactgggtcctggctttttggcaaggcccagcacactttgcccattcatcacacagggatgtggttgtcctctgaagaagagatgagacaagttttcccattgaatctgtcagtccagagaaaaccagggtctcatcgccttcactggagaacctatggcactggcccaggtctgacaaagggcaccatatgggtatacctaaccagatagtgtgatgtaatgcccaccggagaccacagacttagcttggggatcagggagcaaaaacagacccattggctctaacacacttttaccagagtttgggcatttggggttgggggaagaggagaggggcgatggggatatggcagggaaaggagctgtcctttaagcagtactggaagtaaaaatgccagatctcccacaggttgcaagtacggctcaaacttgaaacagagaaatacccccaccagaaagaagaataatgggacaaacagatcttagagcgaggcagagctggattggaatcccggttctttcaccctatggtggttgtgtgaccttgtgcaaggctcttagcctggcctctggcagtttccctctctatggtgacagagtatctgggaaagcaaggttcattctttgtttatttgttttagtgagaggaatggcaggttttctctatctagatggcccagggatcttctctgctaggttgaccaactggcttcccttggttaggtaaaatgataggaaagttgtcatcgattgctctctaagaaggaagtttgggattttttttctggcctatcaaagctggcccttcctgacactttggtgagaagagttgattaattaaaaaaagaacaaatagtggacacattttcacaagggccaagcaaccttctggaaagaaaagttcctaactccagtaatagtaaacctcagaagaggagtgaggagccttttccacaaaggattctgataagacagccttcttaaaggaaaggctcctcactcctattctaaggtttactgttactggatcctctttgaggatatgagacagcccttactatcaggagggcagaggatcttggtggtccaggcagaaggccaggtgcattgtgagggaaaggtgggatcttgtagcacttgtggctgaggatggatggatggcgccccagcagactcagccttggtggcccaggagacagcgtttagctcaatgactgaatgtatcagtagaaactgcaaaagctgtaagcttgggagcactgtgatcttgcagggccaggccaataagagcaccacacagtggactcgtcagtctctccagagccagttttccatagaagtccactatagtgctgaccagactccagctctctctttcatctggcatttggaagcagaactaataatccctttgtcctgagcaagacctaaaggtttttgagaggttgttggacaactggaggtgggacaggggttgattttgagaaagaaaaaacttcccgctaagtgggcgaatggactttggatgattaactggaaaaattagacaccttttcatatattcccaagcaggtgaaatagtccctaccagtctgatgcataataggattcattcaatctgcctatacaggtgtgttgagacaatttgtcagtgtatcatctgggtctggcagaatacctggcacatagtatgtcatcagccaatgtttgtggccttaagctcctgaagtgacatagatggaaggaaggcttgatgccccatggaaacactgctgtcacttcaaaagcatttctaggaaactctctctttgttgagataggagtatgttggggtaggagtagggtttgcaacacagacagtggacagaactatctgagatctcaagaggcttatagtgcctgaggaacacgtctaatccctaggaagttgttctaggatgagcaaatggatgcggactctattaattactgttgggttgtaagagatgaacttcctttatttacctgaagtgatggggattattcagagctgatgagagtcacagaaaggtgtacccatgactggcccagcatttcccaaggaagcctgagttacacggctcatcaaaatcatctggctttgcaaggcagggatgcaaaaatattcccacaggtcttggcagccacaggttgactatcaggatatctttgagaggaaggcacacaaggaggccagggatgccaggagcagccgggcagccttcagaagacgatggacgcagggtagctttggggagcaggttatctgtcatgccatgtggcagcagggcttcttcaacagtctgtttctgttgctccttttgctaaaacccaaccactctaccctctccccatatatcccttctttgccctgtacttctgcctactcattcatgtgttaggcccctgtgatttagagatagcctttgagtttctcaaggtcttctcttttccagaccaaaccctcccactttcttcttcagggctgcaccctccactggggctcagtaaaccttgtgcttcagaccatccgggatctcctgagggagccccccagcccaggagagggagccctgagcacatttcacccaggactgcaactctgagaaagtgcccaagtctctttgtgcctcaattttctcagctgtaaaatggagataataacatgggctgcaagcctcaaagccggggtctaagggaaatttgcctctgcctgggggttctggagctctgcgcttgtaagggtgataattggacaggtttatggagctagctctgtcttcagaggcccttccctcttgattctcactgtggctcccatcctctgaaaccttttcatggttgagacctgcctccctgagagccgggaagaaggaaggccttgggatgatccctaaggtaaagtgagtgacacagctgagtttcaaagcggtcacatgacttgatcatacagaaagtagctagcagaggacaaggagcaggacaagctgtcccactgcatgtggcatatcaggagaaactgccctcttccacgccgcacagccaaggggttccacgcacagattaggagctcaaatgcacctggttttgattcttggttctgtccccagaactatatcccctgggacaagttacttaacccctcagagcctcagtttccctccttgcctattagcggctgtggagacgatcaatccccttcattaagggattacgactgtaccagtgaggacacctgataggagtggacccgcttgtcgcctccacggtaacccgggaaaccgaggccggagtttgggaaaatttgcccagggccaggcggcgacccacggatgccagcggagcgcccttcctgctgtcgtagcgcccctagatggtgctggtgcaccgggcagcgccgccacgggccccgcccacccatgcccgctcccaggcggccgcagaagccgcagacgccgcagcggcggggcagggacaaaggaaggagcggcgggggcgaggctaccctgcggcccggtgggacccctgcaatgcagagcctagctgctcagccgagggagcgccgagccgggcgggagcgggcgggcctggggcgcggggagtgcgggccgcccgccaccaccaatgcagggagcaggtgggctgagcgcgcccgacttgcagggctctgggagccggactgtgagccctccttcgtgccaggcctcgcggtggggggatcctggaaagtcccttcgtgtcacttgctaacccaggttcctctggctttcaccctttgcatgattactgacccagagattctgtgctgcaagggacaagcccagcgcctgggggaagaagcagctgtggcgatctgaggggtccctccagcgcccagagcgtcagtctccccacctgcaaagtgggcatgatgatgcccgccccgccttgttgacttcctcactcagcaaatcgttcccgccctcctgctcatgcccagcagcggcgccaggctctgggacatccctgaggaatgagagcagcctttcctctgaagggggcccagtggaccggccagacagacaggagcttcagaggcccgtgcccagatagagcggctggtgagaggagaaactccagggaggataaagaaagcttggggaaatgccctgagaaccacacggctgctgtgagcattgttattccgccaagtgagggcgagtgattttaaagcccttttcacccttgttctgagactgagtctacagggtgggtattcccagctctcactccacattgctcctctcaggtgaaacaggattggatgccggttaacagaaagctctgagccaaactagatgcgaaccttagctctaccccacttgctaactgagagacactgggcaggttaattcacttccccaaggctgaattcccccatctgtaaaaatggagattaaaaaaaggtatattgctagatttcagggagatttgtagtaatatgtattgctacattatgtttagttgctaagtaatgcagcagagagacttgggaatcaggaaatatggatcctgtttccaccccatgtgactacctggtagaagggtctgggagaagccttttctccttagctattgggttacccctccatgcaagctagacgcatgaagggcatgaggccatctggaggccagtgtcccctccagcccactcccacagcctatgtgcttacagacaggctggaagaccactttgttccatcccatagggggaaatagtgtaatggtgaaggacatgtactctggggccggagagcctgcatacattccagctgcatcacgttctaggtgtgaccttgggcaagttaccagtgcctcagtttgctcatctgtaggatgataacagtaatagtataaaatttggctcgagtgggcgaggtggtagttacaagaaaattcaagcatgattatctcaacataaaagaagtttatgtcttattcataaaataggccagggtagtttcagatgagcagaggattctgttcccgtaattcaggggactcaggctggcagttgttgtcagctgtaacacttgatttctaaagaggccctgagggagaggagtatggaggggagctcgtgggagctttaaggcctgtgacttcagggaggcacctgtactttccactcccattccattggccagcaccaagtctcatgacaccctccctcaacccaggggtaggctgggatatggagccttggctgtgagcccaggaagaagacatcgatggactacaaaaaccaggcagcagcctttgtcacagtgacctatgtcagagggttattttgaggataacattactagtttaatatttgtaaagtacttagaacagtgcctgccacatgttgacactacataaatatttgctattattatttttactgctattcttgtcccttaagaattcactgaatatataaactgggaagccacctagaattccagccagtgctgcagaacattgtttgggcagcctcagaacaccgcacacccgccttgtcaatctcagcaaattcaggccatgtgagcttcttgctaatgcattttgtttctgtactgacagggaggcctgctggaaaatgtatctttctggaggctctttgtgtcattctgatgcttgaggagagcctctagctgtgctgactctggtcttcacctttaaatgcacatactgatcccgggcaatggttgcacacgcgcctcctccgctcttcgggtaccagttctcaggtgctacctctcgcacagtgctacagtagcaaaaagacaggatcacagaggttactaaaagaaggacagctaacagttggatctgacaaacgctggttattaaaagttacttaaggtccagtgcgatggctcatgcctataatcccagcactttgggaggccgaggtgggcggatcacttgagatcaggcgttcgagaccagcctggccaacatggtaaaacccccatctctacgaaacatacaaaaaattaactgggcatggtggtgggcaccagaaatcccaggtactcaggtggctgaggcaagagaatcacttgaacccaggaggtggaggttgcagtgagctgaggtcactgcacttcagcctagaagacagagcaagactctgactcaaaaaaacaaaacaaaacaaaagtcacttgacacctttgcccctcagtttacttatctgtaaaataaagtcaggaaacaataatggctgcagaggactttttaaaggtgaaaattaatgtatatgaagccccaagcactgtgttaggcatagagcactctcttaatacttagtggcaacttttgcgccatcagtcttaaactttgactcattgtcacctttgcatttctggagtgattaatgtgcaccacttagaagtaaaataggttggtgtaagtgggctgccaggatcctagcctttcaaaatgtccacccgcttgtcctagcctagggcctcatgcctcagacacccaaactttcaagtgagaaagtcagagcttgacatagagggcacttctgtcagcctgcctgttcctttctgagctctaccccatggcttaagcacaatactgccaacttgtgccatgcttctgccttgctaggagccctcaatgccaaaggcagtagtcagtaatttttgtttggagataaggaatgaaagctgtgttaggaagtgatttaaaaaaaaaacagcattggtgaaaagaatgagtactttaaaataaccttataacattatggaatcttgacacgcagtctttaaatcacttaactatagcatctaccctgcgcccaaagctgtctgagcccaatgtcaccaacagtgacattatgtacatgcctccatgtacataatttattgctttggatttcactattattgcattataagtcacatttcctattaggcaaattatgaccccaagagccggtggtatgctaaatatatgccaccagctctccaggaaaaatgtatatgcatatatttttataacttgcatatagatagatagataaattgaatatgaatttactaaagtaaagtatgtatacaataatttaaaaataataaactaattttcttcattctaaattccatataaccaatttattctaatagaagtcaattgctttcattgatttttgccaaactcttatatttgttgccaatctgtgatggctattgataatgcatgtagtttagacatgaatattagttggtattctcattttagttaagacgaaagtgaaataatgaagatgtatgtttgaatctcatgtgttcctcaatgacatgagcaaatcttttgctgacccagagaattattttggaatagtgaaacaatattttctcaaaaatgttttatgttattcacaatgtaaccaataaaaacataacacacttttaagtttaatttgcctttattaacattttatccatcactcttttacatataagtaactaacaaatcaataaattgagccctgatttgtaagctttgcttattttcatggtgtaaatacttccaacaatgaccatttaaagctaccaaggtaatttcactgaacatgagattacttatatcactgtatctggatggtgaaaatactatatcatggtgtgcatttatcttttcaatttcatctgcagtttagataatagcaaactgtggtgcttttgaattagaaagtggtgattttgaatatttattactgttcatctcactattattgcattataagttatataattcaatttttcgtaatggccgtgtttaacaaccagctcagaaaatttctaaaagtttaaaaatcaacttgggaactggctgttagcacaccactgccaagagtctaatgttattttcactggaaattgcgtcaaaaaagtactatttcttgatattgttcaataaagtataaggaaagagagagaccaagaaagcaggtaggaggaaagggagttgatggagatgttcagtttcaactgagcagacctcatctgtgccaacagaaaccaccagtgtaggcactgaactctttgaaaatcctgcctcaacagaagtccattctatgtcccaattttgcttttgcccagacgtgtataacagctcagcctctggctatggcacggcgctcagcttccccattcaccaacactgagtgctggctgaaaggcacagagtgtcagctgtgagaaagcgtgcttcttcacacccaactccatccccagtgccatatcatggctcattcattctcattcctagtgtgagagcagagggccaggctgccagcctttgtccatggtgccatggtctgaatgtttgtgtcccctccaaaatttatcttgaagcctaatcctcaatgcagtaccattaacaggtatgtcctttgggaggtaattaaaccatgagagctctaccctcttgaataaaattaatgccttagaaaagggctggaggaagctttcttaggccctttttgctctcctatcccttccaccatgtgaggacacctagacggcaccatctatgagaaacgaaccttctccagacacctgccggagctttgaccttggacttcccagcatccagagctgtgagaaacaaatgtctattgtttgtaaattacccagtatctggtattttgttatagcagcacaaatagacttatacacatgagcattctgtcttctacaaccatgcctctctctgtctcaataatggggcatcctattcctcaagctctaaggaaatgtgaatgatgtcatgggacccaaagaagaaggccttgtcccaacttcccatctggtttccccctgagattccccacagatatccttctaggacctcaaccttttgattctgtgtcttgtactttagaaatgaacaggaaagcaatggaagaaacatctaatgaggaaaagaaaaaagaccaaaaaaatgagctgaatctctccctatttacttctcattgttaatcagcccactggaattcattttccccatgtgtttcctctggattcgagatggaaaggactttggggaacacttagtctaatactcctggcagatgagaaaacccagatcctcagaacacttcccaaatggcctccatgccttttcacagtgttggtagcaagaaaattcttcagaatcaactgtttaaacaccttgagattttcctcctccttctcctcttccttccatttccagaagctctgagtgtgctctgagtgttacagccttccatcaagtctgtccccacttgcagctcactagactccgatgccctcagtgatataaaccatgccccagtcatccctgatgtagtagaaagagaaaaggcttagaatccacaaacgtggagttttagccacagctcagcctagctgtgtggcttgagcaagctgtttacccttcgcctctgagctccagtctccataactagagatgagaatgacaatacttattacaggggtattctgaatattaaacacaatgatacatatagaattcctaatactctgactggctcctgggagacacaaaaccaatgtttcttttcatggtgcccatatccttatatttccagtggatgtggaagagcctagaggaaaacactcgggaaaagaaactgaataaatgaagttattaagtaatgaaaatttgccaccaaacccctataatgtttttcttcaaaacaaccctgtgttttttccttcaccattcttccagtgattgtcctcctttagtcccaatttctcacctcaactactacagacattgcatgccaagtttctgcctttagcccaagccatgtttctcatctatcttacatgaacatctgaattactcttcctaaagcagagctcaaggtcagggtctgtgtcttacacatcatctccatcatttccaaagatgtttagtaaacacttgattgatacaatacacaaagaagatatagctttatagatgaaataatcaaaatatgtatttttaattctcctcctctttcatttttcttctatccttccaagttctttctattatcacttaaacattatcttcagcattagcaaaagtttagcaggtatgtgctaacaataataattgcatttctggtactataataagcgctgtacaggctttatctcatttaattatgattacagccccataaggttgaaggaaagatgtcatgtgtgttctcggcatgtaaacactcttcacagaggttcggctaaatgccaggcagcagtggcaaatgcagtcttaatcactatttggtactctgaaaatgtgcactagaatatggaggggtgagatagaaatgggcaagaagattcctttatggaaactctctttgtagttgtgtggccttgagcaagaatatctacagtggctctcattagcatcttacagttggtataatttatcaccaccctcccttacattgtttaattgaactgtaagtttcttgagactggaaggatgggcatcttggtcattacatgacacaatcatatgcataggggaggccccaacaacttcggcccttgcaaatgtaatagaggtgaaataggcactgcatgcccactttatggatgagagaaactgaacctcaggtaggtgatgctccgtagccaggatgtgatcacagaactcgtgatgtttactcaggccctcttcagttcgttaaaattctcagtcaaaggccctttgaaaaaactactgatcattttagaaatcatttggaaaaatgtggcacaacttaggatataatttcataggcctcctgaaacttcctatagcttcacaattcattcattcatttgaaaaatatttgttgagttacttcatgtgccagtcactgttttcagcactggggatatggcaataaaatgagaaactcagcacttaaaagccaatattttagaggctggtgagggtggataaaggaaggacagcaaacagacatacaagtaaataaatatatcaagtattagctggtaataagtgtcaggaagaaaaaatgaatgagtaagagaggcattcagagttctgtggaggttttattttgcatgggatgcttagaggaaccctgtctgatgaggtgacattttagcacaattagaatgaaaaacagaaacaaattatgtaggtattttggagaaaagaattccaggtgaagaagaagcaaggacaaaggccctggagtctaagcagggaggagaatggaaggagaccaaagccagatcatagtgaatcctgtaggtcttgacagggacacattttgctctgagttagatgggaaaccagtagaaggaggagaaacagggtgtgcctgggattccaaaaggaccacctgactccacatggagccaggacaggggtgaaagcaaagtgagcaatttggggactgttgtaaaatctcaggtgagaaatggagttgggtacaggatggtgggggaggatggtgtaaggaatgattggtttggatacatgattcaaaaatacaagtgacaagatttgccaatatagtaggagagaaaggaagaagaaaaaaagtagaattccaaggttgaaattagagagctcaaaattattgccttaaaagaacacagcatttggagacacaacttgtgtgaaagctgataattgaagatatattcactgagagtgtgttttctatggaaaatgctgacaggtgtatagcactttgcatggacaatggtgccactgtttggcctttagtttgcttcaataagggcttctcatctccctgttgtactccaagcacagggctcagtgtgggcatgaaagacccagttccctagggccggctgacacaagcaggagggactgtcactaacactgttactgagaagcagtgggtagacaggacttagccataaagaagaggtcaacacttgaactcaaggctctacaacaatcaacagaccatggtctttggtataaaaaaacatgggtacatgctgtttgtgggatgcttttgccagcttcaaactcaggtcacttgagtgactgtctcccaaagacccaatgagaggctttctagaatgtatgagaggagaaccccaccttgcactctgcaggtcagagggaggtttctgggccaccaggaggtttttagaaaggagtaaaaaactgtgagctcaaggaatttgtgttgtattcaaactaggtgaagtgatgggaaaactctcatttaatgacccatttctgttttgcaatgttattgaaggcagctaccagaaattttacaaactagattacatcatcagtcaagggagtcatttaatcagcattcacttagctcctagtcttctgagcagatcctggactcctccaggatccttcaacccagtggggagggaaacactgatccacggagtatgggctgaatgtgggcatggtcaactttggaaatacaggcagtgggaagtttggtgtcctgaggactgtgaaggtggggaagacatgagaggacatcaaccttctgtcccagtgcagtggcccctggagttctgcttagggggattgggtcctcatgagtcactgtttttgcattatttatttgtttattcacctaggaagatagcttccttattcacgccttttctggcattttaacacatcatggcctaatccagaaagtctagtgtattcttgatgctggcgaggttgtggagaaaaaaagaatgcttatacactgttgttgggagtgtaaattagttcaaccattgtggaagacaatgtggtgattcctcaaagacctaaagacagaaatatcatttgacccagcaacctcatgattgggtatatacccaaaggaatataaatcattctattataaagacacatgcacacatatgttcattgtagcactaccacaatagctaagacatggaatcaacctaaatgctcatcaataacaaactggataaagaaaatgtggtaatatataccatggaatactatgcatgcatgaaaaagaacaagatcatgtcctttgcagggacatagacagaactggaggccattatccttagaaaactaatgcaagaacagaaaaccaaataccacctattcttgcttataagtgacagttaaaaatgatgagaacgcatggacacatagaagggaacaacacacaatggggcctattggagggtggacggtgggaggagggagagatcagggaaaatgactaatgggtactaggcttaatacctgggtaatgaaataatctgtacaacaaacctccatgacacaaatttacctatataacaaacctgcacatatatccctgaacttaaagtaaaagcttaaataaaagaaagtctagtatattctttctccgcttctgtgtccttggacctagaagaaattaatgcattctgaatttgtatcccactggttttcccctttgtcagcaagtcttcatgagttttctgaaggccgcctttcatctcctgtgtctacccttatgcagtggcagaagacaaaggtaaggaaaagactgtgatggtctcaggaacaaggagtgagggtggcgaggtggtggacaagagcatcacagaacctttccaagaatcacctccatttgctcctccagatcagctctttacccttctcgtccctgctctgtgccctgggtagtgatctggatggactccactatttgacccccttgccatcaggttccagttgggtttgtcaggatattaatgagcagcttcacgcccaccacccccacccccaccacctctgggctgcaggtttaacaatgcctgagttcctctactcttggcctgggccctctcctatcaccacagtgctcagattgcaggggtaaccactcctcttcttaggctttcaggcctacagatagtatcaactttccaatcttgatggtccttggatgctccatctttccttcctgaaactctttactcttcttgtacttatgtgattattgcctttaaagcctgctggtataaagcaagctataaataaaatatttaatggaacagattatgtgcaaatacagaggagaaagggcatgtacaagataatgataatcctggacttggagtcagggtattgagatctgggttctatctcagctccatcactagtgctatatcactttgcttctctaacacatagtttctcagtctgtgaaataaattagttgaacctttctgagatgaaatattcaaagcaagatcctaccgaggaagaccagagcctgttaatctgtgcaatgcagtctgtacacactgctgcctgagtctcaggttgtggttggttgatgggacaaagagatgttgatggattccatgcaaccaggctacttgtgacttgatcatctagtggaaactagactagataattgccctacttacctgtcagctcatttgtttctctctcttgacttccacatctagatccaagtacttctgcctaactgtcaatagtccccaaatccaacatattatgcaatatgttatcctacttgctactctgctgaactgctgatctcacttactcttgccagtctcacctcaaagcttttgcttgagtggcccccagcaggtggagaatcttctcttcccttacctttactaatctcgatcttcccagtctgcaagagttcacccaagtaccacctcttgtagaaagcctccctcccctgtctcttttagcctagcttgatctctcctccctctgctaatggacagtcactcactgatctgtgccagtccattgggtgctaacttgtactctgaccatttttgctgtgccagctttgcctcttcacttccttgaaagtccagcctttcatttgtcacagtacatgttgcacaatgctgggcgtatgatagcatttaatcaaatcttgtcagtttataatttgaggtaatgtctcattcatctggcaccttgggcttttccagataactgaagttgagcttgtcaaacaccaaacaagtatagtaagctctttttaatagacatctttctgaaatgtatttgacatttccagaaattctgaattcccatctgccatacataactacgtaatttcaaaaccactcagagatgtcattctaaacacccattagcatcctgagcagtaatgcagatctgtatctggttttaggtcctttgtctcctccctcggtatcttgcaatgccaactgtgattttcttaggactcacataactgtctctcctgaatgtcttcttcaaccattcttttcctaattactgtgtttcttttactaaggtccaggaaaccaaatcactagaagtctccagaaaacactccctgcacaccaatttgatgccagggaatagtataaataaagcatgacacaggcatcaacaagcttaaactctcaacaggcatagccacaatacagaatggcaaaggccatatggaaggtacaacctagaagacagagccacaaactgtaggcagtaggaagatgtagttgcagctcagggagcaaggaaatttgagataaactctgagaatatgcaggagttcacctggaagaacaaacaggaataaaatttccagcggaagaaacagcattcttgagtaattgttggagaacaagaatctagatttcataaggctttgcaaaagggcacgagcaacagtgcacatagccattaatgctagaactttcaacagctaatgtgggcactcaggggactcttttgatgagctcaggatcaaaaggtcctgaatgagtcaggtttctgggaaacggacctgtggattaatggcctctaactgtgcttttgcatgttagctatttggaaggaccttggccatcactgtggtaaagagtaattttcttaagacctgcaaatacaatggtatttctaaaataattaacattagccagtgccaaaaaaaaaaagcctagataatattttatgggattctaggatgtcagagttggaaggtcttttataactgatttcttttgtcctttttattgatgagttggtggttaattgaagatgcagatcaagcatgggccttgcctgaactaacacagctggtggcaaagcccaggcaccagcattctagatctcctgatgctgaatcctctgtgcttattcccctatgaaaacatgccttttaaatcagtggctatattcactactcaatttaacaaacttgattgaatgtattcatcacttagtttaacaaacactggtgggctggatatggaaggatgaggtccttatctgcaagttgctgacaatacagtgtgaaggaaacgtgcttggccacagctcctatagcagcaaggcatcccctggtgttctaggcactggtaactgtctgcattgatgattcagtcacccttccctgtcatctttgagttgcttccgcctctgagcctggtttctccagatgcttctggcattgtcaaatgccattatccccctcctaggatgatctctctaggctgactctcctttctcattcactaggggtcagtttccagaccatggcttctcccctcagtgtttttgcatcccataatacacttttcgtgttccacctctgaacgtacacaatgacttgtggttatcttttcttatataagaactttaagctaaaagacaaagaatgggtctctttaaattctaacttcccctttccccacctcactctccctcgtttgaggacacagtgagacagcagccatctgtaagccaggcagagtctggaacagttactaatgcaggatagtagaggctcagtgtatatctgagttcaactgagtattggaaaaggaaatgaaagacaaggaagccatattgtctttagtgggatgaggttctgagctcctgggtgtggagtggtacattttgccatctaaacttataaagagcagtgaacactttcaaaggtgttgtttaattatggctttagaaatatttattggaacccattagatgctggggatagaatagtggatgaactcacaaggctcctgtcgtcatggaactgacgtttcttggaaacagaggtacttgcatacatacataacatacataaatattttgatttccactacattgtccgcacattggtaaatgctgagaagacaaatgagtaagggaaacaagacagaaaatgataggaagttctattttagataaaacgatcagggaagtcctccctgaggagatgacatctaaacagagacttggatgtggtgaagaattggtccttgtggtcttgagggaagagtgtgcctggcagccaggtgggaagtgcaaaggccttgaggtgggagtttgcttggtgtgtctcaagaatagcaaggatgcccatgtagctgggatagaatgatcaaggagagaatgccaggagagggtcagacggaggtgggggccaggtcatgaagaaccgtaagttgtaacaagagagtcaaggatagagaaaagcatctctggaccaggaaaccaaagcctcagattatagtattttctctgtcactgacttcctgtatgactgactggacatctaatttcctgtctatatgataaaggaactggaggtgatgactctaagcacctcccagccctatatgatctggggaccttgcttctgcatttttgacatgcccctaggatagacaggggacactcagatggacacacagcctttggtgtgcatttgcaacaggaatgacagcatgggctgtccacagttctgaaccttccagcagtctctttacaggcagccagagaggtgacagtttaagacacttaaactctttcgaccatagactttctttaacagtttggtgtgcgtttgcagtgaatgtcatctatcaacagaagttattaaaattctggaggcacttcccctggtgggatgtcactgttcgtccctttttataatgggtgaaaccacatcttttgcaacttgtgcatcatccatgaagactttctttttctaatgatcagctgtcactctgtctttgtaaggtgggtaatggaattatttttaaagctttcatttaacaagcttgtatcttgtaaaagacctgcttgagaaatgcaagcatttttagatagggaagtgacaactgtctgacatgaaaaaaatatctttcttacctgtccttttaaacatgaaaaaatcaaattccccttccctatgacagtggttttgacttgtgctatatgttgtacaggacacagctagagtgcatgactaggaaggacacaaagctatttcagggttaggcttaaaggccttttaaccatgctgaacaaactgtcttcaaacagcccttcccactctaatatcttctcccccttagcataatcttcccttaatctgtattttctattttgcaaggacagatcagaagattgtcaatgccattttaattgccatgtgcctttgacaataaggcccagaaaggtctcactgaaaatatgtgcagccccagaaatgggtttgaagttgcatgcaatgatttagaggatcatgttatctatcagaagagaggagagtgagtgtgtgcacacactagtgaattcctgtgtgcatgtgtgtgtacgtgtgtgtgactgacttccatctgtacttacctatgctggactctttgtcttgtaggtcttaattttttatttttaaaaatccaaggttgaaattgatctcagtagtttggactcagaaatgatttcggtactacagtttaggtcttatccaagtgttgtatttctttgggattaaatactataagctgtatttttttagtttttattttaggtttgggggcatatgtgaaggtttgttacatatgtaaacacgtgccacagggatttgttgtacagattatttcatcacccaggtactaagcccagtacccaatagttatctcttctgctcctctccctcctcccaccctcctccttcaaatataccccagtgtctgttgtttccttctgtgtgttcataagttcttatcatttagctcccacttatgggtgagaacatgtggtatttggttttctgtccctgtattagtttcctaaggataatggcccccagctccatgcatgttcccacaaaagacatgaacttgttttttatgcctgcatagtattccatggtgtacatgtaccacattttctttattcaatctgtcattgatgggcatttgggttgactccatgtctttgttactgtgaatggtgctgcaatgaacactcatgcccatgtgtctttatgatagaataatttatatttctctgggtatatacccagtaatgggattgcagggttgaatcatatttctaatctttgaggaactgccatactgctttctacatggttaaactaatttacactcccaccaacagtgtgtaagtgttccctttactctgcaacctcaccagaatctgttattttttgattttttaaaaatagtcattctgactggtgtgagatggtatctcactgtggttttgatttgcatttctctaatgatcagtgatatcgaggtttttatcatatgcttgttggccacatgtatgtcttcttttgagaagtgtctgttcatgtcctttgcccactctgatggggttgtttttctcttgtaaatttgtttaagtttgttatggatgctggatattagacctttgtcaggtgcatagtttgcaaatattttctcccattctgtaggttgtctatttgctctgttaatggtttctttcattgtgcagaagctgttaagtttaattagaccccactgccaatttttgcctttgttgtgattgcttttggtgtctttgtcatgaaatctttgcccattcctatgtccaggatgatattgtcaacaggaagttgttttccaggattttcatagtttttataacctgtattttaaaatgttccttcctcataataaaatgattagaggctgctatggactgaattatgtcccctcaaaattcttatgttaaaagcctaggccccaaagtcactatgtctggagatagggtctttaggaggtaattaaggttaactaggtcctgaggacggggctctggagttacaggaaggtatctttctcttcctctttctctctccctctctgcttctcccccacccctctcatgtgagtacacattgagaaggcagccctctgtaagccaggaaaggaagaggtcttcaccaggaaccaaattgcccggcaccttggactttcctccacactttgagaaataaatttatgttgtttaaggcacccagcctgtagtattttgctatggcagcctaagcagactaagacagagaactatgaaaaaatatcaaagattttatataatctcttcaaaagtttacaatatttaaaaaaatgattgggtgtttctggttcataatggatacctgaacatgcatattgaccttcaatttcttcccaatctctgttggaatacagaaaaataaacaccagggcataaaataataatgtcaaaaaacaaagtaggcacaccaaaatactgggaaatttaactaacttttgaaagttgaaaaacagattaattcaagtaagtggctaatccatattgaagaaagtagataacaaaaacagagaggagaaggatgtgtgggaggcaggggctgctttaattaacagatccctaaacaggttcaaaatttgaagttggtgggtaagaaaagccaagaatgaaggagtcttatctacattatttaatcaaaaggctctttgtggaccatctgaactactcaacctatacagagaaacctgtgtgacttgcctctgggcagagagcactccctaccacatgctatagaaatggaacaggtgccgtgagtagccttgagggccaagtgttagagatgtcctcagagtaaaactcttatttgacaggctggtgggaggtggaaaggtgcaggcagggcagtcttctcccgaagttcaatctgatacttgccagtcaacatgcacacacatacactcacacatagttcacaatcagttgcccccttcaggagaaaggcttgctgggcaaacaaacctgcagaacattgaaggaaacccatggcagccatctgtattaatcaaggaattcttcattcataaatatgaatgggcacctaagatttgctccacacctggacggtggtggtaagcaagataagaaatgaaaattactcatctcttgaagaggaaataaagttaattcagagagcaaacgagaatgtaaaagtataattattgttagataaattttaaataacattaaaatttttgccaaaatgagaatcactaaaaaagaacacttggagaataagaaaaaatgtatttgaaatttattttaaaatcatgattggccaaaaaatataaaaaatatgaaagataaaaatcaggaatttctcacaaaaagtagaacaagcatcaaaaataggtaaatgaaagagaaaaattaaaagataagaccaattcagggtatccacaatacggctaatagatgtttcagaaaagaagaacagaaaataaaaaagagaaatttatcaaataaataatagaacaaatattttcggcgtcaaagaccagcaatttctgtcgcccaggctggagtgcagtggcgtgatctcccctcactgcaagctccgccttctgggttcacgccattctcctgcctcagcctcccgagtagttgggactacaggcgcccgccaccacgcccggctatttttttttttttgtatttttagtagagacggggtttcaccatgttcgccaggatggtctcaatctcctgacctcgcgaaccttccgcctcggcctcccaaagtgccgggattacaggcatgagacactgcgcctgtcctaagactagctatctttaggttgcaaggaccactgaagctcaagcagaatgaatggaacatgatccacattctcatgtacacatcctagtgaaagttcagcatgttaagaacaaaaaggacgagcttagatgctgagaaagagagagagagagagagaattaaacaaaaagaaaaaattaagccaaaaagtgatcagtttcacaaccgacttctcatcaacaacatgagaaacgagagaaatcctaaaacattgtggaataaagacattttcatttacataagaactcagaaagttactttttatccactctttctggtgataaaatacttgagggtattgcagcaagatcataaacacatacacactgaaaagaaagacatgagattcaagaaagaagtccaggattaatttttatttaatctcaatcagacaacaatgtagtagttgggaaagcaatcagtccaaataggaccactagataattaatatgattaatttaaaatatagatattattatagatattgtaaataagggatatgtttctttgataatcaggaaaaaggcaactagaaacactaagatcaatataaaactatattgtaaatttaagagtcaaacataaagcaaactaaaatgtgtgatgcttcaaagtattaaagcaaagaaaaaaatcactctgaatatattgcttggatcattctcttttaacattaaagtattagtgacaaataattctattttctttccatcttggtccagatagcatacttggtctagcacttactaatattgatatgttcaaatattttaaaaattgtttattagtttccatgtacagatcaacctatagacaaaaaaaaaatcattatagtaggtgataaaatgtaattacattgtgaacctggacaaggtaaaagtaattgtagagctgccatatttgactgtggaaagtgttacatgaacaaaagacggtgggtgataattttctcattctatcacatgagagaagaaattaccacaatttgatagaataaaaaataaaagttgaagtatattatttaaagtaactaagtgaataaataaatgaataaaaccacaataataatatttagaattatggagctaacgatgagaataacagaaatcagaaaaggttaaaaatgattaccactggggaagggcattaggaagtgaatgacctttttttttgttaactctttgcatctttttgaaatttttatcatgtgcatgagttagttttgaaatgataataataatattaaaatatgaaatggccccgctcaaggaaggagggacatgacatttattgagcctctgatatgctggaaatacacacatcatcttggcttactcatcatgaaatgcatacaacgtgattattatcttagcctgctttttctcgttgatacaatttagatgatacactgttcaataattgatagtgctaaagccagggtttgatggcagcctcgccatgtgccctttccacagctgtgcaagccttcctcagtgcggacctccacaccaaccaatgtgctgaagctaaagagactcaagttctaaacctttctatatgatatatgcctttgagcactttgtgcgtcacctcaattttcttttcttttttgtgtgtgaaatgaatgaatgtgaacagacaaatgtctaggactttgtatttcttaaatgtaatctgttatatatacacacacatggaaaattacatgctttagaattagacttactagttttggaactttgggcgggccacttcacttctctgagcctgtttcttcatctacaaaggaaagtcagtaatttcactctaatttcttcattattattttcattttgctttttttgtgtggccagttgggggcattgtctcccttggcatcggtcagccaataatttgtagttgtgcaatgcctggcatctggaaggaggacgtaagaggctgtttgttaccaagcttctaattcaagagcagagcatcccctcctaggtgaaaggattgtaatacaaactgttcatttaacttcttagtcaaacagaaagaaagactgtccttccgagaaaataatgatttcatagttgcatgaggtcaaaataaaaataatgcaataactggtctcaaattgacaaaggaaccaaattggtgatcttctctcatagatagaaaatcatagactgggcatggtggctcacacctgtaatcccagcactttgggaggccgaggtgggtggatcacttgaggtcaggagttcgaaaccagcctggccaacatgcaaaactccatactaaaaatacaaaaattagctgggcgtggtggcgtgcatctataattcctgctactcaagaagctaaggcacaagaattgcttgaacccaagaggcaaagtttgcagtgaactgagattgcactactgcactccagcctgggtgacagagtgagactctgtctcaaaaaaaagaagaaagaaagaaaaggaaaggaaaggaaaagaagagaagagaaaagaaaaaagaaaagaaaagaaaagaaaaaaagaaaagaaaaagaatcttcagagatgtaatttcaattgtgctaaaggtcccaggacttaaggaggtctgggctgcctgctctaggtatggcaacatacagaagtccctgagaatgcagcctccctgacaattgtatttcctcctaaaattgtcatttggatttgtgtacaaatgtctcaaggccttcttcttttctctcttctcttaggctcagatctgacccaaaaaaagagggggatttaattagattttgtaggttaaagctctctacaccaaaaacttagataagaatagcaaaagaacaattggtccctcactgcatttctcaatgaaagtgtagaagaagacatgttggaggtgttttataacagcatcaaataagctaatttcacccggtctcaaatttatagattgctgtccagacttccaaagctgtggctaatgaagccgaatgatcaaaaggatgcttaaatgattaatgtgacttttctcttacactaacataagtcctctacctgagatatttggagttgatgttgtacataacatttggaataatgaacaagctttggatgtatatggaagtttcttagtcaaactcagaggcaatatatagaaatacttactgaattacatgcctacaagatgacagaatttgaagggactttgagatcatctgatcacattggctcattttaaagatggttaaactaaggttaaagtaagtgacatagttttcccaggtccacaaattttgtttgtgttgtaaaagggcccaattaattcacttattcatctatttattaaagtaagagatatttattgagcacctacttagtcctagtcataatgtcaggccattgcaaagcagatagggatatgagatagtcttccaccttccaagagcttctggtctgaaggggaggcaggcctgtttcatttccagcacaacctaatgacgtctaatagagagacgacagccaagtgttctagagcacagcagagaactctaattcttctgaggggctgggaaagtcctcataaagaacatcctatttgagtgtgatcatgccagataagatggaggggagaaaagaaacatttcaggtggaagaaacaatatcatcggtatttttatagttcaaagcaatcataaagtgtcagtcacccaggtgggatcctgggtagcattcctatccaggtaggagaaggggcctagattcgaaaacttctagattaaaagcacatcgtgtctcaaaaaaaagaaaaaagaaaagaaaggaaatgtggagatgaaaaacttgggtgtgagccagtgcatatttacagtgacttcagcacatgacaaggaaatcagagcagatcttgaaggtaacgagaagaggccatttcaggagatctaacatttgtaggaaatttttctccagatatgagctctgtctgttgctctctgaatctcttcaatggaccccaaacattcacagctgcaatcccttaaaaatgggactaaagagtaaataccctggagggtaggagcccagggacatataactttttataagaaggtacatccgttaatatacagagcatgtcagtacccgcacccaatatttgaaaggagcattttgaaattcttcctttttaaaaatctcaatggaaaacatcaagaaaaagggctctgcattaatgtacaaagatcaccatcttctgctttcctagaatttgaaagaagagatctttattgctgtggggttataaccacaacactaagcatagttgggaaatagtattgtgtagtgtgacctaggagtgggtcattgttgggaaatcatattgtgtagtgagcctagtggctctggaaccaggcggctttggtttaaaacctgccttggccatttattagttttctgaacatagtcaagctgcccaacctttcagtgcttcaggtataataattatatttaccttatagatgttttgcaagtccttacatatgcgctcagtaatataaagcctggcacataatattcactcaatattttttctaacattattatcattattttattattaatttattattctctccgaagtgctgcaatgacgtttttctcctccagtctcagttatggttaaattgattgaccagccagtgaccacaagattttgatctttcatcaagcattccaatattatacaccttgtggaagaatcagacatagtttttgcctcaaggaatttataatcagattcagaatatttaacgatcatctttcatccttaagaaagtaatataaatatgaaaaacatgaatctcaatgctcttgttctagctgaaatctcccattctccttcctctttgcttatccaaattctagtcattcctcagtacccagtgcagtagctgggtgtatcagtcagggtccaatcagtagaggaaaatcacacagcaatttaaacagggaatatctaaaataagaacttatcaactacagtgagggactgtctagttagaagtaaagggagcatcagagaatataggaagagcaaacacaaagaggagtcactacacctgagactaaggtagagcacccaagcaagaggttcctcaggactgaggtccagaccttattggagaggccagtgctcacaagacggaagagaagccattgtgttgccacaccagcaaaacttgctggaagcctgccctcttgggtgcaaggggaagctgctcaaggaaaagtgtttcatgagagacaatttgctataaacacatctgaggctgggagtaccatggggtgctagccctgggtgctgctggcctccatgcactgcaaaagctttgcatgccataggagactgctgctgtgaaagccaccctgaaggcaggagatggtcctggggaagctgtgtgcatggcacggacctactgagcaagcagacagggaccaggaaacaaaagacttttctcctacagcctctctccacagatctttaatggtaaaacttagcctccatttcctttaacaaaagataaatatttaaagggttcagctccattttcacagggcaggcaaaaagtgggtatttcgaactaagagacaataaattgataaccagaacagtccacgctgtgactgttcagcttccgtatgcaattcttgatatcaagctgatgtctgtgcagctgtaacttccactgatgcagtcttagagttgacctcctggacctctgagaacatgtcttctacaccatgttaatcgtgatacttaaacttatcgatgagcacagagctgagtaggacccagagaacttcagtatagacagcatttctctggtcctgaagcatgctatcatggtaggggccttgactgttgtattacattggtgattggtgacttttattaagcttactttcaattaaaactttgagtaatgttgttttaaatccacactgcacccttttctgacatttgtgtagtctgggcattcatttgtttaatcaatgaatattcattgaatgcctattcttgctaggtgaaaagggcttcttcctctctgtctgtggagctgatgccctggctgggtccttaggtccttgccaaaccctccttgcaaaactcatcctttccaaactttggaggcccaccttctaccctttgtaaaaacttacatctttatcattatggaaagtgaagattttcccttctctaccacctacttaagctttgaaacctctctgaataatcataagctactgtcatttccagtatgattgggtctaaatccaatgagatttatcctcacaagggaaaaagtgtataggaggttggagtaaattatctgtgcctgtgcccgtgcatgctttttccattacttcaaagtattgtaaagatttctggacttgagccagagatttctcgccccaaatttaaaatctgccagaggcccaagaataggatctttagtgctggagcaaatacattttcacaccattctgatgtggaagtgggatttcaggagagccagaaagattccagggttcaggaaagaggagagagatggctccaggcaatggggcagagtgggagaagtgggaaggaaaacaggtgattgtcgaggaagcggaaagagattttgaccacttcagagaaaaggacttaatactctgtggagggagacagaaagtctagcattcagaaaatatcttaaggttaccttacccttgttatttttctaacactgtctaaattgtgaactgtgaaagtgtgtaggtgtttgcctgaagagcaaaatcccaaccctctgtgcttttatttttctgcgtcttcaagtttcttttagggagtcaggtgtctctcctttttgcatagcagcaatagcacatagcaggacgaatttccattacacctggctgattctccaggggcccacatttacctccaacagaggatgtcatagagaccctggccacactgaggtctctacatcccaggcttcccattgcagcagcatctacggatgcttggttcttcctagtttcctgctcagctctctgagataggagtgaacgtttgtggtaattaaaacagtgtgaaatttgcagtgtcaggaaacacagctatttttttttcatctgccaaccatcatgctatttatagaactacacttcaccatttatttgctgggcaatgacatcgagaaacaaatattaagcaaagacgccaatttactccacaaaaacatccattatctttatcaccaacagagactgaaaaacaatcaattagaatgcttcacttgggagtgattaattgaattgttaaatatctaatattggagaagtcatcctgggagtctaaatattaattcatgtaacaggtaggacctattcaaatgaaactgcaaattgatactacttagtgtgcatcagatcacattcatcaatgggctcaggttacaactcaaaattcttcattctgaagctactgtatttgaattgagcatgttccataggaagagctatcctttcatagaaaacgtgttcatcatgaaacattcgtctctgtttcctaaacgctctattataagaatatcctggaccgcacatggtggctcacacctgtaatcccagcactttgggaggccgaggcagggggatcacttgaggtcaggagttcaagaccagcctagccaacatggcaaaaccttgtctctactaaaaatacaaaaattagctgggtgtggtggtgtaatcccagctactctagagtttgaggcacaagaatcgttggaacccagaaggcagaggttgcagcgagctgagatggagccactgcactccagcttaggtgacagagtgagattctgtctccaaaaaaaaaaaaaattcccctgataatgtccataatcaacacaacctaagatgcacaattacacagtcacatgtgcacacacacacacactattcccagcttttaaatacctacaaaacttagggaagtgtattcctataaacagaacttgcagcccaagtaatatcattcagccaaagagctgagagcacaaaattcttctccactgtttatcttaacagtcaattccttcatttgatatactacatttgtattacatgcctataaccataggttcttaggagatacagatgtgaaggaaatgactaatagcctcaaggaacacagtacagtgaggaagctaggcctagagactagtcatgacaacacaggttgataaatgctatcacagggatatgtacagggagttttgggatcagcacacaactggcatgttgggtaagtctggcggtggacttagttaagtgaaaaagcatgaaagaagggcattccaggcagaagcagtgcctatttcaaaagacagaggtttgaaagcacctgatatatttggagaatacattatgtgcagagcatagaatttgaggtggaatgtaaagaacttgagaaaccaaaggactctgcttactgtgctatgagcgttgacctccttcctgagaatgctgagaagctcctgaaatattttaagcacagcagtaatctgatgagattttagggagatcactctggccctagttggggcaatagatgggagaatgagggcgggatggagcatggggaaatgaagctgggaagaaactggagaagagaaaccaagtaggggatttttgtaaagaaatgaagcagactgagctaggtgaccagaagaagaggaggcaaaggtgttaggaagagagagctgacaagctgtgcatgaggaggaggttggcagtacccaggtttctgggttgcgtcaagaggtgcttcttaaagtgatcaactcatatgaagaaggcaaaaggaaaagccattctaggagaaaagatgggttctggagatgttgaaagtagttggataaatacacatcagagtctgacgaggtcagacccaggggacagacgcatgcacttccttgagccttcagatcagacaaaggcatcatcccaccttccacactttcacttccgagacagtcttctgcttggtggtgtgtgggctgaaggaggattctctttcctactctaactcctcctgaagtaggtaaactgaagacacttagacctggagaggtcaccaattggccctagatcctttcacgaatctgaggtgtagctgatgactcccccctcaaacatcccacttttagaatgaagacactcttctcaggaggactgtgtaaacagaataggatacattacctcaaaaatccagttgatttttaatcattttaaaaatttgtttaggaggactctaattttaaaatgcagaggattgagagaatacatttcttcttttcattttaatcaaactgttctcctcctcattctttcttcctcattaacctgggccatgacctgttctgtggccaggtggaagctctcccaggccacccatatggaaggtccttggcagtgatgcaccagcctcaccttcctccctgccaaatatcagtctttttttctctctaagccaaatgaccttcaacagaaatcactgtttcaaaactcaaagtaaggacaggctgtctgtgttttgcatctgcatatatctaccccagtaatagagaaagtgaggttcttttggctaagaacatgaactctgtgaagttggtcttgattttattttgctgaagctttcaatgcccccaaagcactggaaaaacacatccattcaaagatggccctgggtgtggggtcccaccatctccagtttcattgcatgtttttccaaagagagatttaaagttctcaccctctcacatcaagaaagcacactttataagtaaaagaggagtgggggctggcactgaatccagtttcagtgttttgtgtctttttctgaaattgagaagaaggtaaagacaaacattaacatagtcatgaaacaaattaggctaggatggtgaaactgggaggctctcttttagatctatgctaagcagccacctttactcattccttcaaacatgtattgaaaagaaaagccaagttctgaatttagagtcttaatgttcttatactcttttgccccagcaaatttcaattctggaattatatcgttgagaagtagtcataaaagtaagaaaggcttttgtatgtgaagatgttcatcacactgttgcttatggcagcaaaaaggacagggagtaaaatactgtggccacaaaatattgtggccaggaaaattatggcataacgccaaataaggcaagattacaaatgtttattctgtatgcagttctgaactattaggagcaaaagcttgaaggacacacgccaaaatatctgaggttggtagcattatggttttcaaatctacaatgaacaacaaaagaatagtacaagagtgtaagagcttaattttctgtgaaaaaaagttcaacattaaaaaaatcagcaacactcttcaacattgaaaaataactgattaaaaatagaatgtgtatgcaatgaggacaatcaatttcttctgctttcaacagggtagagtccagaggagtggaacacttggtgatagtcccagagtatgatattttaccatagttccagaactacaggagatactcagtgcatatacacacttcttaccacaaattgagccagatactaggatcatgagagggagatgaggggactcagctatgactgagtcatagtctaaggtgttgggatattagtcaagactaaaaaggaccacaatgcatgagtcatgagagaaatgcaacccaagcactctaaggggagaccatactccacaggctttgatggctagaaatgacctgacttgaaatataacttttacaaagaagagtgtgaaaaatcatgtttagcagttcttacaccttgcccaatgcccagtatagagcagaaacacaatacaaaaggtttgtcaaactgctgaccagcatgtagagctctactgggtttggcaggactatagacattaagggctaggattagtatttcattctgtagtcaatggatactcactggaaagtgtttgaggaagtgaggggtgtgagctttgttttaagataagatgtttatgtctgtgtcataacaagcagaagggattggaggaaacaggctgaagacagatgctgcagtgggagtgtggagagatgtgaaggcaacagcaggaataatgataagattggttgtgaggtactgtatagatgagatggataggaccagagatgcacctgagagcaggaggaaaaggagaggaaaatggtcatgtgggtgccagatagtactgcataacctctccttttgaatttgaggtacctgcgtctgccaagagtagcttttccatttcacaaccatcacactttcctgtgagttcagagttaatgaagacatgtggatgcaaaaggaaaacttgcagagcaaagtcattgccaaacaggtgagtttcctcaggaaattatgaaggggtctctttcaatttccactcccacccatctttcactgggttcctgtcacaggctgcaagagctttggcagagggatctcacaaagctttgatccttttatgaggcagctcgtcgggacttgcgcttgcggcacccgcctcctcctttcccgggcccctagctcccattcccagctactctaactacgctttaggaatccatcacataccatgtatgtgtaacttctggcccaggtggtcctccatggtacaaacaaacctggaatctccctgaataaagtcaaccttcagctttgcaaatatacaggggatatttttgcttgcctatctggaatctccttctcccttcattcctgacttttattttgatatccacccattccccatccacttctgtgctttaagatagctgaccttactcagttcccagagtgggtgtgattggttcaagtaattcccctgatggactcagaaattgtaaggctacatcttgatccagtgagacctgaaacatacttcctgatgtttctgcaaaagaaatttcttcactctagaaagccaccagaagagatgctgtttctctctctctggacaaggttttgatcagagtcccagaactgttgcagccatcttgtaaaggttgaaactattgcacagggaaggactgagagaaaaatgtaaaatccccttcaaaatttaagtcagtttgaattgacctgaagatgttttttaataagtaccatcttgaaaaatcaaacacatacttttgttgtcaaaataattgggggtgggggatgttactgacatttaatatatggagaccaagaagcgagatggaatttgtgggataagtctgcattacaaagaatcttccctcatattgcacaattttttaatgacccattagacttccaggtaggtgaaaaactcctttattatctgagcctagagcctaactccattttgcacatacattaagtgtttttactttgtatcccttttgatacacactgaattttccactgtttaaatcaggggaagattgtgcttttgtttgaaacactttcaagatttgttcaccttttcagatgatcaggttaccaatgataatgccacttatgaagcttgagttgccaagaaaatatgtttctattagtctgcttttattaccacatggtgattctatctcacagtcgaaactcttgatgactcaatcatgtgttctagtgcaattatgagacaacatttatatattaatacatgcacgtctttctattatatattactgtcctttcatttctccactatactacttttagggcatgatatatttttaattatatgatggatgggttaaattatctatgagctcaatcacagagtagtaaaggagatattacaaactaattaaaattaaaaggtggtgtgtgtctgctgggaggaggatgagaggacagtcatcctcctaaagaatcctaactgatataaaattaggcctcaagaagtgggaatttttaaaagaaaaggccctctaatggagagttggctcaatggttagagtgggtgaaaaagaatgctaagactcctctaggtcaggctgggatgttagaggtgcccggttttgcatctgaaaacctttagtggtatcaaccttatacttactttggaatgatgatcatgtacctgtaaagcagtagacttagaggaggtggtttaaaaattcagagaagtattggctgtcttgcagcattctgtcaggccttagaggaaagagaaaagtcttcaaccaattagtgtgtaagcagagtgagaagggaggcctttactaagggaggctttctcccactgtggattataaagcctggaaatacgtagtcagcagaattggaataagcaaacactatcccagctaaagtatgcagagaaagaagcagaaaaatgagatatatgaagataaaatgtgggtccaaacaagcatgatcccctgaacttcccctattggacattctcagtctgacagggagacacccatactcatggtgaagaggtagctgtgatgcaagcagtgacaaggacccagtatcaggaccttcccagccccatgtgaagctattgtctcaccttgcccagatgcacataacttgtggagtccagatctaggagaagcagggctaaaaagagctagatgttgcttttttgtctaaggcctccctacctggcccaattttctacctgatcttttatctaaggccttcctttctggtccaaatttctcttgttcctgggaactttaaactcctaacagtttttatatttgtcctcttcaaatcccttgttgaaatgtatctgcaatgttgcaggcagggcttaatgggaaacatttgagtcatgggggcggctccctcatgaatgacttgtgctgaggtaacgcattctcactctattagttcaggtgaaagctggttgcttcaagagtggtaacttctccccctctcttgctccctctctgtctccatgtgacacaccagctcccgttgccttctgctgtgagtaaaagcttcccgaagtcctcactaagagccaagcaagatgccagtgccatgctccctgtacaggctgcagaaccacaagtcaaataaatctcttttccttacagattgcccagtctcaggtattcctttatagcaatgcaaaatggaataatagaactcatctagggaagacttacagggaaattgattggcatgtggccacaatgggaccctcattagagtagggtagccatctcactagtcatctgaaagaacccacacctctgggatagtagctctttcactttatcaagcccagagatgtgtaaacactatccatcagcaatttaatcgctggcatgtacattaaagaaatgcaagtccgtgtgtgtaacagaacatgtgcacaaaatgcttatagacacattgcttgtgaaagcgaaaatgcaaagtactccttgcctgggattgagaggaccctgaaaacaggcagaggaaggaatccctagtaaagttacccgtgacatcgtgcttctatttcaagcgtaaaattattttctacagccttcattgacagattttcctgatggtgaccatgatcgtgattcttagaatttataaaacacacaggtgaccagtctctaatttgagcttcactacaatcctacaggagagaagcaggattggagcagtttttccctaattatagagggagaaagcatggcacagataggaaaagcccaagaatttatggccagcaagtgagaaagcctgaacaccaactgtttcttcttaattcaaggctatgcatggcttttctcctcaatcttgtgcctctcacctgaagcttaaaatttcaggtatattacattcatgtctattacatctatataaccatatatttttatttgggattaaaatgtttttactatatattaacactttctcatcttcttagaagagacttttacttcacataaactaatcttttcctgatgcctcttgtttaccctgtggatatatattatcatggtgtgaggaaccttagatctagacttgctctggactttcttttgattttgtctttaaagtcaggctatccattctccagcgggaatggggtcatctccacactgcattgtcctacattgctttgaactgaacttgtaaatagttgaacttgtaaataattgcatgctgattaaaaattattaaggtcatcacctcacattttgtacactcacgtttttagactctttagagtgtgaagacatgttcttgcagcattaagtacttcagctaagccttggctttaactcttaacaggtaaacaggaggtttgagcccttttcctctgtgaggatgttccatgaaggaaaatgaattcacactctttcatgcccccatctctcagacttatccccctcctgaccattcatacaggattaggctcacagtaaatgtcccagtgagctgcagaggagcatggacaagcatgggagttggctgaattacctgcagccttgtgtaagtctcttcactgcttttagtgtcagtttccccctccatcatatggtgatgttatcacatactttcaacattgggaggatggtgtgtgatttaggtaagacacaaagctgagtgcctagcagagagctggcactccctacgtgatggttttcattttctctctccctccttccaccccttacaaacacacacttgtgttcacatcccacaccatttccccatttcccttgtatacacacaccatacacactattcccatggcttttgtatcttgatgacattgtcttcaaaagcaatatcacaaaactctgccctctcttgtcacagcaaacagaatgaggtcagatgtggtggttcctcaaggctggctcagagcatcagtgaggacaatctctctggatccaaccaatcttatgcagctgaaatgaaggcagccaaccactgagcacatgcggtttgtggtccagccagagcagtgctttcatttacaaaaaataaattgaattaatgagtgtgtcacttggtaatcttagattcttcaacaaatgagtcaataagaataataaaatatttcacagtgaaattgaaataataaccatttctgtcaatttatttttttattttattttgtttttttgagatggagtctcgctttgtcacccaggctggagtgcagtggtgcgatctcggttcactgcaacctccgccttctgagttcaagcgattctcttgcctcagcctcccaagtagctgggattacaggcatgcaccaccatgcccagctaattttgtatttttttagagatggggtttcaccatgttggccagggtggtctcaaactcctgacctcaggtgatccacccacatcagcctcctaaagtgctggtattacaggtgtgagccaccgtgcttggcctgtcgatttatttttatcacatggtttaataggttattttgagcctagtaaaggagatagaaataagacactcaaagaaattccagagtctttgtctctaattaattttttggctatgaattctactgcagaatgctttgtggccttgtctttttataaatgaactgaggaagcaatggctgaataacttgaaattcatactactggccccattgaaggattgatctgcctttactttatgcaatgaaagagtctggagtaagattctgtgttagtaaggattctccagagaaacacaactaacagggtatctatttatctatctattcacacacacacacacacacacacacacacatatctgcacacacatatatctatatacgtatatggagatttattataagaattggctcatacagttatggagaacaagaagtcccacaatctgctgtctccaagccggagaaacaggaaagctggtggtgtaattcagtttgagtctgcagacctgagaatcaggggctgatgctgtaagtcccagtctgagtccataagcactagaaccaggggcattgatgcctgaaggcaggagaagatgggtgtctcagctcaagcacagaccaaatttgcccctcctctgctttttttcttctattcatgccctcaattaattgggtgagggaaagtttcttttctcagtctagtgattccaatgctaatcttttctggaaaccctcaaagacacacccagcttcttggccattcctagcccagtcaggttaacacacaaaatcagctctcacagattccattgccgatgtgagacatagtcgaataaaggaaagagtacctggcagtgtcaggaacaggcagatttgggacatgtcccctgttctattactggctgtgtgacattggtcagaatcctaatctgagattccatagaatgtagctagcaacttctaccttgtggattcacatgagtatataaaaaacaatcaaaataaagcacctagtacaatatcctaccatccaataggcactcaaagtattagttatgttattatcattacaattatggttttttcatcattatcattttcatgtgaaaattttccctagagtccaggtcctggctctgaagatgtctcttctagcatcctcctgctctgatcctctggacttccccaacacctataggccaggtgacgctcacgtcaccttgctggttttacgtcatttctgtgttgtttcccactgcacagcatgttagtgccatctcctttactataagctgtaccacttaagaaaagggaaacttcatcttctgtttctcctacagttcctgggagtatgtcagcacctgtgcccagccaagatttcaagtacactgtcacgggcagagcttgcccttgaaaccaggagaccacgctcggagcgcagtgttccttcttctgcgtcacactacatttagggaagaacatcaccaacagggatgtctagaaaactccaggacttggggatgttaaacatgggccttagggatccaggaacaagagcttctttagaaatcagccttagctacagataaatttcccttcttcccctaaacgcatttccacccacaccctatgcacatgaaacaatacactgggtctttgcacagtaatgccataaggtatattatgctggaacacctacattagatggaaagtccagtggggagaggacatggtataggaagggaaggttcaggagaagtaagagagaaaagaataagaggcccagataagccaagggaaaatgatgggccggtttcatcccaagcccttggaatggttccagcccaccaaacaactcatcatagggaacacagagaggcccagccatgctcaactgtaccttgtctctgatactcacccagagaacctcctacacatctttcctcctactgtttctttttctcagtctcactgtctctcccacaccttgactgttatctgattcctcacataagcctcaggccctccttgttttgacaacccatttggaccttttctccagtttaattattcacagatctcaacttgcacatccccaaacacctcccttctacaactgtggtaggagatgctctcactacttgcctgaaccccacaggaccttggtgtttgctcagcctcccctggtaacggtggggagttgtcaggggaggtggaaaaaaagagatgggaggagggaacagtctacttaattcaggtgttatctgcagtcagaagctttaataatctctgtatggattagagctggcattgatttatagttgtatgttaaaatgttcaaactcatgactctttttttaattattcaagactttatgtttttaaaagcaggtttagcttcccagtagaactaagaggaaggtacagagatttcctccacactctcccatccctacacatgcacagcctcccccattatcaacatcccccaccagagtggtacatttattacaatcaatgagcctacattgacacatccaaatcacccaagtccctagttgactgcagggttcactcttggtgttgcacattctacaggtttggacatatgtaaaatgacacacatctatcatgatggcattgtacagagtatttgcactgccctaaaattcccccttgctttgcctattcaccccaactttcccactcccaaccccttgcaaccactgatccttttgtcatatccatagttttcacatttccagaatgtcatacaatatatacccttttcagatgtgcttctttcacttagtaatatgcctttaagtttcctccatgtcttttcatggcttgcaaactcatttctttttagtgttgaataataatccgttgtctggatgtagtacagtttacttattcattcacctactgaaggacatcttggttgcttccaagttttggcaacgataagcagaactgttataaacatccttgtacaggtttttgtgttgatatacgttttcaactcctttgggtaaataccaaggacaatgattgctggatcttatggtaagaatatgtttagttttataagaaacagccaaactgttgtccagagtggctataccattttgcatctccaccaacaatgaatgagagtttctattgctccacatcctcaccagcctttttgatgacttttaattcttaagaatttatttagtcctttcaagcaagaaaacatggtagaaattatgtcttaccattctctctctttgcccaggttgtgtagcctgacctgtgaaacattgtgaagaaggaagatcgcagtttcagggaagatgactcgataacaccacagaacaggtttgtaaattccacaataatttgtgaaaaggccaggtgattacagatgcattttgccaagacatgcaaaaattaaaaaagggaaagagtgcaattcaacttagtaatgcaggtactgtttacaaaacagtaaaaacagtgtcaaatgaagtagagtctggaatcatacaggatttagtcttcagattggcttttcagatccacaaaactgaaaattcatagcagcagatcatgaacctgcagcatttcttcctgagcaacagaaagagaattgcctccaagattcaacttctaacttgaaaaaactggcttgttttgacagtgatttttcctagaagttttatttactgcatttaaaaatctatctttagtgcactttcaatttttccctaacaccctttcagtgagacctttattcttcttgccaactaaggattttcagccagtgttttttgcagaagtgcccagagttggtgagaggttattgtatgtatttccttctaagcactgaccctgcattttaactgagcctggattaggccaaataagccaactggttaggttggctgagccatagcgcaaacagtaggccctatgtatacacaagtaccacatccacagattccactaacctggaaaacaatcgatcttaagcatccatggattgtggtatctgagaaggtcctgaaaccaatcccctatggagacaaagggcctactgtatactacataagcaattcagattttgttttctgaaaataatacttattgagataaagcaccataattaatgaatataacgtgaatatttctatctttcatttccccacctgattttacaagaggatttcaaatgatagttattgtttcacatgtgtaattatgagatattacaacttagagcaagattttatatttccgtatggcaagaaaaatttgttcatctattcgtttgttcaacaaataattaaagaatatgttgttgggctaggcactggtgatactgcagtgaaagtaacacaatccaacccctcaaagagctgaaagaatatgaaaatgaaagatatatgaaaatgtagatcaaggattccaagcttggctattgtaaccagaaatgacctattcagtctcttgtttctctagacagattgcccatcatgattacatccaatggtgtcttggccaaataaaagatggtggtaaatggataagagtcaaggtgatttcaagcagaaagggccctttgaaatcacctcccagaaacactgaggtggagagatagggagtgactcgtccaaggtcatgcagcttgcaggtcagaagctggagatggttgggaatctgctggatgtgtgtgctggtgaagggcaaggcttgagaggaagactttgccttcctctggattcagcacttgcaaatctggaagacaaatgtgacatcaatgtcatcaccattcatgcactctcagctttcttcccctgagacttttctgaagaacattctttccttccaagaatgactttccattgctgatttcaaaaaaccatagattttgtttccacctctgttgttttgttgttcttgtttgctctctgatttgtgttgtgattatcttgtgtttgcttctctatttaatatcaatagtttctatgaaaaaggaggactgttattaaataattggaactctgaacccagaaataaaattaagtaaaagttttccaaacttttcaccctccatttctacagaggctatatggcttgacctaagaaatattgcagaaagaatatccaagtttaagggccaatgactgtaactactgcaaaacaggcctctaagtttcacaacatcctgtgaaaaggccagaggatagccgatgaattttggtcaaatttgcaaaaataaagaaaaataatactgtattcctgcctgcattttcttcttgactggcaccaatgctcttagaggcaggtcagtaagtcaagatgcccaatctatttaccaaaccagggtagcttgccagaccacacatggctctccagcccaagttttcaaggtaaacatatcttttatataaaggcctctgcttctcagaggggagatgtggagaaagtaggacaactgtgtaacttatcctccaaaccagaacacttttgaaagtgaacggagcaatagtaattattcctagacagaagatatgaagtagaactgaaagagctttggatttgagatcagccagacctgggatggaatctgcacttgagaccctacaggctgaattggtacctttctgtgtagaagaggcatcataacaccacgtgctctgcaggtcattgtttgagatttgctggttatgtatttaaaagtcctggaacatggtaagctttcaactagagtagccatagctaacatagcaaatctatgaggtgggttattagtgtccagttaaaaagtttaggaaattgaggcacaatgggttaaataagttgcacatggccacaaagccagtcatggcaaagctggtaagtgccagaccgactgtttatcttcatcatctgttcatttcccttctctgctgtctggcctcttcatatatgtgaagtgtgtaatgtgaaatccatatgtatgcaagctatgtgttcagtcaacctggtagcatggtccagagtagtttgcggggaatgtttcaaggtaaagtgagggcggggagggctggaagcatgtgacactgtgaacttctcaggatcaggtgtgctggaccatggtcttgagcattggcaggactagttttctttctcccttctctttgcaatgcaaaggtaagtgccctgaggttcacttgcaaagccatcatgaaaaacccgtcctgttaagatcagtttcttcatctataagtgagggtgttgtggtgaatgacacctctcatgctgctgtctgttctccaagaccaagttcttctgtttcacttcagcttatgagtcgacttctggccacacctctgaggacctggaaagcctggcaaggccctgcattgccctgtctcccaggaggagtgggcttgccttctccctatactgccccaggaaagaactggcatcctgggttgtgtgggtatggagcggattcccacacacccacacctcggccagccagagagactgaccacccatgctcaggcttgccctggccacatcaatcgacagcatgggtggcctcattgtcaatgcaggcagagctgtccaccaagattagcgggagagccacagcagctcttgcccagctcctggttcctgtgggttctagtgcaaggcattcatctcacaactcttccggcagcttgttagaaagaagcactctgagaaaagcaacaaaatctccttaaggggaaaaaaatctgttctggcaagatgttctgagcatgcacgtgaatcagactttggaaatatcataagtaggaagccccagagagatactgtaatcgttttcattcattcattggtgtattcagtaaatgtttctttaacatctaccatgtgctggatacaatactacatgtcagagattgaaagatgactcagacatgaacttaaaatcaaaacaaaaatgaaacctcatagacaatataggagcaactattttaaaaagattatttctttgtaagtcaaaatgcagtgatgatatttataagtgattacgggaccccagaggggaaacactgaaggcacattctgctgaggaagggcagagcacacaatggccagagatgatgtcttaggcaaagaaattcatgacaaaggtcttatggtagaaatcagatgggtgaaagcaagttgagaaagggtaatatagacagagacaagagacatctgggtatgatccatattgataggtgtgtggcatggtgtatggaggaaggaagaccaagaaatggggctggagagacagacaaagactagctcatggaggaccatatgagccaggcaataaatgtggcctctatcttttggggaatgggaagccattgaagtgttttaggttagaatgtgttacacagaggtctgtgtcatggaaaggccactctggcaactgtgcacacacaatgactctgaaggaggcctgaaagcagagaaactagtaagggatccatgtcgcaacccactgcagggcagtgagcccccagttgagtgcagagtcatagagggagaaagggctaacaggactgacacacaatgcattagtcacagagcagaaaggagaaatcaattctcctgcttcctaagccaatgcttttctagttccataatgatgcggttctcaaaggaaaagaaaagttctaaggaagaaaacactagactagctctagacgagctcagcaaactggcccggtgacacttccccaatcagctagagcttcggaggctcaacttcctcatctgtaaaatgggattattgccattatatcccagaactgttacaagggccaggtgcaaagagtgctgaaaaaggttttgtagaggaagatgcagatctaagggactggtttatcattttatttacaaagtccgtgtggcatagatgattaggaaaaatacctaacaagcacatgttttaggtaaatgtctttgctctcatagtcttttgcaccaagaatgctgcctgcattttaggagtgctattcaaatgctgcatttcatatacatacatttacctaagccacatcttcattggcaagcatcagcattataaatataaagctccctatattgcaagttttttatgtcgaaaatgtaattcagttttcagaagtacgactgataaatatattcaacaaaacagctcttctgcataaattaatatattctgaagttttctctcaatttaaaaacatagatttgcccctatacagtgcagaggaagctgttgtcaaacattcttccttggccattcagaaagaacaagatggcccaagccccacagagcatttgtcactgagcggctgccggttcgtttgctctctgcacacctggcttgttccatcttttgtgatctgagctgtggcctttgcctcttgttactttgatttgggtggacttttggggctttacttagtcatgagcttgcattttctaggagctttgtttacattcctgctttcagagtttctttctgtctctaaagtgagaaatgggctacctctatcttttgatgtcctggagaagaaaattgtgacttgcatggatgacagtagctacatttgtgtgtaggtgacaagtagcatcaggcttacatttatctgagcacagattaggccacataagccaattagataggttgctttggctccaacagttacccttgcagtactcctctcaatttcaggcatcatactgaaaaagccttgcccacacccacaattctgttacaagtggggtaacaggtttgctaagtagtcctacaagcacatgagcataggctgacttcattgggtgtactgtgtatgtgtgacatgtctgcatgttcatcttggtgaacaattatctctctcttttttttttcttgtgtcatttagtttattatgtacaatgcaatgtgagggcatttctgcattacataaatgaacataattatacttttcttacaaaataggaattatattatttactcttaaaaaatcacaggattattttcctctttttgtttcaaaacatttgtttttaggtggataaattttactaacttagctcattttgaaatatcttgttcatagagccacttttcttttttcacatttatatgggactttaaggtttataaaacagtttcacatttttttctttgttttttcatatgtttctcacaatggccttaaactgcatctccattagacagattaaaaaagtgagactcagacaggaaaagtgattcaccaaaatatccactatcagatggtgctagggcttgggctcaaacctaggtctgtctgactcaaagtctgagttgattctacatgtagccagctattagaggggtgttgaagaaagaatctacaaaaaggaaagtcctttgcagaatgaaaaagcccagataggtgagagtgtccaaatgttcactcttgagaacaagaatttttgaggaaatcaacactgtgtctcatggaaattccaaattcctaagaagctctaagaatggatggaccaggatgggatgggctcatcatggatgcgccttacaaatagttttgcaaaggaaactgaggatgttctgtccactggcgtcaagaatagatgcacattctgtcctgtgaataaaggatggtatttcagtctctgctgctgagaactgatgagcacagcatactgagctgacttttgggttgaaagtgttgggagaaataaaaatgctcttcagactgtaaatactcatatatgttttaccttccaaatctttatccaattggcataggcattttttatcattcattttttcatatcatttcagagaggtcaaataaaaagaataaaagcttaccttaaagtgacactgatacttttataatttatcttttaaaagaaaatttcctgggctatgtgtcataattgaagtgcttgattctaagggcgtgggttttttgtttgatgtctcagtgatgcaatggtttcatcagttaagtgggaatggcctcttccagaaagcagggagctggttcagacagtggtttgtgggttcttgctgttcccaggactgtgatgtgaacctagctggctggcatacccagctggtctaacgttatctgagcctgtaatggagtagcactttgtactcagccgagtccatttctgcgtggagatttctcagatgcaaaacaattgcataagctgctgctagttagcttaattggcacattcaggttagtcatgtagacgaggttctttttatattttgccaatctttcgtagtttaacaggactgttcccatgttatgaatttcaagtaagtgtttcatggtgtgattagaatctaagtagactatgctcaacaattacctgtgaacacgttgactcttgtgcctgatggtggataaagggagttcagaaggcacttctatgcccccttcattgcctccttggagcaagtgggagaccagatgtgctggggctgaagctccatggagcacttctgggaggctggaagctgtgacatcctgagcctgtccagactcagttcctttttctgccaccagccatcatcagtcaccaaatgtgctgcttctttatattcttggacccttaaacttctctttgtctccaggaatatcacttcaggccactgtctccctgtctctgtcccagatgatggaaattgactcctaactcagtctgcttaaccccaccttcacaaagtactagggtgatctctggaaatgcaaatctgaaaatctcacttacagactcttcttaggtggttcctcactgcccctagaatgggcatagaagaatgtttaaacaaactttcatggcctgggctccaactgcttgtaaaacctcatttctctccactgctgtctttctctttagactccagagaccagtccccatgggggtcaaggagccattcaatctgttaggtaggaagagatttcttttggcttcttgggcagggttacatggtgggacatctgaggggtttacctctaggaactcccccaagttttcaaagtaaagaaagatccaaagccagaaaagatccctgtctacctctgggggaaaatgtggaagggaagaggaggaaagtcaccattttgaagtagcccagagtggcctccatgacgaagacctgctatccagaaaaagactctaaagagcctaatctcaacgagggtgaggccgttcctctcactccagccccttggcttcctgcatcacctaaagagggaaacaagctaagaaaatacagtcagttaggaatctcttgtggattgctagaggcatgggagtctaaaggattaaggaaaatgctgtctggaactgggctcatctgcaggatcaaactgtggctgtcctgcaggggtcagactcccacttgcctcaatgtaacctcagtcctttgttaatttctaactcagagcttcttctattctactgtgcacttcactaaaatgtgaagtatcagtatctcggggtggggagggaggactcctatgagaagaaaggccccagggaaaagcctcatccacatcaatagcacatccaaggtgactacagggaggccagccacagccttcctggctctcacactcacagacaccagtaatagattcttctctcataggcaatctatgatagatgtaatggctaagtttatgtgtcaacttgagcatgctatgggacacccagattaaacattatttctgggtttctctgtgaggatgtttccagatgattagcatttggattggtggattctgtgaagtagattgccctccccaatatgggtggacatcatccaatctgttgagggcctaaataaaacaaaaaggaagaggaagaaggaattcatcactttttgcttctggccttcctgcttgagctgggacatcagtctcttcctcctcttagactggaattataccaccagctttcctcagtctccaggttgcagatagcagactgtgggacttctcagcctcataattacataaaccaaaccctcataataaaccttcttttatatctatgtctatctatctctatctatctatctatctatctatctgtcatctatctctattactgtatctatatctacctctctctgtgtgtctgtctcctattggttccgtttctgtagagaaacctgactaacacaataagggtcactaaacaggggtctaaaacccagaatctatgcagacttttggcgtatggacacatatgcagttttttgaggtcataagatctattatggtctttcagatttctaagggtttgttaaccaaaaaaggcaaagtaccactaaaaagaagccctttctttgaaatgtgccctgggaggaatgtcctttaggaaaactattgaaaacaaaataaatccatctactatgccacagaaaagcatctttcatgagatgagatgtaagccagaaaccataaaggaaacaactggtatatttgactatgtataaaatcagaagagtcttcatggcacaaactgtggccttcccctcaacacgttccacattgcaaccaccacagacaaggctgacacatgcataataacttggaaaaatcatttgtaacataaatggcagggaaagaataatatcagtaacctactgtagtccccctttatctggcttcacttacccatagtaaaatgtggtctggaaataggtgggcatagtataataagatattttgagagagatgaagagagaccatatttgtataatttttattacagcatattactatacttgttattttattattcgttattattgttaatctcttaccatgcctagtttataaactaaactttaccaagggtatgtggtgtaagaaaaaaacagaatatataaggtccaatacatctgtggtttaaggcatctacttggggtcctggaatgcaccttctcggataagggggaactactgtctaaagagctactgcaaacctatcaggaaaaatcaaatttctcaaagagaaaaagagggataaaaaatctcaaccagtctaaagtctaaagaaaaatgcaactggtcagtaaatataaaaagtcattcaacctcacaaatcattgaagttcaaaaaatatatgcatcatttttcatgtaaagaattgacaaggatttaaaaggcaagcaaaactgatattgacgagtgtctaaagcacttgctctccaccctggctgcacaatgcagtaacccatagaaatttatgaaatattgatgccaacatctgcttctgaccatgaaggatgaactgttatgggaactgccctctcaccataaacagctagaaaaccagacaaatacatgaaacaactgttttcagatactgggaaatagcagagcaagcctgttatccctgagagaagagaaacaaatgaggtgagccctacaattgcccagtttgctgcctggaggcagtttcagtacatagtgcaggaaagagaacccaaacaagacccagcagtctcactgagttgaggacagaaatcagaattccagaaagccaacttgcaggcaaaatactggaaaaaaaaaaaaaaagggaagctgcagagagaggtctggagatctgcaaaggggccagccctaactctttgactgactagttatctcttcatgcatgggaaaaactcgacgaaatgaggggaagaggaagaagaaacatcagaaactaggaggctaaacaattctgggagctcatgaaaattggttaatagttgatatagtcatccaaaaagtattgacttagtaatagggttaaattagccctagaataaaagttgctttaggttctcccaaaacaaagtttaaaagcaatcctagagagcgtcaagcttatgctaagttactcaactacatgtcaggaaataaaggagttcatgttaaagaattataacaaaacccagaacctaacagcacaaaatacacagcgttgggcatctagtaaaaattgacaggcttagcaaacatgcagagaagcacaaaaatacaaaccagagccagcagaaaaatcaatcaatagaaatagacactactaaaaatgacagagcagatgatattagcagacagaacattaaaacagctattataaatttacattaataattcaagaatgtaaaaaaacatgaacatgataagaagataaatggaagatactaaaaataccaataaaacttcaggagatggctgggcatggtggttcacacctgtaatactagcactttgggaggccaggagtttgagaccagcttggccaacctggcaaaatcccatctctactaaacaatacaaaaattagccaagtgtggtgatgcacacctgtaatcccagctactccggaggctgaggcatgagaatcacttgaatccaggaggcagaggttgcagtgagcccagatctcaccactgccctccagcctggatgacagagtgagactctgtctcaaaaaccaaaacaaaacaacaacaaaaaaaaaaaagaaaagaaaactttgagagatgaaaaagacaatatctgacaagaaaaatacggccaaagggattagcagcacattaaacatgtggaagaaaccaccagtgaacatgaaaacaaataaatggaaactatccaaaatgaaacatagaaagaaaaagaataaaaataaagaaataacacagcatcagtgacctgtggaacaatatcaagttgactaacatacatgtaagtgagttcacagaaggagaagacaaagatgtggggaggaaaaggatgtttgaagaaataatagctgaatattttttctaaatttgctgaaaactataagcacacagttcagaaaacctcaatgaatctattcagaagaaacatgaggaaaaacacaccagagcgcatcaccatgacatttctaaacaacagtgatgaagaaaactttttgaagctgagagaaaaaaaaaaatccatgtcatatagaggaacaaaaaattacagcagacttagtacaaaagttatgaaaaacagaagacaatgggaaatacttttaaggcagtaaaagaaaaagtgtaaatctagaacttaccaagtgaattttaaaaataatgatggactgaaaactttccagacaaagaaaaattgaaaaaaaattattggcagctgactcacgctattaaaaaatgttgaaggaagtaacagtgtttaggcagtaggaaaatggtatcagatagaaatgtggatctatacaaatgaatgaaaagtatcagaaatgataaatatacaggtaaatatagaagatattttcttggccaggcacagtggctcatgcctgtaatcccagtactttggaaggctgaggtgggctgactgcttgagcacaggtgtttgagatgagcctgaaaaacatggcaaaaccccgtctctaaaaaaaaacataaaaattagccaggcatggtggcatgcacctgtaatcccagctactcaggaggctgaggttggagggttgattgaaactgggaggtcgaggctggctgcagtgagtcatgactgtgccactgcactgggtgacagagaaagactttgtctcaaaaaaaaaaaaaggatattttctcttttttgcttacaaaatttcttaaattatagggatgtttaaagtcagagtaatatgaataacaatatgtgggctttaatagttttagagtgtgtaacagcaataacaccagggactagtgcggaaagtagtagtaactaaaaatacattatagagaaaatggaatcctaaaatatacaaaatcatcaaaatatagtaaaaaagaaaaagattaaagaatggatgaaataagtagaaaattgatagcaagctagtagatttaaacttaacttcattgataattgcattaaatgaaaatgatagaacactcgaattaaaatgcaaagattattagactggttaaaaaatacaagccccaactgactcaaggaaatgctttccataagaaacctgctataaatttaaagtataaatatgaagatacacttaaagtaaagaacaacaacaacaaaataacacataaacatttgtccatagaaaagtggaatatgtatattgatattaggcaaaatttcagaacaaaaaatattaccaaagagagaaggactttcacaaagttattaaggtaaattaatcaggaggatataacaattctaagtttatataaactgaataccatagcttccaaacatattaagatagaactgatagaactgcaacaatacacaaatctgcaattatacttaaagatttcaacacttgtctctcagtaattaatttaaaaaataaaaaaagtattaaggacagagtagacctgatctatactgtataccaatttgaccaaattgaaatttatagagcatacaactaaaaagcagtggaactaactaaaaatggatgatagacctaaacatagaactggaagtataaaacttctagaagaaaataatttttgtacctttgacatgggcaaagattactttgaaagccacagacataaaggatgaaaaagtatggaaacttgatttccttttttctttttgagatggagtctcactctgtcaccaggctggagtgcagtggtgcgatcttggctcactgcaacctccacttcccaggttcaagcaattctcctgcctcagcttcccaagtagttgggactacaggcatgtgccaccatgcccagctaattttttgtatttttagtagagatggggtttcatcatgttgtccaagatggtctcaatctcctgaccttgtgatccaaccacctcagactcccaaagtgctgcgattacaggcgtgagccaccacacctggctaaaaatttgattttcaaaaaaattaaaattgtttatcttttaataaatagtgttagagaaatgttagacattaagagaaatgtttgcaaaacatatatcttacaaagcacttatatccagaatacattaaatatatgtgtatattaagaataaatagaaaattctatagttctacaaaaggaagacaagtattccaattaaaaaaaaaaagtttggaagaaaacactttatgaaaaaagatacatgagtggtaaatgtatacatgaaatactctacatcattagtcagtaggaacatgcaaattaaaaccataatgatatagcactatataacctgtggattgactaaaattaagagtgacaaaatgaaacgctgtcaaggatgggaaacactggaacatgtatttctagaggaaaagcaaaataacattaaaaaacagtcattgtttcttataacattaaatatagatttacctcttaacatagatttacttggtcttgagatagtatgtgagcttcacttccttttgttttcattttgttgtagagcactccaggttactctaataggaaaccagcgttgccagtcctacttgtcagcatgctcactcgcaggcatgattggtgggaaagtacatcagtgaccttttctaggcagtttagtcatatgtattttaattaaagatacaattatattttgattctaagaattctcttctagaaattaatcttaagtatataatcaaagaaagttattaaaatgtatatgtgggaatattcagcacagcatccattataatacccaaacaagctggtaacaacttatactgccatgaaacaaatatggttaaatcacagtacatccaaatgaatttttaaaatattacaaaacacacatagatttctatttttcatttggaaaaattatccataatattttcagtgaaaaagtaagttgtgaaaaacatgtataatatttcatttttgtgacattttaatataaaaggtatatatttacaataaatgtgtgaaatgaaggtcatgaaaatgttaacgaggttactttctagtgggaggatttcaggtgagctttctttgcattttaacacatgaacttcacacaacatgcaagtatatttattatcagaaaaaatcataagctaaaataaggattaaacaatgaagaacaaatcactcacttttttgaattatttatcaaatgttctctaggtgccaggaactctgctagatgctggagatcgacaaatgaataggagtttgatgactgaagctcaaatctcatctctttcacttgctaactcaagcactgtcagtcaagagcaatggttctatctccacttcctcatctgtaaaaatgggcctaatagttcatatctgataagagcattatgacaaataagtgagataatggacaaaggggctctttccccactcacctttgatctctgagaacaaggagtgttccacgcccaattctgaggacacatagatacagtcaggcagaaaaggtcttgatgtttctgaggctccattcacttctatgtgacacagaagtggagacaagagccagtggacctgtaggggaggcaccctggagacaggggagatgactctggagtggaggctagtgatagacagcccagcccacgggtctgatgggagatatgccagagatgcagaaaggtctccatggtcattaagaggggatggggggctcggtcagcaagaagagccactgatccctggtcaagccaaattttaaatttgccaaataagagcgttaaagcacaaaacacgcctatcaataactatcatttcacaaaataaggagtttcaaaaaagtgagactggtattacctcagaatcaagaaacatgcttttaataaatcaaatcagttccaactaatttagctttttgaacaacctgccatggtgcacttcttttgtgtcatttagccatgcaccagttgaaacttggcagcatggaccagcgcaggtccctgggcccacgctcggaagccactgttgtgtgctgtgttgtgaatcctaaaattgacggagctttaaaacatcttaagtagagaagtgacattgtcgaatgtgtaagttagacagctctttctggcctccatattcaggagggcttgcatttaggggagtgagaggccacttaagaggttcttttaatcatctaagccaaaggccttaaggccctgagttaaagaagaccattggttatttctttaatgagacagttattttgactttttttccttttctagttgaaataaaccttgcattttctttttaaatcaccaataaaacactgtgtaaggtcattgttttccatattttgggtaattgctagaggcaccatgcttaagacaggcaagtgttaggcaagtatttctatttgatccttttttgaagactcttctttgggcctctggaagatattttacggatttcttatactcaatctttaagattagtgcttcaacttcctctttattggttaggtgtttagaacacattgacatatcttaaaggcagttttgctctggcttggatgtgtcactatgtatcaggtttgattaacagtattgaaaaattaatagattattatagttgatcttttaattaacatatagaaatgcattttaaagacatgttttctaaaccaatttttccctcctctaaacaaaatgagttaagattgaagaagtgacttgaagcatgaatttgttctcctttatgcaaatgcaggttttagtgttgaaaattgaaattgtcttgaaaaattagttcaaaataacttttacccaggtatctcagttgctgccttataaatgaagtgtaaaaatccacttattcagttattgcctcataaatgaagtataaaaaccacttaagttttaccagttacaaaagagtttctggaaaacatagaggagaaatgaattatcaccatctcttaccattaataacagaaatgtgaggaggagcattaaagcaaatatgattgttttgtgggttttaaaattattcccttggcaataattagcgtgatggtgctctacaatgattgagaaattaaaaatgcctccgcatgtgcctttgattctgtagaatggaagtgtctacatgtggagtaatgtctttgactatatagattgaattttctttcagcaaatattgtagcatatttactatatgctaggcaggaaatatttgtgtggagagagagaggactagaggtaaataacacaggttttgtttggaaggaactcactgtctagtgattgggtcaagcataaaatacaactatctataattataaggcagaactaaatgaagactgtatttaataatcattgtggactatgggcttcctgaagacaagggctgtctctttatttacaggacttctaaaagccccatcacagaggggaagccccatcactgacaatgagtgttaataaatcctagactacaaactccatgaccataagggtcgggttttatgcatatctgtactcccagtatgtaatacagaccgggcacattgtaagtgctcaataagacgttgtgaaattagtgaactctgaataagtgaattagtgattcaacactgtggaacataggagaactcacaattcaactagactgagatgatgcagggtaatgaggggagtcctgaacaattgtacgtcatgtgaagcacaggccttgaagaagaacctcagtgtcaattccatgtttgtttgcatactcaaaatagacctctaaaaatgcctggcgataggtaaatcaaactgattcatctagtattcatcccagctagatgaaaatcccaagaattactttctaaacctagcaacctgaagttagctttgtaattaaataaagctcctcacagtggcctcaactctcctctccaaacatcttcctttattcagcagccactactcaccactccggctaggctggtttccctgccatggagctcgccattcttcgtcctgtcacaagccattcactgatgagccaggggaagccgcagaagtttccagatcagagaagtgctgtgatctaatttgagctgtaaccacaataaagataagtttttataataggatattggtttaggagctttaacaatgagcaaaataaaagtgcctgaaacaaaatagccttttttgtttgtttgttttttgagatggagtctcactcacccaggctagagtgaagtgccatcatcttggctcactgcaaccttcgccccccaggtccaagtgattctcccgcctcagcctctgagtagctgggattacaggcaccagccaccatgctcggctaatttttgtatttttagtagagatggattttcgccatgttggccaggctggtctcgaatgcctgacctcaggtgatccacccacctcggcctcccaaagtgctcggattacaggcatgagccgccttgcccagtcagctttatttatttatttatttatttatttatttgagatggagtgtcgctctgttgcccaggatggagagcagaggcgtgatctcgactcactgcaacctcctcctcctgggttcaagcgattctcctgcttcagcctcccaagtagctgtgactacaggcacatgccaccatgcctggctaattttttctatttttagtagagacggggtttcactgtgttagccaggatggtctcgatctcctgaccttgtaatccacctgcctcagcctcccaaagtgctgggattacaggggtgagccaccacacccggccctttatttttatttctcctgtaaaagtctgaagtgtagatagttccagaagtataggaaggtcggctccacaaaagtcatccagggacccaggctccttctattttgttatccctatattcactggggtgttgacttcatctgtagggtaaaatggtctcactaccgttgtgtacatgttcttaccaaagaaagaagagaaagaggtggagcacaagtggcatgatatcaaaatcgcatgtatcacttctactcacatgtctttggacataacctagtcgtatggcaaagacgcagggaaaaatatcctctagctgaacagttctgtgcccattgagaacttggggattctattacaaaaaggaagaagagctattgggaaatatttcattgtctctaacatagtttccttcccttctcctctaaattacaataagatttatcatctcaacaatgacactgacctcctgatgtgtgaatataccatctagcaaataaaacagtgtgtgtattgagagtatgtgtgtgtgagagagggttcaacatttcttatgtgcctggagtgtttccatgccacagtaagtgtttcacatgctctattacaactaattctcatcaataaaggtagatattatataatatatacctatatataaaatctacaaaagtggatattattattcccagtatagttaaggaataaatgttcaaaaattcatgaccactgaactactaagttgtagaaactagatttgtactcaggtgtattgcattccaattcccctttacgataatgttttctacataatgtcatattctggactgaccaataaacttaagcatcttttcctcttctaacccatgcaagtaaaattattttttccagatacttaataatgatccatgactgcaggaaaactcagcccacacattgtctaacttgttgtccttgaatagcttgacattgaatttaatatggtgctttatcactaaccaatacctgagaaacggtggtaattttagcaaatactagatttcccattccagggaccacacaaggaaagctaaatcttctggggctttttgtttgtttttgtttttgtttttgtttttcagtcacttgagactgaaaaccaaacactctgtttggttttaactttccaactatcttttggggttataaaactctgcaagtaagttctgcatcatacatgggaattcatatttatatttcataaacagcaagtgaaaatcaccctcttggttgcacactgagaatcctgatctattaaacaggtcccctgatcactccctccatggggccaggatgcaatttgctagcaaattggaatcagaattgggtttttaaagagaaccttcccacagttgtaaacatccttaatttttacagcaacacattgacttcaaaccggactcctaattattgcaatatttcttttaaaagcctgcattgtggattcggcaagcttcagacatctgcttcaaatccagaaatttctttcctttctcaaaaaggttgctctcctccaattagcctcaacagagcagcaggagcaagtggagctctgtagatgaggttttgtatttactgcgcacattccagcctcacccgccttttcccacatgggaccataataactgctttgcctgaatggtcctaggaccaagtggcttttgaactacaaaaaggaaatatcctgagtctctttaaaatgtctgcttgcaaatctttggtttatcataagtaaatgcagtttacctaagacaacatatcccctgacatttctgatttaagtattggaaatgcattttaagtatttgagagaaaacttttcttggtgttgttgatgatggctatgttgttgttactgttgttgttactgaggcctatttttacacatctgaaacacaaaattctggaggctgcttggctgaagctggtggttggaggcagcaactattattatccaaaaccaagaggcagtggtaataatagttaaatttgcctttcatccccaataatttcaaagttcccaataaatggctttacattaaatgctaacaaggttaattgaattattccaacttaagtccaccctctccaagaagcctatatttaaaaatcataggtagagtcttcagaaaaatgtgggcttatatctcaactctgttcctaatgtgagtgactttagaggagacttttaccccctgggttcggtttccataagccttgggactcattttccccatctttaaatgaggagtattaaggtttttaagggtcaatatgaaacgtgtctgtttcatcagtcaacctccaagtttagaaccaattgttcacgggtgagcagagaacaaaatttcaattcatccccgataaggggacttggagagactgaggcacacgtatgacacagtcagccggagctgtccagttggttctaagtgtgggtctggagctcaggggagaaatctgggttgaagctaagatggagaaattatcagcttctgtcttgtaactgaagctatgagaggagaagagcacacagaggttgttcagactgaaaaaagaaaaagcagtaattcagacaggcagagtagaaaaaaaagggggatgagttcatgtcctttgtagggacatggatgaagctggaaaccatcattctcagcaaactatcgcaaggacaaaaaaccaaacaccgcatgttctcactcataggtgggaattgaacaatgagaacacctggacgcaggaaggggaacatcacacactggggcctgtcgtggggttgggggagtggggagggatagcattaggagaaatacctaatgtaagtgatgagttaatgggtgcagcacaccaacatggcacaggtatacatatgtaataaacctgcacgttgtgcacatgtaccctagaacttagggtataataataaaaaaaatgggtaacctgggaaggagcatgagtcacagctagatcagaagagcccccttcacttggtccaatcctggcttggagagactattgaaagcaaacctgcttcctctgctcagcctgctggcagctttctttagacccaagggggcaagatcagttactgctcagcttcgaagtgggtgcaggtctggcttgtggtctcactccccctgcagtcacattcgatattggggccttgttatcaattagctctgatgctccaaaaatattgaataaaaatgattcctactcctctcacctacttcttccccgacccttcacaaaaatgccaatgcaacaactctcttttaattacattgtttgttgggattttggtatgcacaccaatatcatcaatttttacagtccccccaaaatagcccgactcttccgccagcttctctcctcatcaccctctattgaaggcttctggggttttttgttttttgtttttttttctctttcccaccatggcatttcctttcaatccatcacttacaggctacataatctttggcaacttctaagcgtcaatttcctcctccataaaatgaagacaataataataatttgatgattaacctcaactaaaattaaccagaaaggtgcccataagcaatagaaaagcagtaattctttctcctttgtgtcttccccccttttctcttcccttttctgccattttccttctttccctccttcccttctgtccccctcccttccttccttcttcaatataaacatcacttaaaagctaccaatagggccgggcgcggtggctcacgcctgtaatcccagcactttgggaggccgaggtgggcggatcacgaggtcaggagatcgagaccatcccggctaaaacggtgaaaccccgtctctactaaaaatacaaaaaattagccgggcgtggtggcgggcgcctgtagtcccagctactcgggaggctgaggcaggagaatggcgtgaacccgggaggcggagcttgcagtgagccgagatcccgccactgcactccagcctgggcgacagagcgagactccgtctcaaaaaaaaaaaaaaaaaaaaaaaaaagctaccaataagctattagctatagaagataaactgaaaagacaaatgacctctgtcctcctggaggtcagtctttagtgtaaagggaaagttagggtcagttattcgaccaggatgattataacattaggaaagggggcagtggaatggctggtaactgctaattctgcctataaacatcaaggagggctggaaggaggaagtgtgctttgagcttaaccttgaaagctgaagaagagggtcttgcaggctcgggaggtatcatcagtgaaggccagggaggcatgaagatggatgaagacggaaactgggccctaaagtctatataatcagtgacttatttgtttattagaatgtctattctttgagggaaagactgggaacagtatcaagaaacatttggatcacttttcctagcacaagcatgtctgtttgtttcatttctaacagaaattaaaatagaaattgaggtttgtgctgttgactctgtgacatcatgtcacaatttgaggaaaaaacatattattaatactgtctttttgaaggggttgatatgccttgtgtccctccaaattttaaatttaaagtgtcagttgagtcttaatatattaaatgtcaccttggcaaaaattcaacataagcagctctctactaaatctcatacttgccccaaagcaacccttccaaaacaacaacaaacgaaagcacttttgttcatagatatctgctctttaatgcttgcaacaactgtattagtcagttatcacactgctataaagatactacctgaggcccggcaaggtggttcacacctgtaatcccagcactttgggaggccaaggtggatggatcacttgaggtcaggagtttgagaccagcctgaccaacatggtgaaacctcatttctactaaaaatacaaaatcagctgggcatgatggtgcatgcctgtaatcccagctacttgagaggctgaggcaggagaatcactcgaactggggaggcagaggttgcagtgagccgaggtcacaccattgcactcctgcctgggcaacaagagtaaaactctgtctcaaaaaaaaaaaaaaaaaaaaaaattctacctgagactgggtaatttatgaagggaagaggtttgattgactcacagttccacatggccggggaggcctcaggaatcttacaatcatggtggccagcaaaagggaagcagacactttctttaccaggaggcaggagagagagagaaggctgaagcgccagacacttatcaaataaccacgtcttctgggagttcgttatgacaagagcagcaaggaagaaacctgcccccataatccaatcacctcccaccaggtccctcccttgacatgtgaggattacaattcgagatgagatttggatggggacacagagccagaccatatcaacaaccctacaagtcctcataattatcattatctccactgtatagataaggaaactgaggctgagagatgatgaagtctcttgcctaaggtgacaccaacagttagagccagagcaagattctaaactccagaggtccttccaccatcccacactacctcgaaaacgtctccgcttgttgcaactgtcaaaagctttggtaccaagagctctctttcactttgcatgaaaattctggtgacatttttttctggtgataaacaggtagtattattgaataactgtctgtatgcagtttatcaccctcaccacaaagcaccagtctggctatgtaggctttaactgaacccagcagctactgtatactctgggccttgaagctgcctgattgaagaaactagagaatttctctatgtgcctgagctgtaatgtcttttacaggtcatttgagtcaagcaccttttcacaaatcagaaacctaaggcctgcggtcagggaacaagtcccctggccaaggtggtgcagtgtttaatgatactagggagtgatcctgggtcttctgaccttagtccagggctccttgagatatgactgcctttttattttattttgcttattgcttcttaatttatcaattttttgatcaagaagcacatcatgtatataatagtcatctattgttatataaaagttattgtaaagtgtagcagcctagaacaatagtaaataattattatttctcataatttttgtgggtcaaaaatttggaagcagcttagctgcatggctataggttagggtctctcaggaggtggcttgatgaaggctggaggatccacttacaaggtagtctctcaccagatgccaagttattactagttgcaggcaagaagcctcagttcatcaccaaaagacttctcccaatggctgaatgtccccacagcatggaagctctggcttccaccagagcaaggatccaaaacagaaccaggtggaaattgcagtgtcatttacaacccagcctcaaagtcacaaaccattatttttatgaatgtattgtgtcagtgacacaggtcagttttattccaagtgggaaggggccatacaagggcatggacctcagatgcaagaatcaccagagccttctgggaggctgcctaccctatgattcatgttgcacatgcaaaactgctcactctctgcgcaggcccccaaaacctcatcccgttatagcatcagttatacatccaagagctcattatctaaatcagatgcagacaagtctccttaggcctggttccttgaatacaacctctccaaatcagtttatctaaaactgaagacaccagttatctccctccacacacccaacaaacaaacaatagttgggcaagagtaggatgactactttagacacatgtcctcaataaagggggaaatggaggcatataggagtcactgattaagggcaattctgaaatccagccaggctctcgatgaaagttcattaagaatccactccattcctacccaagaattattctccatggctcttgactccatcttctgatctcttgattctactgttttagtcattcttccttttccacgaaggcagcatatttttgtagctgattactctttgtggtctgtttcccgtcttcagaagtttaggtgtccaaagacccctttccactttatactttctcctttctatgtaagcttggcagtgtttctgcccaatacaacttgagtcaaaactttgcaggtcactaataaatcagtttcttaccatgtggacctattgatagagcttctctgttgaccttgccagatagcagctagcttcccctagagcaggtgatttaaaagagcaaggaggaaggcacaggtttcagaactcagtcttattcagtgtttgatgttatacaaggtcatggacatcagaaagtagagattaggggagccattttaggggatggctttacattgggctagggtttatgaggcaagttaataatatttaatatctattatgaaatagatgtttgtgttcccacccccaaatttgtatgttgaagtgctaacacttaatgtgactatatttggagatagggcttgtgatgaggtggtaaacgttagatgaggtcacaagaacctaaagtcagaagatgcattagtctgatagggctggtgcccttataagaggaggaagatacaagatgggctcactatctctctctcttgcactcttcaccatgtgaggacacaaagaaaaggtggatgcctgcaagcctgaaagagagccttcactaggaaacgaactggctggcactttgatcttggatttttcagcaccagaactatgagaaaattaattttcattgtttaaccacccagtctgtggtactttgttatggcagactgagttagtggaatatgatgtctttttattgcattatctgtataacttttgaatgccccaagctttccaagatcactccaatatgctgttaattttattctttttgataaaaattaattaattaactaaaaataatgtattgttgtactctttaagagtacacactaagagtgacatcataaatcaaagagtcttttgccaaccatgggtcctgatttttattccagaagagaagatcaccgccatttatatatgtcctttccaatcagaaagcaacctatccaactgaaccatggagttatgttacaggaagtacagtattactccagtagatctgaagctctccctaggcagagctgccactcatcactgcatagcttatgcactgttcaaccctagggggctccatttaattagggtgtatctgaatatcacctggtagagtttatacaagtgacatcttctaaatttgagcagagcactacctgcataaccatatgcagaggtcttaaacccaatatgagaacctgtgcttgctttcagtaaagccaaccagataacactgctcagccttgagccttaccagctgcaggcagcttttatcttcagaagaaaatgtcatctctccattcaattctccacagatgaggccactaagctatagttagagagaagacttcagggttctcctacccacctaattctagctagagctagaaagatctgtcttctgaagcagctaagactgactttttggagcactggccgatctcttgttttgctggtagagttgctgaaagacttacagttgagcctgagcacaagaatttgccagctatgggggctcccctttcatgctcttaacttcttcctcctacaggtccatctgtctttcattacctagaggtccacaacactctttattcacacaatctctgaaaaagatgcagaggaacttgcacgcccctggagatgagtaactgattaaggggaagagaggaagagtatacaagagaactcaaagagaagagagaaagggacagctttctggtgtggggtggggaataaacttttacaccccatcttggtgatgacagaatgtacctaagatgcagacagtccctccgcaattgcttctccctgtgtgaatttcacttcaaatatctttgttcttggacccacaaaatatgttaatctcctaaatgcatctcaatattgctaagtgccacctccctttcccatatttaccaattatttctgacagtgtttgccatttcaacatatgtctggagctctctgaatcactgagagagtgttgaggctaagggtggaaaacatttttatcttgcagcccaattgtgaatgaatggtagtggttccctggagtgctactttgaccagaacccagatgcttcagctaggaaggctgttttccagattctaaaacaatgtgcatttcttaacccttagcagaactgcgttggtggtgaggcagtcctgtttaaatccaataatggtcatttcaggagtgccctgaaacttctcagtgggagaaatgccatggtttatgaggaattgagccagtgacgatctacagcgaaggaaggcatttgtctgagctaccgtagtactcagaactgtgtggagctgctggagtggagagtgcaatgataggacataatccctgaccctcaaggagctcttagtccaataggatagatagctatgttaacatacagtgatgacagagtcataagagctatggtgcagtaggcacacagaaaagaatgtgatcagttcttcctgtggtctaggaactgagtcatgtgagtgacatggagcaaggttttgaaggacaggaaggattttgtattcgagaaggaaagggaagggtatctggcacattcgagcaaaggtctagaaacaaacagggcaatggcatggcgtacaattggaatgttagtggcatgtcagggagtggtgggagcttaagcttggggccagactatgcaaggcctggtttaacaggctaggaagtggtgagtcaatgaaggatatttcaacaacagcagtgattggatcacattcttgctttaaaaaaaaagtaactgcagaatggagattgggagaagatgtcagtctggaagcagggaggaaggttttaggaagctgtcagggtaatctgggcactaaatgatgaagaatgaaaagccacagaagttgaagcagagaggaggcaacaggtagaatatttagggggtgcactccagagaacaatttggtgaactagaaagaggtgtgtcaaatggtgatgaggaagcaagagaactccaggataactctgactaggagttcgattctctgaaggaaggaagagaggaaaggtggagtacactgcaggcttggccccgacagaagcaggggatgtggaaggaaatgccatcccctgctaccaccagggaacgaggtctgcacttgtctggagtgtgaagcttcagccttacctcacctgccacttcctcctcagactctaagttactgccttatggagaggctgtgtcagggagtgtgggaagcttctaacagagttgagccttccccttccactttaagggatgatcctacacctagaaataacgttctaaatgcaactgctgagctattccaaaattttgtaaaaaatgaaaggaaagatggaactctgaaaagtcaaataaatttgtctaaataatcctactgataacaataataaaataattaaaaataatgtctactgacagtttaagtgtctaaacaattaatgtttatctaaatcctactactatctaataacgcacttttccttctgcaccccttcccctctttcccggggcctggcccaaatatatatatatatttatttatttacttattttttgagacggagtctcactctgttgcttggccgggctggagtacagtgccaagatcttggctcactgcaacctccgactcccgggttcaagaggctctcctgcctcagcctcccaagtagctgggactacaggcgtgcacttccacacctggctaatttttgtgtttttagtagagatggggtttcaccatgttggcctggctggtctcgaactcctgacctcaggagatccgcctgccttagcctcctaaaatgctaggattataggcgtgagcccccacgcccggccaatatatatatatatatatatataatctgttgtaaatgtattgcatgtgttataagccatatatcaaataaaaacttagggaaaaaaaaagacgttctgatctttccccatatccctaaagctcattttgcacaatcttagtgtgtatctactaaatccagctgaatacttatctaatggattcgtctaatagaatcgaatgcaatagattgtgcttaaagggataaatcatatttatattttttaaaaacatgaagtggttaagatagaggagactgaagcaatagtgagaaggtgagcaagaccgtctcctgggcctgttgttctcagagtgagggactgttttagtctagaggaccaggagagccttgctctgtggtgagggcatgacattgtggtatgatagggcctcgctggtacccaccttgattggttgggcaggaagagggtctggagagccagccccgagtcacttttctcctttctttgggatgaaaggtcgacttcctagcccccatcattccatcaccacacttaaagtgtctccctgcaagtgaaggtcttggccagactgggcaacgctccccacttggggtccacacataggtatttctgcttctgagtcagaaaaccattgcactttgggatttcgtggaaacagcaggtttgtccaaattccgtacaaaaacatacctaggtttcgttttccttttttcttagacctggttctcaggttaacacaggtagagacatttaggtggcagcctacatgtgctcctttgcttcagatagccctagttgaagccccacactataaatatgtcatcttaaaactttgcttgactctttgaacctgtttgtaaacattaaaaaaaaatactattttcctgatggagtttttggggattaaatgagataacaaatgtaagcatctattagagttcttcaacacatagcagacattcaatagtcaacactagcagctcctccaggtcgtatgtggtgtctccaatgccacacaggctgccctagagaggtgactgccaggtggtaaaggcaacatcatgaatcatgtgggggataagaaggattggaggataagtttcagttataaaggctgaattgcttgaactctagcattgttgatactgcttgtgtgtgttagggggaggggacatccatgcttgggggccgttggaaaggtatacaaagggtgcctctgaagccaccgcaaggcgagggtgcttcaactctcacgcctggcggtcccttgataacagtgatattttatcagtgtgggctcagtttttcctttggttaaacttcccctgtaccacattgagcaaagccattgtcctcaaaaagaagaattatgtggtggggaaaccacttcttcaggagagttgattgtggccaatttactcctgggcccaaagcaaagccaagggttctgtccgaagaaagaaacagttctcatgaatcatgaattatgtttttggtgtgtcaagggcagttgactgagggaagacgcctgtttctttcactacaggatgccagagctcataactctctctgaagccacagggtctgcctgtcatgtgaggtgattcagaagcagggggactggctgagccctggcctcacagtttgtggcctcggtctggagtgcctgcagcttgggtcagctcaaagactggactaataaaccttggaggccagtggctcctgacccatcaatttcattaaccaactcagagctgtgggcagcagggagaaagtccttatttctccaatgcctttcatactctgtgctctgggagagggcttagagtgaagtccttgcttgtttagatggcattttcttgagacctggggatgagcatttaccctgtatgaacccagacacctcccagtttatagacttggcccagagcagggcctgcctgagctggttttgaactctgagttaagagtgcatccctgcatctagcacaccaccgctcccagtatgcccagcatttcactcccttcccagagaaaagggcaatcctaaaaaaatgggacatgatatatcttagtggttgagagtataatcttacaattcaaaataactaggcttcaatttctggtcctaccatatatagcagatattttggcaagagatttcaattctctaactctaggtttcttcatttatgaagggaataatataaaaggacctagccagctcataaaattacaatgaacattttatgagataaatgcatgagaagcagcacaattcctggcacgtagtaagacttgggaagtaagactcaggaagagctggtttctatgttacccttgcacactgcaactgggacatagaatcccgttccgcatgtactgatagactgaactgtgtccataggacagggtccaggcttggaggatacgctaagtcaggtcccatgattaagaaaagatgagactgaccaccctacatgagactccgggaaacttaagaacaactacttcattcaactaactgaaaagttcaacctactcagctatctccaccctttaccaggaagttttctccaaccttctgaactaaatgtctctcgtctggagtttttagctcctgcacttctttgcttcagtgcatcttctctgggtgctacatcatgttgattcacctatctaccctctcgcccatcccagcctctgagtgcagggaccaagtcatacatattcatcccctagcacacagcctgggacataacagctcagtttttgaatgaattctgagacaccatcgtttctgaatgtgtcttactacaaactataccctacaagtcactctttagtcctccttaggaaaacgtttttttcagtcccatctttcagttctgtcctgcccctttcacagagtgagtcactgaggatgcaggcaaatcagattttttgaagaccaaagtagaatgaaagagtggcagagaggagaaagtagcaccttaggtgcttgcgaagcaaaccacaaagtcccaaagaaccatcagggagctttgcacctgggcttgccaggaaccacagactacagtaggcaggaggaagggagtggagtggaggtgaaggaaacgtgaagctaaaacgactggtttggtttaatatgaaaatgggaaacatttaagcctgcaagtctcctcccagaccttaaataaccaagcaagggaccacagtttagttttttagagaaactgaaatggtgacctgtagcctcagacaccagatataggagagggagggatgaaaggcagtgcagaaaacaatagggttaaagggaaatggattcagccttcttccccaaaactctggaagccagatatgcgctcctcaaggcagaaaatgcaggagtcttgtctatgagaacgaaagagctcagatacgaggcgtccagatgtgggcacctgggaacgccctaacaaatggccaactcgtcttaccctccctccggctgtcaccacacagtgaaatcaagcaaccaagcggcttggtcacacagacacagaggtttccagtgacctgctcttaaatgagaatgaaagacaaggatactaaaagataatggagtcctgccttcatcattctgagacaaaaatcccaattcaaagtagaattcttcgtctagccaaatgtcaagggtgtgagtatagaataaagacatccgtagatatcaaggccttaaaaaacccccacattttctatattttctttcttgggaggttactggagaaggttctcctggaaaaaaaaaaaaggtatataccaagggaagagaagatggagaagatataggactcaagaaatggtgatccagcaaagcaccagaatggcatttgtgcccggagacagaaggtaaggtgaaacagaaagccagagggacccaggaaagaggtctctgagatgaaaaagaagcaggtgcattatatgatagtcttgatattttaaaaggaatgttaatagacatatgatacaatgactagagcctggcaaagactgagaattgatgaacacctggactggtgagtacaattattaatgccagatttttttaaagttgtacaaaacagggaatattatcacaggacttatgcccataataaacaatatttacttaatcataacaatgcaaaaaattattactaattttgccaaaatttaaatgctactattttggaagggtacataagggtatggcaaacattctgtaaaaggcaagacagtaaatattttaggttttgtgggccacatacatgctttgtagcatatttttgtttttgtgtctgttcacaactttttaaaaatgtaaaatccatcctgatctaaggaactacagaaaaacaggcaggtggctggattcagcctgtaggcagtagtgtgcaggccccaggaatcagggaaagagtgtgtgtgggtagtggtggtggaggcagaaacaagatgctaaatcctcacctgtcagtagagaaatgtcatatataatatgtaaatatattcgtcagaaaaaaaaatcaatataagtgtgttacttaaagacaaagagctaaatccaacgagaaatagttaaaagacttttaaggattgcctctaagacttgagacccagagttaggggagggagaatggctcttcattttgccatcataagcatgcaaacacagattgatttctgttaaactatgtgcatgtcaatttcaagtaacatggattaaaataacaggaagagttagttataatctggtcttggctactattgcctccagaacatcattctgtcctcccactgtagaccagcaatgtgttttcatgctgctcatctgagaactctgcttggtctaagacaatcctgatacctccgaccccttctagagatgggagtgtgcaggatcccatccttaaatccatcacctgatgccttttcactgacaacagttattgggccagggttgtgcatctacattagccccatacagaaggttgtatggtttgaagagaggcatagacaagaaagtgaacagtcccatttactactggcaatcattttaactcagcaagggcttcaggttggaactgaggctgtgtttggtagagcagagagatgggtcttcagtgacatatttaaccagctgaataaacaaaatctgacacccacccagctgttatgtcctcctctcgatttagacttttttaaagtcccttattgatctctgcattcccagtgcctggtattggctattctttttactgcttttgcataaatgaatgactctacctagagaaacagaaaggaaaaatgataacaacaactctaaataattaagggttacaaatttaactgcgtgtgccccctggcccctaccagaggacaccccattcagcctcagcgccccccaagccccagttgcaggttggggctcttgacctctcttcttcagctcccaagtcccctctgccctgtgacctgggctaagcagccccaatggaatgtaaaaagaaatgtcaattgctctttttctggtgtataaatgctactttccatcagaaatagttttggaccaaaacaagctttgaaagagcaaaaagcttagctcaatcaagagctaccttgaagataggcattttggttccattcctgttgccatgtgcttcatgggagcctctgactcattttctattcattcccaggctgatcaagaataatgatcttagattcacatccctggcaagtttccttacatcctcacaggtctgtcagctgagtctccttctgtactccatggcaatgggaacacccggctgaaatacctcctgaaagaaatgactcaaaatggtatttatcttcaaaagagtgactttttatttgcaaccttcaacaccaggcaagctttcaggtaaacagaaaggtttgttcccgggcagccagctatgctgagctgaatgtatcatttgctgtgttcctggcactaaaggcagaacttcaagtgagaagttgatgacagaaagctctgggagtccggggcctgaatctggggtcttgcctcagaagctgggaaggctcagagctgagagcagggccagctcactccctggagaaacgattctgcatctagtgactgcaggagatctccaaggggcatttctcaccaagaaatccagtctggatattgtctcctgagggccaataagtgtagctgggatgtgggtgaaataagagaaagtcaaaggaaacatttcagtttggctttagaaatgtccctacaaactcatgatttgttttccaaacattttgctttgaaaaacctttatgaccaattcatgtttgtttctgaggtgagcactgagtatttatgataatatggtttgcatgaataccagatgttatgcattgagtgatgtccccccaaattcataagttgaatccctagcccccacagtgactagggatttggagacagggcctttgaggaggtaattaaggttaaatgagattataaggggcagtgaggggtgtaaaaagagaaagagacaccaggggtgtgcacacacatagaaaaggtcacctgaggacagagtgagaaggcagctgtctgcaagccaaggagagaggcctcaccagaaaataatcaaccatgctagttccctgatcttggattgccaacctccagaactgtgagaaaataaatttctgttggtcaagccacccaaccagtggtattttgttatggcagcctgagttgaccaacacgctggagtttatcatacacagagttgattcctgtacattattttaatctgttccttataatagtcctgaaagaaggagattattattattctaattttacaaatgagattgctgaaactgaagagatagacagagatcttctgatagtaaatgcaggcttctttcagacagtggtaatgatggaagtactcaaacctcctttatcaccctctccacttgtaaatggctcctcgattggcttcccctggcacctgggccttcaccagagagctgcccatttagattaagacactgacactctggaaggcctctaagaaagggacaatgacttccttggctgggcaagtgcacaaatatacttggctccctctaacagagaagcctatattagttaatctgcactctttacacaagctgagctcatcttaaagcagaggccatggctgcttctgccagtcaagggcacccagaaagaagctgttagaggaggaattcagtagtgattcaggtgggacaaggccaaggaaagaaaatgagaaagcagcagaggcatccccatgggttccaatgggggccggggtagaggggatgctgtgggtgtccttcccaaccggaaatgataggtttcttgaaagtgtgtaaataggaataattcttagaatgtgtgaaggtatggcacatcgcagggcttcaattattatttgttgaaggaatgaatgatctctaaattgggtcaaatgaaagtttcatgtcctttagaaccaagacctttgttgttgttttacgttttctgttttgtttgtatttgtttttcgtaatttgctgtttacaagatactttaccatgcctggtctcatttgaccctcacaatggccttgtagtgtttgtaggattaactttattttacaagtaaggaaagcaagttccaagagaaaaaactaattcttcaacatcccaggctccgtggatggtgtaagcagattttgaatccaggtgccccatccttcctctgtgccatgtgtcctcctctcttcctgtggaagggccattccaggagatggttgttcccatgctcttgtcctaagaaatgacaaaatacactttcctccactgtcctcacagctttggagagaatgtcaccatgtgctggagctaaggatgaactgatatgctgccaggaggctccagctgtttacctgggccagcatctgatccagttggtcaattcacaccaactgttgtcattgctgaatagcttgcatgcatctcttcaggctgggaactgagtggtgacacaggcaggagaagaaaggcagtccctgctttcctgggctggtaggaatgacgtgacactggggtcctcggcatggtgttcccagtcttcgtaggctgaccccagtctgcctcatcttccccacacccctatagcaccactccacaccctcctttccgccacactgagctggaagaattacgagcaatttaccccgacaggtcttgctctcccatgcctgtgccctcgcacacactttttcgtctacctggtggcccttcctctcctctccttcacctaggcagtttacaaccctttcaaaacccaggaagcaggtctaagtcctgtcctgggtttccatgtcccctcttgccacatcacatcatactcattcttttttgccttctcactcaagtccacactttttgaaggcaactgacattcatctgcggattcctaacacctagcacagtgtctaccacccagtagattagcagcaaatacctgtgaaataagtaaatgggccaatatcaatggttggagaccggttcacgtaacctcagcgagtccctgccttcatgctgtaggaagcacaacacattgtttaagacaaggactttagggtcagtgtgtgtgggttcagatcccagctctgtcacttataagatgtctgatcttaggcaaaacacttaacctttctctacctcagttgtttcatctgttaaatgcaattgttattaagttattaataacattaatgacaaagaatcaattcatttaatcctcactttgaatccatgttggaaactccatagcaacatggagttcaggtgaggattaaatgagttaatccactaaagcacttggtgtagcgcctgttacgtaagagctcaagaaacatcagttctgattatgatctaccacccagatcctgaacaaccactggggagcctgcagcccctgatctgtcagggcagatccatggattcattctggacaagggccaagcaaaaccctccatcagcatctttccaggtgagcagagagtccgagacttgctgagtctccccactgtggctacatcccagatcctatccctgagctcctcccggaatcttgctcacctattctttttattttgtttttgttttcagtaaatagtactgagtgtctgcttttgtgcagcaacacggcctatagtcaagagccagacagttgtggttcctgccttcatgagatggcagaataactggaaggagataaattgaacataatacttgtggtgactcttacaagactgaagggtgagaatttagggaagtgggcacctaacttcagcagtggatacagacaaggcttcttggaggaaaagccatgagagttgattcctcaaaaagttgccagtgatgtgggtggtggaggagggatgggtgccttccaggctggcttaggagcaagtatgaacgtgtgagctatctctagacattctcaaaagacccatccagccaaagatggatgccagggaggtcagtgagatcctgggacacttttcagggccctgtggatccctttaaggattttgaactttgtctttaaacactttgtcttaaaacaaagccactggacgttgtgggtaagcgagtgggaggtgttgggatgacctccatgtttctagtttgggaactagcagagtcgtgtactatgtcttgaaatgaacggttcagaggaagcatcacattttggagggcagatggtgagtttgggatacccaggggtgtactggtttcctactactgatgtaaaaaattaccacaaactaagtggcttaaaaccactcatattgattattgtacagttttgaagatcagaagtgtgacatagtcttaggctaaaaccaaggggctggcagagttgaattccttctggaattgagttgtattccacaggggcatttgtcccttttcttctctatcttctagggtctgcccacattccttggctcatgacccttcaccactccgacctctgcttctgtcatcacatctcctctgactctgacccttttgcctccctcttctgtggttccttgtgatgcccttgggctcacctggataatccaggaccatcgccttgtctcaagatccttaacttaatcacattggcaaggtgtcttttgctatgtaaagataacttattcacaggttttgaggactaagacatggacatctttgaggggaagcgttggtcagtctatcaggtagagttaggagttaatttgatatgtaatctggagctcagaaaagaatgtacattagagatataatttggaagttactggtttcagtgaaataattgagtcatgttggtaggcaagataacccagtacaatagctccaagtaagataagtgaggtgcaaactaagcattgaggtcctccttcaagtccataaagtcatgcagaggaagaaaagcaagcaacagggaagttgatatctcttggggttccttcctcaaagttctcagggacttgtgttatatccatacctccaacttcccagggccaagttcctgactggtcatactacagattcccacaggctgcctgccaaaagagagctccagcagggaccagagcccatgcagggatctcactgcactctgctttgtagtcaatcacttgcctttgcttgtctttctcccaacccaccagcagggttggagatgtccttcttagacccccaggcacatccatagaacaatgagtctaaaggtctcctgttctgactgtctgggtctccagccccgagcaaatgctgagagtcattagcccagattttccaatctgctatgctgctggcttttgaatcttagtccttacatgaatgttgaagtttttagaaaagaaagcatgaaacaggcatgaaacacctgggatcactttcccagccctagaaataccaggacttgaggtgagtgcctcttagagtttctaattaataaaataatatttcttgctgtgggggtgtaatacaggaaaacctcttgcccaagaggtgacccaggcaggaaatgtaaataatttcgagagttgtagatatagtcctagctgacagtctggctggaagtcagtgaggcaaggtgtggaacatagggatagtcttagtcttgaaggggaggtgtggtctgcaagccatgtgctatcaatctgcaatgagataagtacatatattgagagtaagcattcagaagagttttccagaaattgatatggtcatgacgtcaaagtgcataatcatttttctagtaattcattttgattacattttataaaagtatccatttacaacagaatttttaagaacctgatccttccttagagatcatttgacaaacacaggtatagaggatttccacagcccatccctccaaatttgacccttgtgcagagggagcacagaggtgatttgtccagtgggagtggggagcggggcatttagtagagattgtgctgatgttacaactcaaaccctaagaattcatttggctggggtctagcttcagcttcatggcacactgatgcatggtagtaaatggtgacccttattacatgcctgttttagcagggggaaaagtaaatgcacccttctgtacagtatttcagaaggaaggaccaatcattgttattactgactggccggtccagaatttggaacttgctttcctcaggtttttgctcatgctgttcctcccacccagcaagctcttcctaaaccatctcctatcaccatgatgatttctgcattcatttcagagttaggctctgcatttattcctgaggcgtctctcctgcctgtcccctccactcagccaagttcttcatggctacttgcatgtctcctggatcacacagctaactgtgcaattcgttgtttaattttatagtttcactaaactgtgagtttccttggtacaaagctctaatctttcttcactgttaggtcctcatagcccagcaccctgctaggcacacacacactaggtatttaatacatatttgtgagcaaaggaatggatggataaataagaaatgaatgagttaatgaattgatattttaatagcctcttccccatagttggaagttctgcttagcagtctattctctcacttttctatctcttccatacatttcagtgctggctttgccaacactgaaagaaaacagtcgacaggctaaagttccaactccttgccagcagatccttatgccacgctgtcatgggaaatctcgaccccttgccacccccttctgcacccctggccctgtgtgttcacctctagggagattcaaagagggtgagcggcagcggtcataatcacttgctatcataatgtaaatttgcaaacctatgtaatgtaccaatctaatttcctttgaaaaacatatacccagatagtctttaagttgtgaacaatgttttgtttcattttgcagatatttaagaaatgtgaagcaggaattgttaataacaggaggaaaagagtggcctcttgtgtaaagcccggagtgctgagcttgtgtgtgcatgcatttaccgccattaatgataataggagttaggtgcataatgggtgttcctgtaaatctatccagaggataatataccccttaatttaaaatagctgataaagtgtgaataaaggcctctcatctttacaacttctcatttctattaagaaaggaatcacataacattttagggctctcaactaattaactgtgcatatggatttggagggcacgtgctttgtgcacaatagactattcccccatctacattcataggcggcggaagctctggggctgagaaccctggatgtgattgaacttcatagcaccggctttgattggaaggggttgtctgcttaccgcttgtcaaaggagaggaatcgctaaatcagcggtagggacggaaggaatgggaactgaggcaaacaagagagctaaagaaaagagattacatcctttggaagattctaagtgtctgctacattgccttgaaaatctaacacatgctgggagaccctgaaacctgttcatagtggcaattctactgtaaaacctacttcttagagatcaaccatatgaaaatctggctgtttggaacgtagaatgtgcaaaaaagaacaaaaaaatttgattcaacataaacacataaaaaggtctatgtgctttccacttgctatattgtattttatttgtgatccacccagctcttgatgtgtgccaggcccttctggctaatgtcgacattagttgatgtttggtctttagctgtgacatatataattaacaaacaagataaatatacactttgccattctgatataagtggtgtaattagatatttctccttacattccttccttagagagatattcacaatcagcaaaaggatgattaaaacaacaaaccgatacatttccagaattcaacaaaagaaacaatttctgtaaaagccactaattcaaaaccaaagaaattgtttgatatgaacacttagtaagcactcaatgaagatgtgttcaattaaatggaattgaattgaaaattcaaaggaatcattcatattcaattcaaaacagtgcttttcaaatgtcaggaagttggaagctactcctttattcacaatttccatgtagtttagaaaaaaaaaagtatttgtcttctattatttcttattcttccctatgtaattagaggaaggctataaagtcttattaagacaatctctagactttttaaattacatgaacaatataaagcaaataggcccttttagggagagggatttttttaaagatttgcatttccagcagagccatgagtaacagagccagtgtcaaggagagtggatgccaccagcgttcaatgaagaaattgtatgatctgccatttagcaatttcacttctgtgtcttttttctcttccctaaacctacacccccaactcagtttctttttttttcctctgttgctgatccagatgctccaaagaaatcaatatttgttgattttaggacacaggcagtaaatctggagtattttcagcttgaaggtgtttctctctaaccctgctgaataacatggtgactttgctactcagagtttaggtgaggcaacatgtgactccaaggcatgtctgtaaaaatgtccatggagcaagaaggagactcataacgttgctttttcaaagtgcaataaaacacccaaatctaccaagagctagtgggcccttgcacatgacaattaaacattaacagccccagggccctgggagcagggcccagcaaccctttgaagccctgtttgccaattaaacaccgtctgacattcgagtcaaggtggcagggatccaaagcagagataggaacgtcaaccacttcaggggcattcattagctccccagacattcctggcgtggcctgtttctttactattgccaaatccacaccctgctctggaactcaggggctctgagaaagtttactcagataagcttattatggaaatagcactttgtcaccgtttactactcactccttgttcaattatcttttatctgtttagagtatttgccagctctcccaaggttccctgggatgaggccactggattgaaagtcctcactggggctgtagaaggggtagggggaggtaccactctgtgcttgcctttctggtccaagaatgctgagctctctccagcattttggaaactgctaagagggtactagtaaaagatcttgtattttctgatcatgggaaaaactgcccaaccttgagacagagacctaggtatcctgaggccccacagtcagcagaaagaaggatggtgtgtcattttgattataatagtgagcatttaatgcatattactagggcagaatgatgagcagggaatttcacctactccctaccaccattcatattagacgctctctctccgaatttatgcatagctttggaaccaatataattgaggtttttgttggtgagcctcagtcaaatcccagtcgccaccatcaccacggttcctattgagtcatctggtctattatcgttgtggagtaccatttttgtattttaatgccttcagattgaatgacttctctatggtgaactcatcccagatgtcaggatgcatgttgcatttttgctgctgtgatggttttaaaatatgcccataagttctttgatactcctcccatcaaaaggtagagattaattacctttcctctgagtatgagctgaaattactgactcacttctaaccaacagaatgtagtggcatccaaatttaggtaatacaggtcattgaagcttctgtcctgctctttctctcttattgctggctctagtggaagccactaccaagccataaggaaatgcaagaagccctgtggagaggtccctgtggagaggttcacatggggaagaactgaggccttctgccaaagtccatgcaaccgagcttagatgcagatcctgcagccccacacaagccttagatggtttgtcccagttgacagcttcagtgcaatctcagcagagtcaggaccactcagctgatctgctcccaaatttgggataatttgttacgcagcaatagataactaatatacctgcctcaactaattgccaaggaactgcaaaaggatcccaggcaagagtcaccagaccttgttgtttacaggctgtgtgaccttggaagatttactcacctgctctggacttcagatttctctgttgatacttgctgttctagttgatgtgagagtcagtgaagtgtttttgagaaattaagagttctctgatatcataattgtattgttgtccagaatatcttcttctgcagtgattccccctcttgctttcatgcttcagctaaattaaccatttctcctcaaaagaggcagcttcacttttgccctgtgtagaatgtcctctccctattctaattatctaaaaaatgaaatatctctgtgcataatgtgctcagctgttcacctgcagcacaatgtctttctgttcattcttccttctaacagaacccagatcactttcagaaagtcacctgctcccaagctactccttatccccagttctaagaggaaactttgatcgattcaagccaatcagagttatctccctccctttgtcagtgactggtttagtatctgtcatgtaatgcaattctggccaatgctctgggggaattctgggaatgtttttcttgcttcagagaatgagaaaaagacgtttttgttcttcccctgggccttcatcctgtctggatttggctcctgggacttccgtgtcattgtactgcaacccaaaactcagagggtgcagctgagagtcattgcagagaagtggagctggagtcctggccccacggcaccataagcccgcccctgtaagaaactcttagtacttgggactgctttcctgccagagccagtttgagtaaggatgacctactgtggttaaatcaggcttcagagccagggcaaatctcatctcctgcaagatgcctgcatgggcccacccacccttgaaggcttttctcagcttagaggtcctgtgcctctgcctgggtgggcagctccagtggtcatcactggatgcacacagctttgttccagtattcaatatcaatgcatcacaccctcacttaccactgcacccaccacactgagagcctcatggagaaagggcagattattagtgtctgaattccccataccagcaccaatcctgcacatgaatatgttcagtaagcccaaaaggttctgttgaaccttcctctaacccagtgggtacctactgacctaacagttccataacttaggaaggcacacaaatgattcctcacataatatgcatcatttgttctgtgatattggtttctctgtctattcggagaagcagctgggattttttttaattgccatatattaattacttcattataaatggatgaatccaggcaacaaagccacttactttctgttcaaagcctctattggttatttattcttaactatgtgagttgaaaattataatctacctacaacatgtgagaattgagtaagataatgcatgccaaaacccatagcatagtgcatgggaagcaatcagagatctatgaattgcaggggttctacaaagtgaatgatgcctaaatagtaaatactagtgcaaatctagataaatcaatggaaagagagagcctgttcacagggattagtactaagcaatgaactatccagatcttcactaagaagggtaattaattgtggggagtgactgagactttattggaagacatgaaaggctgacatgtatcattgccctattctttgtaacttcaattgaaggttttactctcttatgatcaggtactgcaataaaatgactacaatttggaaatcaaactttctcttccatgtagttgctgaatgaaatttgtcattatttttccatagttgaatatactatctggtttgtgctcttcattctcccaaataggaaattttcctgagcaaggagagtcaagaggatggcctcagatgtatgaagctcgtcactattatccatagggtgcaccttcccaatctttaatgtttcaaaagcataagaactctcagaaaggccccctttttgcttaaattgaaatgagaaattagtgttagtatttaattctgccttgtaatcaatgtttccaacttccttccctctctctgccccctcaaaagcaagtttataactacccaactttaaactaaaagaattgtttctatgggttatgattgagaacagtgtgccagagaccaagactgaagttgagattggatccccacaagatcatgtcatttttcacagaaaaagggttttaacccagatataataggcaaccccatgagcaaaggtgaccactgatcacattggtcaaaggggactgggcaagagtgtgggggctcacatagaccttgactatgaggtctcaagagacaggcacaaggcctgcttcatctctaactctccactacacaccccatagtgcctgaatcacacatactcagaaaatgctgttgctctgaatcttcatttccccaaagccaatgggatatttaatggcttcgttaaataaatgtagaaactgtgggtctcataggaaattgaaatgaaattagaaacattttgaaatatgcataaactttagatgtttctctttagccatatcattctgagtgttatatggaagtgaatctgtaactgcaggcagagagaagagaaaaaacctgctagtatttcttcccatcaagtagcatttaaatacactaaagatcaccaaatatgcatgtatgccagcatacttctgaatcagttgtttgagggaccacttaaaaaaaatctaaagaatacaaagctattaagaacatactggacaaaaatattttgggacctggaggagataaaatacatattcaatttatagactcatcacactttgtcaccaaatcgggtagtacctacagctgagaaggaacattacaaagtctttgtattacggtgcttctttaccttctatttacaaagaaaagtgttggagtaagactttaactttattatggatatcaattcctgaaaaagctctgtgagttagtctctagtgcaaaattcaaagctcaaaaaatttacaagttttttgtttttgtttttaccatgataattttgatcaaccattgtggctgaaaacaagaaagaccttcctatgggaatctttcctacaactgcattgttaaacccagccctatttgttgcatagccattccttccctatggggttgtaatgaaacttttattgtatgctgccatctgcttcaaggcaatatctcctctttttattaaaatgttaggtgagctttgcaccagaatcacatatttaatttttttaataactgtagctttatagtgtttgatatctggtagggaaattccttcccttcctttctattaaaaaagcaaccatttaaagtaaactgtaacaaaaatttaaattatttatctgtttatgttccagatgaattgtcaaattattttgtcatgatttttgaaatctttatggaatttctgacatcagtattgtattcaatctataaatagatttggaaggaattgatacctttacaatatgtattcttctctttgaaggatatctatttttactcactcgtgtgggtcctcctttatatttataagtaaattatttctttttttgttctcatgcatttcttatttatgttattgttgggtattttatattcttttgctattatgaatacactaacttctttattatagcatcttctttttgctgaaatataggatatccatatataatattctataatttggctttttgttgaattcttaataattgaaaagaattttccctaatcatctttagttttctaggtagataattgtatttccagtaaatgagagcactgtgctcctccttccaatatccttcctctcaattctgttccatgtactactgtgctggctgaacctgtccacttctcttccccaccaatgccactcttgtccaagttcacgtcagctctcaccttcactgaggccagagcttcctgccaagtctaccctctttcccactgacagcctcctagtttattctcagtactgtcacctggacaatcttcaacatgaaatgatcatgccacctgaatgcatcaaatgtcaatgtctttctgtttctttcaagataatgatgaagctccctactatggcctctagtgcacaacatagctggttcttatctactttaccagcctctgctaccactgcaaacacccacctgtccaagccccctctaacgtgtcatttctagaactgttctaagtacccctcttcacctagtaaactcttaacatctttccacttgagttttagactcactttctctgggaagccttccttctagatcaactccttcagttacatatgctcaaagtacccatggagctctctgcagctttatcattaattctgtttcacatgctacatatgattacttaatggctatctatcccccttacaaactggaaactccatgaggctaggaaccgtatatgtttttcacatcattttgttcccaatgcttaacagaatatctggcactttaattagccagactgattaaacatttgcaaatacacaacatctgcaaaaaaaagttaagtaataattgtaatttttattttttccttattttggaaggaacatccatagcatttcaccatgaagtatgtttgcagtcagctgctgaattgaacacagatattctttttcatgttaaggaagttttctccaggtcctaaattattgtctggccacatgggtacagattgaagcttctgctcaggtcagtccttctgggcttattttctgtcctcagcctcacctacagtgctttgcttctgatactgacacttctctaaaggcaacattctatagccaatcctcttctatcatttgtcttttgttttgtttaatatctcttaccacatagtgaatggaagcttctgatgaggagggtggagagtagtaatgctacaaaaaaagatcaccttttaaaaatgggctgtatcggctgggcgtggtagctcacgcctgtaatcccagcactttgggaggccgaggcaggcggatcacgaggtcaggagatcaagaccatcctggctaacagggtgaaaccccgtttctactaaaaatacaaaaaaaattagccgggcgtggtggcgggcgcctgtactcccagctactcgtgaggctgaggcaggagaatggcgtgaacccgggaggcggagcttgcagtgagccaagatcgcggctactgcaccacttcagcctgtgcgacagagcgagactccgtctcaaaaaaaaaaaaaaaaaaaaaaaaaaagaaggtcagaatggctgggtagcattctcatatgcagccattgggtgcctagaccctggtaatacagtgcatggggagaagcacaccagtgccccacctctgtcccagggtggctgtgctgatctttttcaggtggcaaagcgtttaccaattacaattcatcattctcagcttctctgccttgtattctagttgatggatgaattttttccagtctcgcaagagttcaactgcctttataatgtgagggtatcagagcttatattagggacaccctgaagcagaagtctttaaatgatatcaaaaacaatgactgccctcctaaggtggagcaaagaatccagagattggctctcactaatcggtgctttttcaagagtgggcattggtgagggggaaaaaagaaagaaatctctagaaactggggactcaagcatgggaaggaaggaaaagtgagaaacatgtcgcaaacagctattatgccctgagagtctttaaatcagggactggcatgtcaccagttctgttctctaagacttagtgacagctcatttatgaaaaataaataaacaagatttgatgtcagatagaatgtctattccatgaaaactcttgttgcatctggccatagaaagctgcgttcctggacaatcattcctcatcaatcccatgagggacactttggcattataagcatggcagacaccaagaggttttatagtctctctgttacacttattatcagaatgttattaagaacttggttcagaacaacacagcaaattgtgtctacggaaccccgtagtaacaatttctccatgtcccaagtctaagaatacacatttttcctgagcaactaatatatatccatcatgcatgatcgaattaggtaactgatcacacttctgtctacactggctgctgggacattcagagtccacactgcagctcaacataaatgactgcaggacattagagtatgccactagatattaccattattcttctaattttgcaagttttactgtgttgataattatgtgcttttaatggtgttttatttttatctaagtctatttttcatatctgtgtaagctacctcaggtttttttggaaaggggtcaaatataagtaataattaagaattgtcatctttgtatgcctccatggtatggtctcaacttaatctggaacatggatgcccagaaacaattcataaaagagaaagagaacattcataagcacccagactcatgactgtcagcttcgcctgaactcctgaagggatatgatatgcactccttcccctatggtcagctccacttcagcttatttgcttgatgtgtgtgtgtagagggcacagccctgtgtctgacacatagaagtgcttttgataaattttgaaaacataagtgcgatttttgccttggttcccaagtttgcacaagccgtctcttcagaaggatggcaacacccaatgttacaggcagaacagatgggctatcctaggactccaggtccagtagcaatttggcagttttacctctaaaatcgttttctaaaaataagtaattcaaattttgtaaatcaaatccccatgaaaataaaacaggtggggaaaaccatttttggctaccatcctcctatctttgccgaaccagacataaggtaacatgttcctttggtatggtgcagtgttcaaagtctctgtggtacctgcagccatccacagacattgacccagaaatgcttgcaggtaagaaacttgcccccaaatgccactatctacccatttggcatatgaagctcatcacagtgcaaccattcattcactggacaaacatttgttgaccacttgctatactacctaccatgtgccagttcacacactctaaattggaaataaagtttcagaaatagatcttacatgtgcttgtattttccttcattttgtcttttggaaatatatgggtttatagaaatcaattttgatattaagataggtctgcaaatacaatcaatgatatcagaggtatggaaagccatggatatctggcagatatattgttctgttccagagtgccatagttatattagacttgctgctataaaattaagctcaaacacaaattttgctgctataaaattaaactcaaagacactcaacacagctatagaattacactttaacaggtattggcttaacaaaatcaaaagttgtttctagctcatgttgacagtcttgggaaagtaaataagtgcatgagatttccctccttcccttggtaattctgggatccagaactccttccaagtttttctgtggttctgctgctagggctgcatcatcgtctggattcagctgacagagaaataagtatgagggcactcatgcccgaggattttatgggccaggccttataggggcatcaatttgccggtatttcctcagctataattcaggtgcatgtccacatggccacacccaactgcagaggagatagagaaatggaacccagctgtggtccaaaaagaagacaattaagattttgatgaacaattggcaatttctgttcacagaaagaaaaactagttccagtgggtgttaaatggaaaacatatttgagttcagtaaaaagcaaaaccacttaaaaattgtaaatgtccaatggtgcaacacgtgctttgtgatgttgtgagaagttccacatccttcctcaagccacgatgagacaacctatattgcagggtggctgcaaagatagtttcggcctagggtgcaactgaagggcaagcattggctcataataacttacagtataaaatagtttattttttataaaatattacttcatcagatcttcagttaaatgttctcaccttcaaagtccccccttcctaaaaaagaatctccatctccttctgacatctttctttagtttatcagtacctggatttatttttatttattattattattagtagtagtagtactagtagtattttgagagagggtctcactgtcacccaggctggagtgcagtggcacaatctcagctcactgcaacctccacctcctgggttcaagtgattgtcatgcctcagcctcccaagcagccgggattacaggtgccctccatgacacctggctaatttttgtatatttagtagaaatggggtttcgccatgttagtcaagctggtctccaactcctgacctcaaattatccacccacctcggcctcccaaagtgccaagattacaggcgtgagccactgcacctggcccccggatttatattgcatgctctgcttgtttgtttatggtctgtttcccattctgattctgggatgatagcttcttgagggcaacgactttgactctgttgtttaatgccatttacctattcctaggacagtgcctgggcacaaatatatgcaaacatttgttgaatggcacaaatggataaaaaaaatgtggtatatgtacgtgatgaaatactattcagccataaaaaagaataaaattctaccatgtgtgacagaatggactaacctgaagggcactgtgttaagtgaaacaagccaggcatggaaatacaacaaacatgacatgatctcagtcctatgtggaacttcaaaaagttgagctcatagaagtagagtaaaatagatgttactaggggctagagggcacaatggtgaaggggttggggagaggttagacgactggtacagtgtttcagttcgatgggtgaaataaattccggtgttccagtgcacagcaggcccactatagtaacactaatgtatgtatatttcaaaaaagaagttagaagagagcaatttgattgttttcaccacaaagaactgataaatatttgaggtgattagatatgctaattactgtgatcctatcattgcacaatgtatccatgtatcgaaacattctgttgtaccccacatatgtatactattattatgtgtcaattaaaatttttcttaaaatagaaaaataaattcggtaaatgactaaaaataagaaagataaaagcagaaacagtctatacaaatgattaagctacagtgcaaacttcacataaatttaagatcaaagtgctgaaagagcttagagtactttgaattcagcatcttcatcccttcattcttttgtttgtactgtcagtcaaaaaacatttgaaagagggaaagaaaagagggggagagatctcttggggtccttcataagatggagctaaccccactcatgagggctccgcccttaggacctaatcatctcccaaagtcctcaccttcaaattccgtcacattggggtttaggacttcgacacaggaatttcgtagggacacaaacattaacttcatagaaacaaatgtgtgttgaagtgagatttcacagtactggtgtgtcatttttgtttttgtttttgtttttttgagacggattttttgctctgttgcccaacctggagtgcaatggcacgatctcagctcactgcaacctccgcctcctgggttcaagcgattctcctgcctcagcctcccgagtagctgggattacaggcgcctaccacacgcccagctaatttttgtatttttagtagagacgaggtttcaccacgttggctaggctggtctcaaactcttgacctcaggtgatccacccgcctcagcctcccaaagtgctaggattacaagcctgagccaccgtgcctggccagtgtgtcctcttttaagtttccatactcctatgggtaaagaaagatggctttcatatgtgacatagatggaccaaggagaaatcacaggacttgaaatcagaaaaatccagagcttggttctgccacgtgcaatattgtgatacccactttaccaatcagacactacaattcctcatctgcaaactagatccataaatatttcctcagttgatataacttatcttaaaggcctggatcatagtaataaatcaatagaatatcagttgaattaaataagatcaggagacacagtcaactacacatcagaattgtggaaatgctgtcttgccttgctccatgactgtatgagtgaataacaaggctggtcactcctcacgcataatggccctgccccacactctctaacccttgaagtgctgaacacatgttgggtttaacataagtagtcagcaaatcattgttgattgtttggggtttattaagtgatatctcacagatttgcattagatagtcactcattctttgtctttgtgtataatcataggaattgccctatactctctttataactgataaaatcactcacatttgtggttttattctatcctaagttcagtcttaaaaagtagacacttttatcaccactgtacagaaaaggatatcgaagtgtttagaggttatgaaacttgcccaatgtagaagactttcaagttacagagacacagcctcaaatcctcttctgacccccaatctgtgcttatccaaccccaggagagctcctcaagccactcataggccatagaacaccatgggatcacaaagaaatctttcctggctagaaacaacctatacattcctttgtaaggcttccaaacattgtctgctaatgaggtgcctctgggttaaacagcatcacttgccagcctgcctgagatggtacaacttttttcagaccttgacatcatgtctgtaggattatcttctcctctgttatgtaaaaatagtccttgcactcatcatagccacagccaccgcacatgatgcctccttatctgggacatgcaggcctctcctgcagtgagctccacttagccatgtgccctgggaacctctgaccggtggtcagcagcacggaagccgaaacatcctgggctgttctgcggctgcctcttcctgacagtttcccaagtctatctctggctgccagtgttttctttttaagagtagagaatgttactcactgtctaaactgatcagtagctcatacttaatgatttattaattggacaaatatttgttgagtgcctttactggagccaggctttgttcatggcatgtgggataaatcagtgaacagaagagacaaccatcaccttcccaggggattttacattctagtaaagggaagtgaattatcagcaacagatataacagttaactgaagaatctagcataatggaaggggacaaacactatggggaaaataactcatggaggaaaaaaatgctgaagaagtcagctggcaattttaataaagtaaaatgtaaatagtcctcattgagcagcaatatttaagcaaagacttgcatatctgcaggaagagagtttcagacataggagacaatcagtgcaaaatcctgcagtatcagggtgcctagcatgttcaatacattgaagaaggttagtgtggctggagcagagtgaggggtgaaaagcagagaggagatcagaatggtagggccaggtcatgttgaaccaggtgacataagagtcctaccaacttaaagtataataataataaaataaaaaaataaaaaaattttaaaaagtcctaccagcctgttgaaggactttggcttttaatatgagtgaaatggggagccattggagagaactaaggagaggagggatacagtcggacctatttttaaaagagtagctgaccactctgttatgaatagactgaggatgtggtgagtgggggcttggtggggagttggcaagccactgtaggagcagggaaaacaggaagcaattgtagtaatatccaggtgagagatgcctggagactcataggtagcaaagcaatggacaagatgatataactggtgtgctttcctgatggattggacatgggatgttaaagaagagacgtgaatgactaaggtgtggggcttaaacagtgtaagtgcctcaactactgtgcatatgaggaggagttattaaagtttccattttccttatgttaatgttaagatgtctcatccacagtcacgcgtatctgttgagcaggcagtgagatacaagccttataaaaagacaaagtactagggcagaggtaaaaatctagggatcttcggcatataggtggtatttaaagccatgtgacttgctgtgaactgaatgtgtgcccatcaaattcatatgttgaatctctaatctccaatatgatggtatgtggagactggacctctcagaggtcatcagttttggatgagtcaccagggcaaggccttcgtaatggaattactgtatctctctctgtgcctgcaccaaggaaacatcatgagaggatacaacaaaagagaggctctcaccatgctggcaccctgatcttgggcttccagacttttgaaccctgaggaataaatgctgtttaaaccacccagactaggctaatttgttatagcagcctgaactgactacgacaaaagtaaaggaaaaaatcaaggaagtgggtgaagagagaaccagagaccaaggactgcatctcaaactctccaaaggttagactatgggagaagtggaggaatcagacaaaaggctgagaaggagcagaagagaggtgggagggagacgtggaaattctgtgttctggaagtcaggtgaggaaaaggagtaaaggcagaagagggcaagaggattgattgtgtcaactgttgaagagaggtcaagtaagatgaagaccaagaactgaccattggatctggcaaactgaaggtcatcagtgatgttaacaaaaacagttgcaatgtcagagtaagttcaaaaaagagtagtagaagtggaataagagttggcaactcttttgaaatgttgcactgcaaagaagtattgagaagtgggcagtaactggtggaataagaggggcagaagaaggttttgttttgtattctaaaatgtgagaaataacagcatgtttgtaatctgatggaataatccagtagagtgtgaaaaactgatgaagggaaactagtcaacatgatgttcttgagtagatgggggaataagaactagtgtgcaagtagaggtcatggctttagacaggcacaatagttcatttataataacaggatctaaggcagaatctagggcagaggccaggacacttttcctcaagggcaggatatttgttattttgggttttgcaggccatatgttttctgttgaaactactcaagtctgctgatgtagctccaaagtggtcgtagctgatatttaaatgagtgggtgtggttgtcttccaacacaaccctattaacaaatacaggtggcttgatttgggccatagtttgctgaccccctagtggtctagggtacaatcatgggataatattctcaaatgtgttctctacatgtaagttcaaacatttggcccaatgtttgagttggaagatagagctcaaaaactttggagatgaaaaaaaaatcaagaagagatttttcctgatgttatttgcaccaaaatctcagaaatcaccactaaagaacttatacttgtaaccaaaaccaccggttctcccaaaactgttgaaataaaataaaatttagaaaggaagaatcaagaattcacttctacagagatccaatgaagcgtagcatttaccagactgtagaccccaacagcagggaatgaaatttatttatctctattatgccaccatctagccccaagccagcacatggtatagtaggtgctgtctttggtaactacagagcactacatggtatagtagtggctgttcattgatagattgaatgaccaaatgaccattctcaccctcctagactcattttccttggtttctcagataaaactgggtcttctgtgctgccccttgagaaggtacaaggagaaaatttgaagctaaatgaaatgatgattattattttttacaccaaataattatcaccctttgttgaataaaattattggttaggaagtgagtgaggatttttgaatgaattaatgcaaactcaatgccaccaggaacaaactgaaaggataggtattactcattgctgagcaatgggattatctttaggatgaagaagatgatgatgatagcaatgatgacgataatggtgatgatgatgatgatggtcatgatggtgatgatggcgttgataatgatggtgatgatggtgctgacggtgataatggtattgatggtgatgatggtgataatggtggtgatggtggtgatgatgatggtgattatggtgatgatgatggtaatgatggaggtgatgttggagttgatggttgtgagtttggtggttgtgatgatggtgataatagtaatgttgagggtggtgatgagggtgttgataatgatgatggagaaagtgaaggaggaaaagtggcaggtgccactacagcagctcttacagtcattgcttccttctgctaacaggcaaggaatatcacagaactagaatcagaaggtttgggtttgaattccagcagtgatgtgttagctgctcatctatgagctgatcactttggctttccaaaagatcacagcttcctcattaatatcatagtaacaaatataatccttgcctgcctaataaactcagtgagggacaaatcagcacatggattaaaatgaaaagcactgcatgtaccaggctcacaattactatcataagtctcttctctgccagacttgccctactgagtcctttgtaggatctcattcttcctttagatgattagctttgaaagagagaagctgacccaaaagtcacttaaagtagcagcaattattatcagttcaggcatcactgtataggaacatatcatatattttatctgtcctagtctgcccagcccctcccagaaaccattaaaaatacctacccccctgcaggctcagcccactctgacctttttggctttataggactcccttaaatccctccagtgcactccagaattattctctactcccttagcagatattcattggggtgaacatcaccatggcacctgcattaccctaaggccacagcctccttatcttactcccattgtatggaactagtctctctgcctgcccagccttccagcaggtggccatttctcatcagtttccacttacagctgaattccaaccctgagccctaggctggtgagcaggggccttcaccgctgatcaacatcctgacagcccctttccagagtccctttcctgagtacggatggatcttcttgatctatgcttgacatagaaatccttactccgtgctgaaaattgctggtgccaaaaaattccatgcattgcccccaaatatcaactcattggtactgctacagattcccatgcgctttggagattataaactcctgcctggggcagaggcaaccctatgccgtgggctactctgttcaggaacctgcattccaacagccttatctcatttctcttccctcctaagaacattcctatgccatgggtacagagccaagggaccatctctaatgtttcttatggcagagaccatttctgctcagcaaatatttcatgtgctcccctacattttccagtttcccttgtgattagaatagggtcatattcacagttttggtcagaatgaatggaagtaatttatatcacttgtggctgaagctatcccaggaatgtatgcctcttactaggttgtcaaaatcttggatgaatagtcctcacatcatggccacaagatggagtaaggatgctcaccctcatctgatgtcacctgagtgagctgagtgaggaataactcttcttgtgttaagctatttcaattgggggtgggggggggggttgactcttgggacagctaaaactaattatcctgatgatctatcctccaacttagacccaaggaggagcatgttttgaaaatattctcttctaccgtgtatgtaaatatttcaagaaaatgctcctttgtgaaaaaattttaggacatggttatgtctgcttctgtgaacaaaaactaccaagagaatacttcacatcttttatatatcaaagtctcaagctccttgggctgcaattctatcaacaaatgttacaaatacacttggattcttgatctcataacacaatataaatacacactggtgagatcttcttcagtgctttcgcagtgctaaataccagtgatgaaagcaaaaatatggttttctgtaaccagatgctctacatggaaagaatgatattgcttaatcgtttcattaatgccttcttttctttgtcctggaaaatgctgttttgtctcttcttttgatgtccttccccagcatgtttgctataagacgactctaacccttcctctgatctgctttcctaacaaggattgcagaagaattctgtgcagatgctgaaaggcaatatagaaagaggaggtggtctttgaagccctgtgccagaagtgaccacatatccccaaagcagcatcgggagccacagcaaacatttacttagcacccaccttatgtcaggcactttgctaagagctttatcccttgcccccatagcaactctacaaattgggcctgctatcaccattgtaagagaggacactgagtctcagagaggcttaaaaacgaagagctgtcacactccaaagccgtgccttttccatgacatcatgggccttccattcagatgccgttgccactagccagatgcctccaagacatctggctgttggccagtctaagaagggagcagggcggggacaggagctagccccttgagcacctactaagtgccgggactgtgctaagtaaggctttccccagctcaacctgttgcctaaccttgcgcctggggatcggatgactcggggcctccttccaggtcacacgcgcctcctttattaatgtgatagctgccactgcacttctttttagtgaaatattttgggccactcagtcagttgtttgggttcaatgagaaattgatgcctctttattcaaagctctgtcaggagcttggaaaacatcatgctactttgaaaaatgagggttttttaagattaaaaaaaaagccctgatgatttaagaacttctctggttgccagttggccccactcctcctctgggagccaatcaggagcgaccatggtaataaaagagtccctctcccccttcctggctgctttcaagagtgattagtggaggggattcataggccttggttttgtgttgttttgttttggggggggggttcttttttccttgcacttggagaataagttaattatgattggttaaaatttgtgtgtttttgcttttatccctgaaccacaattagagctcctgacagcctcctggccctcagaaattccagctggtataataattgataaccgtggttatgaatagattggaaacaagactgtgaaagaatgcctagccacttcagagggtcatttatagcgtgctgaagggaaaagagaatttcaggcctggaaagcttagaaacagaacgagtttttatcagtttccttgacactggcagatcaaagcctgggttgcgctctctaagggttacagataatggggtggccgctaattcattctgctgctggagctgaggcctattcagaagggtaaaccagggagttttcatggtgctgctttgtagtctttatcacaggaccaatgcaagaatcacctttttattttaatgagacatttgaaaagtatttgattccctctggctaggggctctttctcccggctgagacagtaagaaaggattgcccaatggagctggattctctgaaagcaatagtatctgcattctacccacctgccccccttgtcagtttaataatttcagtgcaggcaaaagctgggcacgtgggaaaggaacagaatttcagagaatatcctgaaaacagaatattttcacttgctttttttctaacaatgaggttgtccgcagagatgcaagttcgatcccaactccaccgttctctgtgtacaactttgggagtagatttatatcctttcctaaagctcctcttcctcatctgtgaaatggaaataatgacaacaagcctgtcatgttgctgcaatgttcaatgcagtactgtatctaaagcactcaagtatctaaagaagacatcttcggtaagcattttgtgattgaaagaatgaatgagttgtctccatcaagcctcacaaaactcccttaactgtagtgagtagatatttttaatactataaacatgtgttaagcattgtcatgagctgaattatatctcccctaaaatccatatgtggatgtcctaactccagagcctcagaatgtgactgtatttgaagatagggtctttaaagaggcaattaagttaaaagaaggtcatataggtgggccctaacacattatgactgatatccttataagaaaaggagattagaacacagacacacacagagggaagaccacgtgacggcacagcaagaagacaaccatctacaagccaaggagataagcctcagaagaaaccaattctggtctccagaattgtggaaaataaattgctgtgcttaaagtatctaacccgtggtattttgttattagcagattaataacaagcatctactatgttattgtctttagtttacaaattctaatactgttgggtttttaggctcaagggacttctctattttggcacaaagggacataggaattgcacatagaagacttggttttggtcccagctctgccactgtttccagagcaggcacaacatcctaactgagtttctgttccctcacctaaaaaactgtgaggttaaatgaacaatgtcttataacagagaaaggctgcacacttgtcattgttcccaggatctccccaggtggagcccacagttcacccaggcctcccatctcctggcctcagtttctcttctcagaacatctcacagccacataagatgcaaagctcgccactgtctgagagctgcctcaaactgtaaggccgcagataacacctagaactgctgatttctcaggttacaggaaagggaaaaaacccagggggattgtaaaatcaagtgaaacttgttcacctattgctactataggatgagtcagtgagaggtcccacctgctctggctgtgcctgggcagctagctgtgctccatggggagcccttctacctccaggagaggagtacaacctgacactcatggcagcatcatctctgtcggcctgtgatccgataatcaggcataattatatgggtgcctgtgccccaacagttctgaaactgttctactgaggcacaactccaagtaggatgtcagaacttcaatgctagttccactaaaggtcttgctcaagaatgaatcccagggctagaaagcatctcatccccaaggtctctgtcccagaagttccttttctctacttttctccactccagaacccagccgcaagatgcctgacagccaagacccctgtcaactcaacccagagcccagcaggaaagatgagtctcctgggactaggatcagccatagattttgcccacccatgagatgggaaataagccaaaggggaacaaatccacatcttatgccttttctttgtcttccaggtagagtctcacagcatgctgtgtgcacaatcagtgctcagtaaatattgtgagctgagtttaatttctcataagtttggtgatacatgtgaaacagcttactggcattttcagtttgattggaaataaattaaaacacacaaagtagtttatgagtgcagacactcttaacgattcagaagaaattctgacctcatgtgtaaaaggcatcacagagtcctagaaactgtaattctgcctcagagatgggaaacagattatcctgaaccgatacagctgtcccctaactgtactgtctacctcaatccccggtccatccctccaactgcttctggggaaaaaatgcaaaaacataaatctgatcacaccattctctcagcttaacacctttattttcctaggagaaaagccaagttccttataaggcattgcatatctctacaatatcaagccagtcaacatctccatcctcatgggctaactttctgagcttctaccacatccccatgtacctttctttgaatactctttgcccatgacctctatgtagttgttcatgtgcttctcccaggctggaaggcagttgcctacattccctacctatccaaatcattctcgcctttttaaggctcagctcaaattctacttcccatttgtagttcctctgattgagagattgtgcctccttcttcacttgttcggatgttccattcatcctcgcatcccccatattgttatggggtggaaagagaaggtggatggggaggagatgaagatgagaatgagactcagatgctttctagataagccaactggttccaggcagggctctgtaagaacaataccatgatggaagattgtctgcttcagagttttgaccctgatctgttgagattcccagaagaatctcagtggcaggatcaaattaactaaaagtgcaacaagttataaataatcagaatgcaaatccagtcatcgataagtgaggatacctatgtgtggacactaaattacttgaacaccctgttgaagatactatatactctgcctcatcctgacatcctggtaccttagaattaaaattatttccacacatgttgtttgatgatcctatatttgaaagaagagaagtagaaggattgggggaggacattacacgtggactcaggaagtcagacatgctagtcctcaaaagggcaacctccacaataacctaatggctgaggggttaggtgcccatcacttggacactgtgagatggattctgacatttgtttatcttaatcctgattttctatgtccatgatcttcctattggtaccatttctttaaatgtattaatgccacatcaaatcataatcaggtgacaggtcttggtctggaaacactctgccacctcctatgcattgaatatttatttaatgactctaagaattctagatgtcctcagtggagctgcgtttggcattagagttatttgttaataagtgcatgcctcccaaccttgacggagggcccagtgaagaaagagtttgtgttctattgtctctgtttcattcaattgttagctcggtgcctggcataaagcacgtggtaaatagactttgaatgagtagatggcataatggatggacgtgtcagtggaggaaggcctggatggatgagtggatagatgagcagatggatgaggaaataaatgttactggaatcctaattctacccttgctttagaaagagagtcagtaagaaaacaaacaaaaagctttgatgtgctgccatgatggatggtgaagaatttcccacagtgataaagtggatagcttagaaaaatccagttaatgcttttaccccataccacctaaaattaccttacacttacaaaataccaactttctagcttgaccagggagccatgtttctcattgatacaacaagtttttaacaaagagccatactggaattaccagagttcaaggcatccatgtgcaagaaaacatggagcacaaagattacacaaagatagattgactctgtctctggaaattcagaagccctttcagtctcttccaaaatatgaatttgaatctggaaaatcagcatctaaatcctgcctctgctattgactagctgtgtggcttctggccagtgttacctctgtgacatcagtttccccaactgtcaagtgaggatcataatttctgtcctgcagagctggtggagttagttgttgtagagtgacatctataaaagcccattgcatgtgataaagtattaaaggaatgaccttgtgtagtagatgcatgtggtttacccatcatgcccccctccgtcagggaaacgccactgtctccttctgactgcatggtgcagatactcccaggacagttctggcttctcacagattcagccttgctgcacatctgtggcagacccagaaaagaacacacagcccatctgggtccatcagtgcccttccccaacttatttaaactgggaccagagagagacagatgcagtccctgtctgacaatgacattgagatctgttgggcctagggggagcagtaagcaaaatgaagaaggacaatttgagcagctggatcacgttcaccaagagaggccaagaagaggagaagaaagcacggtctagcctgcagtgtctggatggctcactccagacatccctgagaccagctacactgctcttcacctggatgggagaggaaacacgtgtccctggtccacgtcccagtgaaccaagccacgttctctctacctgcaacaaaacatccttctcagggaaacaggatcattgacaattaatcacttatcacttcatttaagctacatgaagacatggacatttgcaaattacttcactctctgttccctgtgcctgcacatagcaggtacacaataaatattttttcaataaataattatattattatgattgtaataactactggagtataaaaagctctacttatcagcaagcaagtttaggcagcttttagagacagtgatacccttctcaaagtcttcctctgtccacacaaagcacctgcattttctttttttttttttgagacggagtctcgctctgtcgcccaggctggagtgcagtggcacaatctccactcaccgcaagctccgcctcccgggttcacaccattctcctgcctcagcctcccgagtagctgggactacaggcacccgtcacggcacctggctaatttgcattttcatattttgatgtatcgtcaatgaaaagcaactaactcaaaacagcattagcagcaatgtggctgtggtccataatttcaaactcaatctctccataactaaagttatattttcactggctaccatggggatcagaacacggagattagaaggctcaggtttgaagcccagcttttcacttgaaaaactagttaagctctcatcctcagttcccacatctgtaaaatggatttgatatctgtatcagggtttttgcaaggattcaattaggtcacaaatacaaaaaggtagtcaaggcataaactctgtattttatgtaggttacgtatgtacacactcatatatatgtatgtgtatgtgtgtatatattatatatgtgtaacgtaggtaaacacacacacatacataaatatacacacacatatatgtataaacatatatataatagtttatatacaaactgttatatataaacacatatataaacatatataataagtatatttatatatctatataaactctgtagtatgttattttaagtacctacaagctgaaatttcttcaaagtgtgttctcagagatatttagattccgccctgcacgccaccccctgtcactgcaaatcaaaagtgaactttggaaaactttccaaagccacctgaaacaggtttctttagtgtgagctgcttccccaaaagaaacactgtcaacttgtgtcctccctgtggccccttgtgtggcccccagtagagtgtcatgctgaagggcagtgttgtccccagaagcagtgcaccggccgtggctcaccacatgcagccctggcagtggccccagtggagtaaaccaccagtatccccaggcccctttgctcaagtgctgggaaaatcccctgtgcggttgccagggatctgacgcctttgaagagctggtggttatctttatggctccttctgggcagagcctaagtataagaaaggtcacaacctactcttccagtctccccgagaagagaaaaaaaggaaatggccaagaattacagaaagagattttaggttgataaatgaagccacttcccagccacgctaagcagggtgacagcttcttggacagagttgtccaatgggctcaagtcatcctccccctcagggttataggccttaatcttgttctgacaaaccatgggctgcttgggatcaattaagtgtgacacagttgaggtgtccggccctctagagccttcagtcaagctcgtgtttggggctgcatgtcaggcacaagtgtttatatttcccacagtgggttctcctaagacatgggcatctgaaaataatttcacatttgaaaaaacacatattaatatgtttataatcacatatatatgtttattgtgtgcaaatttattaatgtctctatagaatattttatattatattaagtctgattggcatcagatagtaaattggcttacaaagtaaatgagtacatcttgaaccactgcataggtatattttaatatgtatagtttcttcttcttcttttttttttttttttccgagaaggagtctcgcactgttgcccaggctggagtgcggtggcgtgatgttggctcactgcaacctcagcctcccgggttcaagtgattctcctgcctcagcctcccaagtagctgggattacaggtatgtgccaccacacccagtcaatttttgtattcttattagagactgggtttcaccatgttggccaggctgatctcgaactcttgactcgtgatccacccgccttggcctctcaaagtgctgggattacaggcatgagccaccgcacccagccccaaatgtatagtttctagtatgcttatgaggccataaattgttctcttatatatattcaaaaatatatgtatatattatgtgctgcacatataaacacccacatctccatacataaatacagacctcatgtttaattagaatctaaaaaattacatctggtctaaactttgaactcttgatctaatctgtatatttatttaaagaatgatagaattgactattgtaatgtgattttaaaattcttttaagaatcaatgaaactccatggtgactataattgagatgaaatgagtgaaatagctcctgcctctttatactgattttttgtaagttgtaggaaccaaatattatgaacttataatatttactgttcactcaataattattattattgttaataaaatgatgataatgataagagaagctactatgcaatatttactatatgccatacaatgctaggtacattataaacatcatatctttaaacctcgccagcatcataaccatttatatatgagaaattccagtttaaaggttatgaaatagcttcagagaagttcagagaaccacacttctactccaatatgcaaccaagagttgaaccaagctctgttgaacaccagagaacttgttcttccttctacgctgcaccacccaccacatcaccccattataaacagattgagcaaaagactggccactactccctgcgcctgtgaacatctagtccctgtggtcatttttcagacaaaggaaacagtcataaatgaggcagaaatgctactatttttcctgaattagacttgatttgttaagagctcaagacaaatgtagacactgtgctcaaaaaatgctgactggggtcatttaatgagtaatcccatatttctaggaaggcataagaatgagttagaaagaaaataaaaagcaataactgaaaattcttacactaggaatatgtttctgtttaggaagatgctctttaacttaaatgacaaaaaactcagaatacattttccaagtgatcatattttattgtgagacagagctctattttcaaatatctgctttcaactctcaccaaaatatgaaaagcaaaacttctatgtcactaatggcaggtacatctgggtataaaatgcagctttctaaattttgcttccccagccaacttcaacttcaaagcctcatcctctgtgcagaaaaccactgggaagtgggggattagagtctgaaactagtcaccgtccatccagggatccctgagccaccagcctccagatagcttcaccacatctggttctgtccttcaacccttcaagaagtactttctagagacaaactgcctcctgtatgccaaacatgaaaagtgataaagatgactggatggatggctacaaggagctcacaggtgtctatctggagggagaaacagacacataaacacgtggtcactaatacagtgtgataggagatggaagagtgctgcctgcagagtgaagtgtgggtttccaaaaggcagtgaaccactcaaattagggatacaattgtccacaagaagcgttgagtccaccttgagctagacctgtttgccaagagaaaacagagcgagtccaagcaaatgtatgagaccactctccataatgtctcacaaagcaatgattaggcctgaaggtcaaagtcagaggagccccagcctcccagggtagcagatagaaagcaagatacccgtgtattctgtacaatccatcccaaggccagcttctctcagaagccttttttatgccctggagtggatgtgacctcgcttccatggaacttcataaggctttccttgtacatctctcctgtgacatgtggcatcaactctagctttcttgtggcacttcctttgcccacagaatttccagccagagacagaaccagaaaatgcaacttagttcaatgattcagcaaacctttactatacacatactctgagccacgtactgtgctaagagttggaaattaaagtgctcagagtctagtggagaaaacacactcactaatctatatcatatcaattggtatctgctctatggcagtgggatccccgtggcatagtggtatagcaggggcattgggacaccaaggggttcagataaaccttcacacaatagaaggtgatgaatttgggtctggaaagctccactagagtttctggacaaattagtttagtttaagtttaaactagctacttcaaaaataccaggatcacaggctaggcatagacctttcacagtatgggaagggtcagctcatggccacactgcagccccagggagtaggggaatggaggctcagcagggtggccgggtgcctcgctggctgccagcaccatggtcacttggctgctggcctctacaggccggccaggcactaccaccaaacctccttctagctgcattccctctttctcccatcttcatctgactctacttagggacacccccaagaatctggaaaataaaaatagattatcctgaaaacactgtctaaaaaagttgtggcattgtggaaaacagagaagggcagagccttggactcagtgttcaggagccctggtgctcatcccagcaacccagctcctctgcgaagcggccatgaaaataaccacaaaaaaaaaaaagagaaggaaaagaaaagaaacaaaagcatgtggttgattttgatctagaccttagcgttgggaagacgcctcctgcatcccttaataatccttggtagcacatgatctagtacctccttttctgatgattgcagatcttcaagaagggattttttttattaccagtaaaaaataaataaataaaatacccacacagatagcaataatctctcagctttgatcttttcccgcacctctacgtgtttcctgtcatttgctttttgcattaactccattttacagatggggaacctgaggcccagatcacggagactcttgctcaaggccacagagcaagtcaacgatggggcctgcagtaaaggccacccttcctaccatgcttggcccttccccactctcttggtctcaacgcccatcacaggagggattttccctctgctctgatctcgagttttgcgggctccagggtctgggaagctccagtgcaaacaccgactgccttttctcctgcactgccccttctcttttccaggtctggcccagtccagggatgcctctgataagccagcttggaggcttcagaggggcgtccacacttgggtgtgtgcagtacgtgcacatgacgtgtccatctcatggttgtttgcctgcctgtgtggccatgtttttgcgcacaaaggttggaatgtttcttccctttgtaacagatgagtgtgtgtgtgtagatatctccatggggtgtgtgtgtgtacatctgtctgtagggtatgtatgtatgtagatgtccctgtggcgtgcgtgtgtgtgtgatgttcccatggcgtgtatgtgtgtgtgtagtatgtgcaggtgtctctgtgcatgtagttctgtgatatgtgtgtggtgtggtttgtgtgtgtgcagatgtccctgtggggtacttgtgtgtgtctctgcagtgtgtgtagagatggagaaatagatagagatatgcagatgtctgagatctatgtgtatgcagacattcctatgtatgtgtcactaagaggtgtgtgtgtcatggtgtgtgtctagctctagggtattcgtgtcatgatgtgtgtgtgtgcatatctctatggtgcttgtggcatggtgtctctgtgtagatgtccctgtgtgtgtgtgtgtgtgtgtgtgtggtgtgtatatctatatctgtatttatctagattcatatagagatatgtatagttacagaggggtctctggaatatgtgtgtatctctaaggtgtatatgtgtgtctctgtcatgtgtgaggtgtgtgtctctgtggcctgtgtggtatatgtgtgtctctatggtgtgtgaggatctctatggtgtgtgaggtgtgtgtggtgtgtgtgtgtgtctctatggtgtgtgaggtgtgtgtgtctctatagtgtgtgaggtgtgtgtgtctctgtggtgtatgaggtgtgtgtggtgtgtgtgtgtctctatggtgtgtgaggtgtgtgtggtgtgtgtgtgtctgtggtgtgtgtggcgtgtgtgtgtctctatggtgtgtgaggcgtgtgtggtgtgtgtgtctctatggtgtgtgtgtctctatggtgtgtgaggtgtgtgtggtgtgtgtgtgtctctatggtgtgtgagaatctctgtggtgtgtgaggatctctatggtgtgtgaggtgtgtgcggtgtgtgtgtgtgtctatggtgtgtgaggtgtgtgtgactctgtggtgtgtaaggtgtgtggtgtgtgtgtgtgtctctatggtgtgtgaggtgtgtgaggatatctatggtgtgtgaggtttgtgtggtgtgtgtgtgtctctatggtgtgtgaggtgtgtgtggtgtgtgtgtgtctctatgctgtgtgaggtgtgtgaggatctctatggtgtgtgaggtgtgtgtggtatgtgtctgtctctatggtgtgtgaggtgtgtgtgtctctggtgtgtgaggtgtgtgtggtatgtgtgtgtctctgtggtgtgtggtgtgtgttttcctctgtggtgtatgaggtgtgtttgtctctgtcgtatgtgaggtgcgtgtgtctctggggtgtgcgtggtatgtgtgtgtggtgtgtgtggtgtgtgtggtatgtgtgtgtggtgtgtgtgtgtctctgtgctgtgtgtgtatctctatgctgtgtgtgtaatgcacgtgtgtctttaagtgatgtgaagtgtgtgtctctatggtgtgtgtgtgtgtgtctctgtggtgtgtgtgtatctctatgctgtgtgtgtgtctctatagtgtgtgaggtgtgtgtgtgtctctatggtgtgtgtgtatctctatgctgtgtgggggcggggggcggggggcatatgctccgctatgatgactgctgagctggcttctccggagcgtggggacacagctgacacagcaggacacagagagaagcctggggaggcggccacaccagccgttcttgcttactcaggctgagccatggagcagctgctcatgtgttttccagtgagcagagtgttcccagcccttgcttcccagaacccagagaggggcaagggcactcacagtcagggggtcctgtagtccctctgaggggtccacatccgacaggcaggggctggtccaggaggcctgaagacgtgccctggaaggcagaggagtgcaaagggcctgggaggcagtggaagggaggtggcattctggcagaactggagctgggaggcacctgaggcagaggcgcctgtgaggcacggggcagtgagtgtgagtgtgtgtgtgtgtatatgcatgtgtgctgtgtgtacctgtgtgcagtgtctgtgcatatgtgtgtacacccagatgcatttacccacaggctccacataatttcaattctttctcctcccacttcaagttcaccaagcagcgtaatgcttcaccttctggcagggcagggaccactcagcttctttcctgcttctgcccccaaccctccccaagaagatgacatcctgttactgtacaggctgccagggactccatcgtgctattgtcagaaccccaaggctcggagactgtcagaggccacacaatttccagataggcaggccggccttttttccaggtcacttaaaatacttttatgggtaggtttgccttgaacaaaatcctgttcaaatggtacaaacctgacgataaactcaacctttcagattacagtttaaacttcactgccgcaccagggagaagaaaaagcagaattcctgtgcgtttcagaaaacctctcggaataatcccttgagcctccctacagggctccagtcccctaatggatgctttgatgacagcagataaaggccaaaggtacttttattctctcagaaattgctccaaataaacaaccttgatgattaaagcaatagaaatcctcagaagattgatggcttggaaaatgctgctgagtgaatgaataacttccccctttatttccaagagctaatatttgtccacatttgctgccttttaggaaaaaaaaaagtgcaacctttttttgtgctgagtttggtcagggacaaataggcaccatccagttatgacttgaactttaaaccaaactccatttgtgagccactgaggctgcttgtcagcggcctcccacttgtcaggcacaggtatgagacccgcacgcggaaacaccatatctgggtgcaaacgtttagggcggggccaggcaccaaaactccttttgaaggctttaaaatgctccatgtgctcttctgcttcccccatgtccccaggcacaagtctggaagcatttctcaatgtgcctcctgtgtctaaacaaaacctgccgtcgaatgccaagaagtagccttcagccaacgatggcagctgctctgtcctggctgacccaggggctagggctccccagtcactgctgagggctccactggaggatgaattgctgccttcaagggctggctctggagagcaggtgatggggtaggctcagcatcaggaatcagggactctgggaagaatctggctcaacagagcactgcagaggcttgatgggagtggcatattgccaaattaccaaagcccagaggccgaatccctggcatgcacatgtacactcccctgcttccccacactggagggatagatgtccgctttcccgagccagctgcacagctttctgaacagtgtcctccggctaaggagcttgactcccagatctcgggatttctcaccaccctttccctgagtggcatcaacctagttcctgtcacctttccttccatcccatttcagccacccattcccatgacttcaccttggaacttgcattccctggagctttcccagccctgaaaccctgagtgcagatctgtctgtctctgatcacagctctcaaacccatccagctttttctcagttcatcctgctacctcagcgttccgctaatttgacttcagagagaccgcttatctcttagtccctctgctttccccttgtccatcagcttgtcaggaggtcagttgttcttttctttaaacttacctggaaacattaaaaccctggatccagccagccagccatcttctctgtacgcacatcgagagtgtggtgcattcctgcagaaaatcacagggacacaggttgccattggtacaaactgatagtctctccccatctgggtctgtgatgttgcctgaaacttttccatgcctcccacgcctggcccatgcccatcctcctcagtccatatcaaatgaccctctctctctcagacctcccacctcacgagctggccctgactaagagcaagtgtcagtcatggtgtcacacacaaattagaaaccacaagaaagacgggaatgtaaagtagtacaaccactatggaaaacagtgtggagattccttaaagaactgaaagtagaacgaccatttgatccagcaatcccgctactgggtatccacccagaggaaaataagtcattatacaaaaaagatacttgcatatgcatgtttatagcagcacaattcacaaattgcaaaaatgtggaaccagcccaaatgcccatcaatcaacaagtggataaagaaaccgtagtatacatatacagtggaatactactcagccataaaaaggaatgaattgatggcattcacagaaacctggatgggactggagacgattattctaagtgaagtaactcagcaatggaaaatcaaacatcgtatgttctcactcataagtaggagctaaactgtgaggatgcaaaggcataagaatgatacagtggactttggtgactcaggaggaaaaggtgggaggaggatgagggataaaaggctacaaattgggttcagtgtatacagctggggtgatgggtacaccaatatctcacaaatcaccactaaagaacttactcatgtaaccaaatattgcctgttcccccaaaaacctatggaaagaaggaaggaaggaagaaaggaaggaaggaaggagggaaggaagaaaggaaggaaggaagggaggaaggaaggaaggaaagaaggaaggaaggaaggaaagattcctagaaagaaaatccaacaacatcttgccgaatcctccacaaacttacctacatcctgttctttccagtcttcctcaagttttactagaagagtcaggagttctcctgtctaagccagaccttctagccttattatttccttgaaattgctttcaagaacctctctgttgctaagccatcggaggtgtttctgtcgtcttcttcttccttgaattctgcagtgttcaaaactactgaccctcttcctgctccgggtttctatattcccatgctcttcagttcttcctcctacctatgcaaggagcccttctcagccttctccttccttgcccttgtcaaggtggctgtctttttagtatacactttcagagcattttcatctgctctggagctcacagaatgggtttgtgctgaggactccaaataggtgtttccaactccagagattctcctgacgtccagacagatgcatttctctcctggcgagcgtctctacgtggacaccctgcaagcatctcacaccttgtatggtcaaaactgaactttatcttcttcccaccctaaacctggcccttctcctgggttcctcctctccatggttgagtcgatcccatcctcttcctgatttctaaagccagaaacctgggcatggttttttatttcttgcttttccacactcctcagactaagctgacacctgttccttgcatgtgtgcccgtttcctcttctattctctacagtcctcgagggcaaggacatatctgagttatctcagcagttcagcacccagcttcttgccagggactaacaaagctctcaataaatgttgagtgaatgagagaaccaggatgttgtcaccctcctgatacagatgactgaggctcagaaaagtgaaataggttgacgaaagtcatacagttatcagaggagccaagctttgtctaaatccaaaaccaaacacttctccttttgtcctatgtcaggttcagggatgtggcattttcatatgccaacaattctgcccacacttatggaaagttaaaagctaaacatataagaaattagtatttgaacttggaaacaaactttcactttaatctctgaaactttaggattccattttgtctctgccatgatttctgccagatacagcccaaggccttccatagcattgtgaaagctgccttaattacttctgcctgccactggctccagctcttcagcgaacctctccttcatccttctctctaggtagtagctacatgccacctggcagttgtgaccatagctccatattatcaaatgtgctccatctctaatggagaacagtggagcctagagctgccacaaacacatgcacaaacgtacacatacgcacacacacatatgcacacacacacacacatacacacacactaggctgttctgggtagagtcaaggctgctgtgcccaagcttcactatattgtatagaaattggctggggccctaaagaggccagactgttcttgagcaactcttatgtgccaggtcttgcagaataggaagaaatgtccagcaggctggacacatggctcaggggcatgtctaagtgcgggggaaacagaatttattggcttgtaactagcaactgcaagcaggagctcaaccagggacagcaggaagagtaagatgaaggaaggaccagagagagactcccagggaataccgatcttgggagaaagaaggcaggcctatagagattgggggaatcgtcagaggatgagagcactaagatgatagatgtcatgaaatctaaaagatgggaatggtcagtggtgtcaaattcacctgaagtccctgaaataatgatagcaacaattacaataatgaggaggaagaggaggaggaaggaaaagggaatcatttgctgaactgttattctgtgataggtctgtgtacccagcagttccatacatttagcactgattcttaaaacaacctaataggcactaagagctaagcattaatatccctatcttactgaagaaggactgaaaaatatccactgaatttgggcagcagtaaggtaaccttagcaaatcgaatcttattaaaggagtgtgactgggagacagattgaaatgggtcgagcagcaaatgggagttaagagtggagagagacaataacactcaagaagtttgggtgacaaggaaagaagtgagatcatagcatgactagaaggaaataaagtgtgggaagagactgtgctttagtgtagaagaggcttcaacagatttctggtctgagaagaaagcaacagaaaggggatttaagacacaggaaggagtagttgtggtgagaaattaatgcacctgatatggtgaggaaactcaggtcaaggacgtgagaagagatgtcctcaagcaggaggaaagggtcctcattcccagagactagagaaaaggaattgaagaggggtgaatgtattaagttaactcatgactgatagatgcgaagtccagcgagatgttggaattttctttctttttttttagatggagttttgctcttgttgcccaggccggagtgcagtggcacaatttcggctcactgcaagctccgcctcctgggttcaagcgattctcctgcctcagcctcccgagcagctgggattacaggcgcccaccacgtctcgctaattttttgtatgtttagtagagacgggatttcgccattttggccaggacggtctcaaactcctgacctcaagtgatccacccaccttggtctcccaaagtgctgggattacaggcatgagtcaccacaccgggcctcttttttttttagagtctcactctgctacccaggctgtagcacagtggtgtggtcataactcactgcagcttcaatctcctgggctcaagtgattctctgactcagcctcctgagtagctggaacaacaggcgaacgccaccatgcctggctgggtttttaattttttgtagagatagagtcttgttacattgctcaggctggtctgaaactcctggcctcaagtgccactcctgcctcagcctctcaaagtgctgagattatgggtgttgccaccatggtaggacacaatgtttttaatgaagaaagaataggaattttgtttgagagtgaagagctggaggaagataaagagcttgaagagagaagcaaatgatgtgcttcttaaggggtgaaagagagtggaagcagtccccaaaatgaaaagtcccactgatcacagagcacacaaatgtgtactggctgtagatacattgttttattccttcagctgcccagatgttggagccgagaggcaggttaatgtgccgatctcaaggcggaatacatctaagtgcctttagtggaaggaaccagatgcatggtgaagatgaaatgagaaggcctaagttgaatgccagcacagcattcgacacatctcatatgctctgtgaataccaacctcctccctctgcagagttttctcagcaataaaatggggaagctgtatagagattgccagctctgacaatttagactcacgcggccatctcagagaagtctaaattcagtgtttctcagtgtgtggccatatgtcctacctccagctagagagtttctagaaatccagatctgggggctgctgcctacaaagtcagaatctttgttgggagggtccgggtctctacattttaataaacaccaccagggattccttcaccaggtcaagtttgagagttactacttccatggttaggtaccctggccccaactgacttatgcagaaacgttatttgcctgttgactccagtattcattgtgaaatgatgacaagaaacaccaagaccaggtatggcgatattgatgtgcaatgatagaattctggataagtaagaatcccaggatggaatttaatattagctcttttcctgggactttcctggtaaaatgttggagcgagtggcttgtttatggcccactgagtcctggatttactccttctcttggatgtgggcatttgtcaaaatgccctttagtccagcttgactcttgtctgttctgggtttttgtatgtcaacagcatgtcttattcatgtttctctccttcaccttgcctggccactaggaaaggatccttaggaaaaggtcaacacatgtttccttatgattctcctttattctatttgtgtacctctttaaagctcacagagtacttcaacactcgttattctcataccctaccattctgcaacttgtataaaggtggtcattttccttcagaattaagttaacaaaagcccaaagtgattaggcagtgagcacattgtcaaaagatatgatagtagcagagctgtaggtcacaccatggttttctgtctccaagtcttgagttctgctcagacaaataatgagttaattaattaattaattaaaagcagatcgagaccttctgttaccagactctgtagcccacatcctctgaagcctccctggccaacacctccccagctccagtccctttcccagtccctctttaggttgagtgtcagcctctggcctggaaggaggccaatagagctgtgcactggcctggaagggctttcagaggagcatctcggcacacaggggtcatgtcaccctggcatgggcaaccacgatccttccgggctctcactccccaactctttactcccctggaacatgacacctgatattgctattaaggctgcagtagagaccaacaagaacactgtggggaagcaaaggtcacggcagaagcccatgaacggggctgaaggaatttgtcctggtgctgaagtgccttgtcacttcggcagtcggttaaaaggtgttggactatgtaaatggttgctaacttcatgactaaagtttcaaacctaattttttgaaactttagaaaatatatttgaaaagctctttaaatggaaactttttccctgccaagttccaccatagcacacatttttacagcccttataattccttgaaaaaactcaatgtataatagaagtgctgacagatgctgggccatagcagctcgcctaacagctcagctgtatttatttttcattacacttgactctaattggtgccagtttaactgtggctcatactagcaagaaccttttaactcaaacatcagcccagggaaattggctttttccccctatcttggctcttaatattagcaactgcccatatttcttcctcatcaaactatctttacgttttttgagaagcagtcagagtcattctttaaaaagaaaaggattcaaaataaaatacatatctacattctaatccaggctttttcatccatcaagtgacctttggaaagtggtttgaactttgtgaacctcagtttcttcatctataaatagaaaccataagtcctggcttgcacagtgtggtgacggttagatataaacccagccgagtgcctggagcataataggagtttgatacttcattttattgtattcatactccattcatattctattcatattctaaagtatgagtattataattaaggttgataatattttacatagcaaagaacgaactgtctgatttgttcgtgtggtgttctctgctactgtgatgacttgcaaagccactaacacacacctggggagtcactttgacaatcccacacagaccattcaaaagctagcattccaaggcaagacatgggcctaaggttgaaggttgcctgggtcttcccagctgctctgagatgctcttgggtgtgggaattcttcaaatgactctcaagtggcctccttacagatgttgacaggtccaatcaaactctcttctcctgggcccagagatgaaaggaagtgacagaggtgtctgagaaattaaaaaggtggcccagataatcccaaggaagttctcttggaacagagcgacacacagcccaagttcttgagttctgggtggtatatatcctcaaaagaggcaatgttcacacaaagactgtctgctcatttaaataaaactcttgaatcgaggtcagaggccctttagctgtagcaaagggccccctaaggaaatccaaagtggacttactctgtccacccacctgggtttactgtataaaaggcagggggaagaagagctttctcatttagtaactgctatgcacaaagaacttcacttacgttaccctgactgagcctcacatcaactgcttcaaagccaatatgattattttgctgctgaggatgtgagacttggagaggtaaagtggcttatgaaagccatactggaacagaaagggcctgcatttgaacctcggcctccaagaacgaaagctcttgaccacactcccagatgtgaaggaatcgaaggaattcaagaactcaagaaaattttattttattccacaaaaacataacagccaaaataggaattttaaaataaaaaacagaatcacacagaattctaccaccttatccaaccactttttattttctatgcttccttcatcctgggcaaaggcagagctgtaattacacaggtgaggatgatttcaggaaagatgtattaagcacctactgtatgcagtaactcctggatctagatggtacatgccaatgttagatgacatgttatttgtcatgtactggttgagttgacataagtagccatcagggtccctaaacaaggcagaacacgatctactgatcgtgcagcacaaacctgaacagagagtgttaaaaagaggaagaccactgtgggctatcagcatgatcttggaggttttaaggagcctgacggctgtcctatgtaactggcagcaacagttgagcccaagagtccctaaattttggtacagaaaggaagagacatacggaagtgatgaattgcctcttccaaggtaagctcaaagtagtgagtggacttttgcttttattataccactcacatttttctgctcatcaatataatgtatattcattataaaaaacttaaattttatgaaagtatttatttagcaatttgaccattcatagtaacaccatccggagaacagttggtattattttatgttagttccttccagcctgtttatatgcctatttttacttagttgagattatagtacaagtacagtttaaaaatcttatctttccagttaacattataaccttagaattttcaaatgtcattaaaattatttcaaaaacattaaaaggctgcataaaattccatggtatgaaagtactgaatgtggttaaccatttctctatgcttactattaagttgtttcaaaagttttactatgaaaattaacgctggctttcagtcaagatggtcctgtgagttcccaaataaaccactttattccacctttgtactccagatgcatatcataatagataattggttaaaaatatgtcaaaagagaaccttaacaatatacttaacaataacactgttaactccatgaggtgtaaatgatggaactatatcactgggaagatgaaatgtaatctttcaggaccccataacccaaaaaggcagaagaagcaagaattagacatgttcagaagtagatatggaagatcagagcaaacatgactaccatgtgtggttggccaggtggtgcactgcccaactgctagagatgccagtcatagcatcatataagtaaatgcttctcaccctcataacggccccccaacctctgccaagaagttgtgttaagagagagtttccttatatgatgaacagtaatggaaatctaccacttatgaacaggaggcacaaagagcagcaaaccctccccaaagatacagctgatactaacttgctgccaagaaactaggaaagaaagagatatctgattgaccagtacattggactagctttcccctgtttctgaaaattgctttacagaaactttacaagatgaaaactcaaaccgctaataataatacatgacctagttctgaacaaggaaaactactgcaccagggagaaggcactataaaactgccagaaaccatagagaaaagaagaaatgaaattcacacagaagacaagtttgcaattcaaattatcgaagaacatggaagaaatttgcatcataaaagatgatgacaattataaaataacattaaaagcactcattcattgaatgctcccaatatgccagagactattgtgttttacatgtattttatctcttttggtactagaacaatcagatattgacttgaaaatcagagaaaccagaaaaactcaatgaaacccaaagctgattcttgagaagatcaatacaatcaataaaccttcagtcagactgatcagaaaaaaaaaagacacaaactacaaatatctgagaggtgacaatgccacagactctacatataataaaataatgagaagaaaatattattaataaatttatgtcaaaaaatgtcaacttagatgaaatgttctttgtagggacatggatggagctggaagtcattatcctcagcaaactaacacaggaacggaaaaccaaacaccgtgtgttctcactgataagtgggagctgaacaatgagaacgcatggacacagggagaggaacaacacacacggagacctattgcgggtgcggagggagggagagcatcaggatgaatagctaatgcatgcaggattaatacctaagtcatgggttgataggtgcagcaaaccaccatagcacatgtttacatgtgtaacaaacctgcacgtcctgcagatgcatcctataacttaaaataaaataaaattaaaatttttaaaaagtaatataatgtgattaaagcagcataattaattaaagcagatagacgaaaaaaagaaagtccacaaacaaattcaagtatcaacaggaatttaggatattatagctgtggcattgtaaatcagtggtagaaatatagacctctcagatgttaggatcactggtttcagttgtaggagaaaaacaggttcttacatcaagccaaaaacaaaaatgaattttgaatggattcttctccatttgggtggctaatacatatctcaaacttaatgagaccagaacttctgaactatccacacccttcctcaattcagctgatggtgactttatccactcgattcaagtgctcaaactaaaatccttggaattatccttgactctttttcttaatttacacatttaattcatcagaaaatctcgttggctccatcttaaaaataggtccaaaatccaactagttctcatgacccctaccaccactgccctggcattactaccatcattttttgcctgaatgaatgcaatagtttctctgtctccacaattactcttttatgatctattgtcaacaaaggagccaaaacatatttttaagtatatttaaccaagtcagtaatcagctccaaaccttcttcaatgactttctgtttgactccttgtatgagcctacaaggtgctctaggatctgactcctgtaaagtctctgacagtcactcagttcgaaccccactggcctccttgccattccttaagcccaccaagcatggtctcccactcaaggcctttgcacctgctcttccctccaacttgacgtctcatgggaatccacctgactcactcatttacctccttcaagtctttgctcaagcatcaccttgttaatgaggtctaccctgaccatcctgtttaaaagtttaacccactcattctgaaaccccacctctctcaattgcccttattccactctagtttctttttttccacagcacgatcaccttttaagtaatctataatgttcttgtttaaaacttcttgtatatatggtctatctccttccagcagaatataaattccataaagccagacatatttctctgttttattaactgatacagcctaagtatgtagaacattgcctgcatatagtagatgctcaacaaatatttgttacataaatgaattacagatttattgtaaaatacaaaaccttgaaataattagaaaagtaaagtaatttttgcaattatgtagttttaaacacaaaaaaattacatatggctgatacagagtagttagaggtatctaaaattaaaaaaattagaaggacatataccaatttcatattaattatttcctcagtggatagagtagaatgggtattaacatgagaacaaaagggatataaactttacttaaacttttatattttttaaaatataaaataaatgacaaaatattaaacttttctttaaatttttggtaatgaataccttattatttttcatattagtctttttactactctattttcttaagttagtaaaaatacaagggaaaaattctgtaatgaacattctggtccaaaattatttatttctctaagataaataaatggaaatgaagctgtagcacggattcaacacattttaattaattgagtattataaacttaatttcaaattgcttaccagaaaaattttgccaattttaattcttaattatagtgaatatgtgtaaagagctatctcattgcattcttccccatttaaatagtataattttttcacctttgctaaattattgtataaaaattattgacatcattttgattatttccaacattgattttttcatatatttacttatatttattagaaatatttaagtatgtttcatgcattcattagccatttgtcttattttttctgttaactttattgtttcatactctttgctgatttttctaaccaggtgccagttcttatgtgtataataaaaactttatttaacttttgccctattgttactgctacaattattttttcagcttactgttcgtctatcaagtattattttattttactattaagctaagcttacaagttatttgtcatgtgaatgacattatcactattaagcttaagaaatgtttcctcagtctgggcgtggtggctcacgcctgtaatcccagtactttgggaggctgaggcaggcggatcacctgaggtcaggagtttgagaccagcctggccaacatggtgaaaccctatctctaccaaaaatacaaaacttatctgggtgtggtggtgggcacctgtaatcccagctactagggaggctgaggcaggagaatcacttgaacccagggggcaaaggttgcagtgagccgggatcgcgccattgcactctagcctgggtgataagagtgaaactccatctcaaagaaaaagaaatgtttcctcattgaaagactccaaaaacaatttgtctaattttcatgaattttaactttaattccttttattatatgacataatacattttcttcatccttgattttcaagtttcctatcagggacataggtgtggatttgttttatatttattttgctcagaacttagcgggtacgttttaccgaagggttatacccatattcaattctggaaacttctcaggcattgctttgccactattttcattaggtgcatcctggaggtgtgcttcattagatgtgattcattatttgtattctaacttgattatgttctaacagttaaccttttggcataatagcatttattttaaagctccaccccctcaatggtcttataatagaagctttattatatattaaatgatacagtgtatcaggatgtattatgatcacctctttcattctgtccatttatctcccttttcttgcttctgtaccccactgtttttactatagagcatatcccatactgacttcacagctctttcctctgtaatcttacacatttccatctgatatttttctgctgcatatggtagtgaaataagacaagttaaactcaagtgttggcctcaggggtttacttgaagtaagaaaatataaacaatatccatgcaacaattaatgataattaaatgcaaactgttgtatcattagtcaaaaaaagcattatcagaccagacgcggtggctcatgcctgtaatcctagcactttgggaggctgaggcgggtggatcttttgaggtcaggagttcaagaccagcctgaccaacgtggccaaatcctgtctctactaaaaattaaaaaaaaaaaaaaattagccaggggtggtggtttgtgcctgtaatcccaggtactcgggaggctgaagcaggagaatctcttgaacccaggaggcagaggttgcagtgagccaagttcgcaccactgtactctagcctgggtgacagagtaaggctccatttcaaaaaaaaaaaaaaaaaaagaaagaaaagaaaaagaaaaaagcataactaaactttttgccaattttttcaaaactttttgcaagtattttctaaatttctgcacagatatatatggctttctacatgactctgtaagggttctagaaagatgtgaagaataacagcagaaaaagtagattctggataggtgaactacatgaacaaagaaaggactgtagaaataaaagtgcaatagagggggagagtgctttagaaaacaataggcaccaaggtcagagaagcagaatgggtgaacaaagactccatcatagcaactttaccacgtagatggtaatttcctagattgtgatgttgattatcccacctatttccatttttccagagctattccattcatttacttactctgcagagttactgagacccaattaggtagtagtgatacagaaaggcataacacttaaccccagtcatcagggtccccatagtcttgtttgcaaggtgacacctacactgatgaccaaagatgtaaaaggcaatcattggaggcagctccaagagtaatgagagcagaggagagggagtgatcatgcaactcagtgtgggaaggctttctaaaggagataacattgagctgagtctcaaaggttggaataaacccactatgcagggggagaaaaaggtgtatgtgagcaatgcaagcaggaggaaacgcataggcaaaggagcagaggtgtgaagtgtgtgtcaggctcaagtagtcccaatacatccaccttagcaggaccccaggagaaacaggcagcgaaattctctttccactcagcacacctggaggcttgtgccctggcttacatcaaggtgatagatcatggtgatttttgagcaggagagtggccatctgaaaacaacatctagcacatgatggaaacaacaacagtacatgatggattggagctagagagaagctggatgagaagattaagaacatcgctgtccaatagaagtagaatgtgagcaatatatgtcatttaacatttcctagtgaccatattttttaaaataaaaagaagcaggtaagttgattttagtaatgtattttatttaacccatatatttcatgtattttatttactcaatgcacaaaatcaccaatgaaatattttactttttttttttttttttttgaggcagggtctcagtcgcccagggtggagtgcagtgctatgatcacagctcactacagcctcaacctcctgagctcaagcaatcctcccacctcagcctccctagtagcagggactacaggcatgcaccaacatacccaccgaatttttgtatttttttttaaagaccaagtctccgtgtgttgcccaagctagtctaaaactcctggattcaagagatcctcctgccttggcctcacaaagtgctgggattataggcatgagccaccatacccagccttactttttcatactcatttcttcagcatatattttacatttacagcatatctcaatttggactcgccttatttcaagtgctcaatagccacacgtggctagtgtctatgaaactggacactacagagtgaataagaatggaaaagaacaaagcagacagaaatgttaaatgtaggcctatctgatttgttgataagtcatggaaatgggctagaaacgcaagtattgagcttcccaggcttacagggaagaagaaaccagaatcattgagctttgggagcacacagtttggataagagaatactttggttgaaaggacttgggtgaaaatgaacatcctcaagaatttttcaccaccagttccattagattattttcataaacagggaaagtactttcaagaagcaaaggaagtcaaatgcattcagggaaccaaatgagcgactgctatttaaatctgatcactcatagcaataatgcaaaaaaaaaaaaaaaagaaaaatagccaatatttgtagaatgctttttgttgagtgccaggtacagttccagcacttgtattaattaaaataaattttgtcttcatgctaaccctgtattattatagatatgttattcataggtatacataggacataggtatgtatgttagcataattcatattttgcagatgaagaaataagttagagagacatcaaaaaacttgatcaacctctcacaacaagttaaaagcagagctgggattcaccatcattattttattcaatctttgcaataattagacaggtgttattagccacactttacagatgtccaaaccaaggctgcaagagcatggcatacaaatagaagccagatttaaatcctagtctgtctaattcgaaagcccttgtttttgtccagcaccattttgagatatttaatataaggcaaccttagtccacaaacaagttaaaaaaaataagattattggttagattctttggaccatgacccaagtggactttttttttaggtagactgtttccacctgagtttctaagagttttccaagaatttagacgactccttctggaaagagtccagatgctataaggcatcatatttccaaccaaggttagaattgcatctatcagaaccttaattgtacgtaatagtgatattgatgacaccttcaagttacaaggaaattcgaataactatttgaactctaagaagtcaccaaaagaaacaacttccgcttttcctgtagaaatgggaaaggagtgctcacttgcaaaaacttgactggatgagttaaaaagctggcagaacattgacgaggacaagggcgtctacctgcccctccttgtgtgtcaacctgagcacaagactcttcagcaagttaaactctgaaagtctcaggcctgctcatgagcaagtgtcatatgccttggtctttggcaccatgtgactctggtttaggtgctgtgtcagccctgtttttgtttagtttttaattatttgaatttaacttatatatcatgtcttctctattcaccaatgggatagcctagaacttggcatctaggaaaaagttgcaaaatatataaaacctttctggagacaaggagttgtttttgctcagaagtcatgctttcatgtttgtggtggtgttgctgttatttatgttgtgtgtggtcatatctcaccattggattatgggcctctggtttcaggctatttcttgctcatcacagtatttcattcatgtctggcaacatcttacatgtcatggactctataaaacgctgatgaataaatgacaaatttgagataatgaaaagatgagatttgaaatttaaaaactcaagtcccagacccagctgccaccctgactgagccactgtattcacccaggtctcctagaaggtagagcctgaggccaggatgaaagtgttgatactctgtgtggagttgtaaggtcaaggtagtgagaacgaggaaaaggatggaaataaagtaagtaaggagcagggtaatgtcgtgtgatacatcactaccctgccacccagggctttaccctgagttgttagaaaacatagcagctcactcccagcaggtgtgcttgattcccatggggtcttctccagaggtgtgttttatgggctgaattgtgacccccccaaaacttcacaagtggaagccctaaccctgagtagctctgaatgtaattacatttggagatggagcctttaaacagtcaattcagttgaaacaaggccctgttagtaggcctaatccaatctgtctggtatccttccaagacattgtatgcaaaaagggaccccagagatgctagtgcataaggaaagaccatgcaatgacacagtgagaaagcagccatccatatgccatggagagagccctcaggagagaccaaccatgtcgacaccttaatcttgaacttccagcctccagtactgggaagaaataaatttctgttgtctaagccccctattttgtggcattttgttagggtggctctagaaaactaatacaatttggtagaaaatctgcaccccaaagctgtacaaagagagcagaaaggatgagaaagcggtttcctcccaactctcatcgcagtggtcaagtttcattccacagggagcaaatgcccacacacgctggggctgcatcctctgacgtctaggtggctgcacccaaagccatgacacagctcgtttgtgtggcatttcacccaggtctggaagtggaaagtcatgtaggtggcattgaccaacataatgaaggaggccgttgagagaatgtggaaatatgaacaaggtttgtttcctataatcactttcccactctgaatttcagttttcttataataatgacaacttcataatgttattgaaggcatcaaataaaatcatagtgtaaaagggttttataaaccataagctattcattggccaccaacattatctagaaccaggtaagctatttctcaggcttgcttcttggttttaagagtctaaggcagcttgtagagcctcaactgaattataatacactaaattagagctgattaggccccaaatgcctctaacttggatactccatttcaatcttaaataatacactggtgctggataagcgtacaactctaacctgacacagtcctttgggttcaacctggttggctttgaacagatgcaaaaattacacccctgcttccaccagtggaatgtagacatatgaggaggtacaagaacagtagaccaccttcctctgtggcttgcctttctgtccaccaagaacaaagggggagaaaagagagtcagagagtaggatttgaaaggagaaaataatgataacaattctttccatttcctagcacctattatgtgccagacaatgtgccaggaaatttgcaacttatttgtaagtctcacaaaaactcttcagcaaacatattattagtcatattttaaaataaagataacatggatcattgaggttacatagccactaaaatcatacagctaataagtggtagggccaagctttgaacccaagtttgaaaaaaacggaaaggagaaagagggagagaagagtgaagattgaagaggagaaaaaaagggagagggggaaggcgtgagagaggaaggaagaagagatgaagagaagggagagagggagaaaagaaagaaggaaaaggaaaaatgaaacaaccagatatggatctggatgacagagaaaaaaaaagaaggaccgcttagtaaatgtgaatctccctcttggaaagaatgttcaaatgggagaagtctgttctttactgagccttggctctcattcttatagaagaaagagactctcattagaatttcactgtcaccaaaataatctgatgtttcaaattcacttatgctccttcccaggaaaacaaatgttcaagatcacaattctcaaaagtctgtgcctttagaaagcaactgcccatgctccatggtgcccggtggctataaggatgtctggactccaggggcctttgcactgagatgttgtctaagtaaaatcagggtttctgaagttttggcagtataagatgagccctgaacttataggataaactatgaagacctgtattaggtgttcactacagtgcaaaattcaaggtacttgaatatatgaggcaactttgatttagaagctacaaatttaaggaaagctacagatcttatattctgtgtaacaagactttaacagcaagaaagctttgctagaaagaataataataataataaatgtggcaaatagaaaacacaaaataaagcagaagaaaaaaacactggtcaggcatggtggttcacacctgtaatcccagcactttgggaggccgaggcgggcggactgcttgagcccaggagttcaagaccaacctgggcaacatagtgaaatcctgtttctacaaaaaagacaaaaaattagctgggcatgggggtgcgcttctgtagtcccagctactgcaggggctgaggcaggagaatcacttgagctcaagaggtcgaggctgcagtgagctgagatcacaccactgcactccagcctgggtgacagtgagatcttgtctcaaaaaaagataggtcagttctcacaatagatctgaagaaagaactaagttctctagactgtacactgagataatcattctttttctttgagaaatttagttacataatgattataagaagaggaaccttacaatataggacattttttactataaagctaaaataagtcaatggatgttcgatgtaggaaccaggtttctcagtgttagaaagagaagttatacataagcaagaagtgtagaagtaatcctgtggcactagattagaatcgggcatatcagcatgaacttatatttagtttgatatagatacagatttacatgtagggagaaataattatagttatatgtgcatacatgggttagtatacatactcatattttttagctctgtccactgaaaagtcctagaagcagttacaccccagtagcaataaacacagccagcacccacatcttggtttctaaataccattttccaacaaaaaagaacaagagctttttgaagaaatggttgattctttaattccattcatctctactccaacataaaatataagttaagcctggagcatgtcatagtgccagaaagtatggaagtgctcaaaaaacaaaaaggtgagagcatgtcaaagaagcacagaagctagcctgaaagagctcccaatagccaaagctaatataatctgagcaacaaaataaataatgtatcttgggtcacagaagaaatcaaaggaaaatgtaaaaaatataaataaataaataatgtaatattgaataataatccatttctaacctaaagcataaaataaatatatattagaacataccaatacaaatagttatggaatacattaataaatggggggaagagacaaagtttccttatggaagaatatcacataatatatgtaagacactccccatctgggaggtggagtttaaccctgcccgcctcccagggatgggctagatttagtaattcgctttggaagaatagagtagagaaagggaaaaatagtaactctgtagtagataagcctggaaaacaccaccttagccaagtgacgaatgttaacgttaccagcgatgtcatgcggatcttatatgccctctaatatgatgtgaacagagaggcacttcacctctttgaggttcttcccaaaactcatatcccaattctaatcacaagaaaagcaatagacacaccaagtcaggggaacattctgcaggctttctggacagtactcctcaagattatcaagatcaggaaaaacaaggaaagactgaaaaactgttacagatcagaggaggctaaggtcatatgacaaataaatacaatgtggcaccttcaatcagatcctgcaacagaattggttccttcattttgcaatcataccttggcaatgtaagagattcacaacaggggaaactcagggaggaatatacaggaactctctttacttagtaatgtctctgtaaatccaaaactcttccccgccaaaaaatttatcttaaaaaatgtagaacacagaaaagaaaattatagcctgatcttacatatcaataaaataaaaaagagatcaaatagtaacctataagaaaaaagaatccaacacagaataaacaataacaatacattcacacatgtatacataacacacacactcatgcatacacacatcacagccaagcaaggtattttagtaatatgggctgatttaataagagaaaagcctttaatgtaattaaaggtataatctcatcatcatctcaactgttgcagaaaaatatttttttaatttgataccattaaaaacaacaataaccagagtctgggaagggtagtgtggagggggagaaagaaaggagttggttaatgggtataaaaatataattagaaggaatcaaatctaccatttggtagcacaataaagtgactataggaaacaataatttattgtatatttcaaaataactaaaagactggaattagagcgtccctaacacaaagaaatgatcaatgtttgaggtggtagataccccacttaccttgattttattgtcacacatcatatgcttgcaacaaaaatcacatgaatcccataaatatgtacaattagtagtattcgtaataatttaaaaagttaagcaacaacaacctgactgctaattctagcaagttagaatagacagcaattttattaacagcataaaatattttttcaaatacttatagtgaacatcatgtttaatggtaaattattcgaagcaagaaaaagataaaaatgcccactattaacatttcgacttaatatttcatttgaggtcttacacaaaaagcaagaaaaataaatgataaaaaaatttaagataagaaaactaaactgtcattattcataaacattttgattgttcatatagaaaagttaaaactgtagttaaattatgaaacctaataagataatttagcaagaaaataaaattgttatgcaaaagtgaattttatttctatatgctaacaggaaaagttagaagataccattttaaaaacataatttgtaaaaagcaacaaacagctttcaaatatgcaaaagacttacatggaatataagaataaatttcaaatatataaaacatttataaggataaatgcattaaatatattgaagaatagtaaataagacctaaataaatggaaaaatataccagagctgtagattggaagaatcagtatcataaagacatcaaatgagaaagtgatcgcaattctagccaaaatcctaatagcttttttcatagaacacaactgatttaaaaattaaaatgtaatgcaaggggcaaggatgagccaggacatgcctgaggaagatcagtttggaaggaaatgccctaattggtatcaaaacttaaaataaacaaaacttaaactctctttacttagtaatgtctctgtaaatccaaaactcttcccccccaaaaaatttatcttaaaaaatgtataatcttaaatcttaaatgtatatcttaaaaaatctataataattcagaaagtatttttttgttcagagattaatgaataaatgaaagtaataaagtaaacagctcagaaatagattctgatcctcactttgctgtttggtggggaacagagctgggaggattggttcgccgtacaagaaaaaatattttaatttggatctttatctcatgccacatacaaaaatcagtttcatgtggattaaagactttattgtgaaagacaaaactagaaaacatatagaggacaggttaggatactattattacaatctcagggttatatagaaatagagtaaccaaaggaataaatgtcaaatacactgacatggatttcacacaggcaatgtccagccaacatgaaactgacaaagttcactttcctgaaaaatgttatgaaatttcatatatgttatatttaatttataatatgtaaaaagataccttactataataatttaaaaataactataaaataaacacctaagtccccaatttattcaattcatgaaacaagaggttggtacattctttcattcaaacccttctgtaaatggtagatatatttacacgttatagttatacaacgtattaacctaaaacacttttaattctgcagtggttaaataaagctggcaaggtttctgccttcaccgtacaaattcttaatgttttcaataatgacctcccctataatagccaggatgcgggcatcaaccacactcccacgacgccaccccaaaggcactgcacttccttcactgtggggtcagctattgctagggtgaccataagtctcatttgtacaagacagtcacggtgtattcccagagcccaggattaatcattaataatgtcttctttcactctcaaaataattccaatccccctagttgtttcaacctcatatacatgtgcctcatttgttctgaagccatctgctagacctggccaatgcttccttttgttaaaataacacattttgtctttctgtcactttatgtcttttgttctctacctttctacaaggccctcccttccttgggacttctcataagactattgatgcactgtggctttactcttcccaatacgtacaacttcacagaagcaatgtcataaagagatgacctaaagtaaagagaggcagagaccaaaaataaggtgaattccaaaggtggtagggtcttgttatctctgagccccctttatggactggcagctgagttagaatttcttcctccaaaccagaagtctatcctctgcatatctagccattgaaaaccacagcttgcatataccatgcttggcaatgaacgtgcatacaccctcagtagtgggaaagaaagctagccagctgtgcagagctggcagagagagactgatcaagaccagatcgtgtcctcgctcttagctcctgcttcagcctttcactctttagctctcttcctttctttttgcacaagatttgctataattttatccaaaattaggaatttttctgcacaagacattgaataagtgattaatattcatagtaaactacccccctcccttgacttattcttgactcactgttaggttagagacatgattgtcagtaatttcatatcaactaagagctactggttttaaatacacaactgagagctcttattgtttgtttggaatgacctgagaccttttggttatttcttattttttgtctgtatactgctcaggaaagttgctgaagagttagtttctgtaaatataaccctgtaaatataatcaaatgattctgtttctaatcaaagtgttggggacatttaataggcacttgtttattaattgaattgatacttgcattttttctctttcctaagaattcttgttcaagtctgtatttatgtttatgtttaaatacaagaggcattcactaaggaaggattttgtcaaaagacaaatttaaagtagtttaactcaacatagggagatcactttatgatatatttttaagggcaagtaagtttaggcagcaaattgtgctaaaaatgaaataaatgttagataagttattaatcttatatttaacaaaaggttatagctgcagtgagataaatcttagaatttgagggggcattgtttttccaggcaaacttgtatcacagtatactatgacaattttcaattcacatttggattgtactacatcataataaaaatcacatatttttaggaaaaaaaaacagggagggacttcattaatttctccaaggggtttgatgtttaaatcaatctcctttgaacacctatcctgccaccattattttttaaaatattctatgtttcaactggacagtctctgccagttactgatatgccaacagctttgtatatgatctaagtagtatacaatattaatcttacgtcttttacaaaaagacatctcactttgcaattgatttggatagcacggttggtagtttataataaatatttgatatctaaaagatagcaaacaactgatagctactgaaacaatgggtaggaagagatgttagtgttaagtggagaagggtatttatagactaatttataaatgatcattactgtttcaaagactgccacttccttttggaacctgataactgtaagacccagataatgtattctggtctgacaatgagaaaattctacttagatgatacacagttatatcacacatgtgaattctacttaatgaaattgtcttagactgtatatttctgatatttcattcctgtagttaggcatttcctagaccttgaatttcatcacttcaaacacattttcaatactgttcacattattgaatttaccagaaagtgtgcgctaaatttcttttcttttctgaatagcagtccatatgttatttaagacatttgctgcattgtgttatttgagccagagacgtaagtcttgggagaaaaacataaaataaatacattgatgctatatgtcttgaatataactctgagagcttccgaactatcctaaaaccttactttcctttctggttagtaaatttcttgggctccattttgttattatagtgtcagttactttgcatcagaacaaataaggcactacatcagagcagctaaaaatgtaaacttgggaatcaagtgattttgattaagttgtgtatctgaatgcctcaacttcctcatctccaaaagtgaaaagaataataatacctactttgaaggattgttgtgaggattaaataagtcaagacatagagagtacttaaatagtgcctgatacatagtaagtgctttacagatactagcacttagggcatctagttgctgttaaaagtctgctgaatcttttaataaccattttaggtgaagctaaaaacaaagatagtacccagatagcaaatgagcaggattagctggttctgcacgtgaggttactctcaaaatctcgggtagaaatgttaagagagggggcggttgcagtaacagctggctaggtaagggttccatctccaatcactgtgtggcccccgttgactcccttgctttttctgaatcttctccctcagcaaaataaagagactgaattagttgaccctagtggtcattcttcattctggaatctcacagcttaatctgccccaaaataggcaagatcaaaagagtgaaaacaaatgcggtttagtcaaggacctgtactaagtagctgtagtgttctccctgttctgtgagggatgtcttcccatttgaccctgttctgtgagggatgtcttcccatttgaggccgtcctcagaagactggaaatgtctgatctttttttaatagtgagagtggtaaagcctgtgcttagtgatctgggtctccaggagagctgaagtcctcactggtaaaaaataaacacccctacaagaaagaatatatttggagaacaaactataggagcagcctgcaaagtctcttcttgctctcatcttagccacttgcaaggggggaaaagaaagctgttatctactaattgcctaatgtgtgccaaccactgtgctagacatttaatagatatgacaagaaccatacaaggtggagtttatttttcctattttacaaatgtggaacttaaggctcaaagagggaaagtgattttccaagtatacacaacaagaaaatggaagaaccagaatttgaattgcaatctttctggtttctgctcttttcactccagcaggttgccatgggctccaccttacctactcccatggccaatgagaacaagacctgatggtatgtgactatccaaccccaccagctggtaggtggcagaatgagtctgtggcccaaagcccattctctgaatgccaaggacaagcctacagatgcttgcatatttcatcttcactctgtgttccaaagcctgtcttccaactataagaaatgcctaaattaaattatagaattattcttacattgatcttagtccagctccaattcttaaagatgtgaattaattcaatttggatgatttagaaaaacaatataatatagtagaaagaacacagaatttggattcatatcctggcctccaccacttacaaactggatgagactaagcaagtcacacaatctccttgagctttcgtttcctcatatgtgaagtgtggataatgatgcatgattcagaggttattgccaggattaaaggataaaatgcatgtaaattgcccaatacaatgcttgatagattcttggtaactgccaatgccccttttgcaccaattatcagcatttcatcatcctgactctcttcctatatggaaattaaggtccataagggagcgaaattgagaacacagaaacagatccatttatatatggaattttcacatatgacaaaggaggcatagaagagaagagtgaaaaagcagagacactggtctgaaaaaaatatttttttacatggaaagtttaaatggattgctacctcacaccacacacaaatagcaaatttggatccaaagttaagaacaaaattgtaaaatttttggaagaaaatataagagtaaacatattgagccttagcatagatcaaaatttcttaaaaatgatacaacgatgttaaccctaaaataaatttgactcatttgactgcattaaaaagtaaaaattctgttcatgaaaatcttcctttaaattttttttaagaaaattaagaaactggaaagacacttgtcatgacatatcagacaaagggaaaaagtatataaagtacttttttaaaaaatcataataaaaaagaccaaagtcaattgaaaaataaagatgtgagcaggcatgtcaaagaagaggaaaaaccaataaaaagatgaagatacattgaaattcattcttactcaaggaaatgaaatcaaagccacaatgatatatcatgttgtacctttctgattgacaaaaacttagtagttagactataaaaagtgatggggaaaatctgaaacaatggctctcagacatagctagtagcaataatgatttggggctatcttataaagtttaacttttgcatgctttatggttatgcaattacattcttatacctaaggaacatttttcacatgtgcccaggagaaatgtacaataacatttgtagaagcactttgtgtaataacaaaaaattaaaaacaaactctaccagtcagggtccagtcaagagacataaatcacacaggaatttgaacagggacttttatacatgaataaaatattaattataatgggggattagagtaacaggcaattggttattcagaggttaagagaactctaaaggatataagaatagaagatacaaggtgcagccgctacccctagaactgaattagagcactaaagaaaagaatacacctaaaagaggaccccttccccaaagttaagatgcagactccactggaaagctctctgctgtggctcacagatggtaaagaagtccactgaggtgtccggtgggaatccactctctaggatgccagtagaaaccactcacagggaggcaatgtggctcagaactcattgtgtagccacctgaggggcaccacgggaagcttcctaaacaggaactccacatgttgccagccccatgtgctgctgcctgccatgtactacagtagccagcactagagctggcactggagaaggcttcccaaggagcacactggcgctggaagagaagtcttgtgttgccatctagtacccatcactgacaaaggtgaaatgtttacagggtctgtacccattgtcacagaacagcaatgaagggtggctctggaagagagacaatgaaataatggctgacacgtatcccaaatgcccattaaggagaaaataaggacattcacatcacagaatattatcaccatggaaatgaatgaacaactttaagcaacaatatccatagctagaacatgggtgattcttagtgacataatgttaagagaggtgaaaggaaagcagatatgatcatggaggaggcctcaggtagttgtaatggaattgatctgattcctgggttgggtggtgattcatcagtgtttattatagtattatatcatatcagtatacaaaatgaaagatggtcatgcatgatgctgagactgcatcataaacagtaggttatgaaaaatacaactcatgtctctgtatgtgaggtaccaaaaatgtttaaaaagttaaaaaattaaataattagaaatatagtctgataaaatttcacattattacgttactccctgagtaccatgtctttcagcttgtgctataactgcaaagaaaaaaatttaataaatttcccaatttctctggtatttcctgatgcagtgcttctcaaactgtgtcaaaggacaatttcattgcttgtttttttcccagtcgtgacgtgctgattctttggtacctctactctgttcaaagcaatgaatacattgatcatgactttatttgtagggacattgtcaagttgctataatgcttctaaatggtttctctttgattctgtactcatctaggatggacctgtaataaaccgccccaagcctggcacgagtcctttctctaatgggttagaaacatgtgcttcagaatcagataagcttaggtttgatttcctcctctatcacttactacctgcttggataagcagattagctctctgagcctttgtttcttcctctataagatgataatgaaaaatatttgatagaataataaagaggaaggtctggaacaagatgaatgaagcactcactcactgcagggttcacagctgagactgaggcctctcaaaactttgcatcctaggtgtctcccttgctttacctaatctgtgagggctaaatgaaattgggtaaaaaaagtgcttaaacaacgtgtggcacagagtaagatcttctgtaatggtgttcataattatgattccaatttactcttaatattatttatgattatttttgttgtgttattattatcaaccgggcttaatctcttagctctccatttctgttcgttaagctagaaatatagtgaaaatccctttggagggaaaatgttcatgtagaaaaagcaaaagattcagctttactcttccctcatccatttattcatttggcaacactttatattgtacctaatatatgtcagaactatgttgtttactgaagatagagaatgaataaggcacagtctgtgtattctcaaagaactcacagcctgaggtcaagtggggtacgtttagggagtgatggtaaaatggcaactgctataatagaggttaagttgggtctaagttagcccggaggaggaatcacctatgtttggtgaggcagtgatcacggtggacttgagtcataaaaaatgaatgatacttttacaaaccttccaaaatataatgggttcatttccccactgtgtgttcttccatacaacaaaaatgcataacacatagaggaaaaaaataacacttctcagatgaaatagactgcagagatcatcacgtgccaatggtaatcaaccagagaaagtaccgccctctaaggggcatttgaaaacatgctggggtgtgtttagctgtcataactgccgttaggttactagcattttgtgggcagggagttcaagatggtaaacatcctgtaatacacaggacagtccaacacaaggaagaattgcatttatgaaataccaatagtgtttcctttgagaagcactgaagacagctcgtgacttatagatctacatgaggtcaaataggcggaaacaaaaatgccaaagccattcacacaattatgtgtaccctatagtgacaactgccttcctagagctagtctaagccttcaagcatcctctcgtttgtgaatcacaaacgctgctgagcgcacatcagtgactatgcaacatgggccttggtccttttttctacaaagtatggacctccttgtcaatatgccaccaagctggacattccaaaccatgctgactggcaattttacagggtaacagacaaatgtattgtggtttgttagtttagtgtccctgataccttttcttcttccacatcggtcattctttctaagcttcaagaaatacctttctttcccttctgtcaatatcccattccttctcaaagatccacatttgtgacaatctctatgtttaagttgaaaggttttaacatttttattttcttttactgaaattcaaaagtcatttattaaaccaggaggaattaattttatgttgtttttaacatgttgtattgcatgaatagccagttttcattcagccaagacccacaacacaccaggaattttcatataggaatttaaggaattttacttatactgaagtatgaccataggaagtttttacctagaaaatatgcagactttactggacagcattgagcagtattttccataattatctacaaatcactaataatctttatgatgcaaaaagtttacataaaaggtattatgaaaactaactcagtgaaaaactcagcatattcgatatgtttttttatttctggaataaagtaaataaatgaaatcattttttaaaagttttgctactttagaataagcctgtaaatttttaacaatatgcactaaaatgtttgtatattttaccagttttgtatatttcctggtttggcaaacactggtatgatgtatagtaattgttgtagtttgtgtcaaatcagcagtcaatcagatctgtcattatgtgttttagatctgattctaaagattcaattgtatagtcattgtggtaagaccttgcttgacagccactgcaacaagaaaagccaaggtgatgatgaccagcccataatattggcaagcagatggtcattgctgtagctctaagaatgagtctagctttctttgcagtttttcacaaatatttctacaaaaacatagaggttcaacttcattccaaccagaaaaatttgttttccagagctggaagacactatggagattttccaaatagacttcctatatggatagggaagcagagacccagtgatgataattcatttgtacaaactcacaaaatgagataatgggggagccagaattggaaatcaaattggtctcaattgagagatatagactcaacattagaaaagccctatgggtcacatggtaactagcactccccatccccgctgtcctctgctttctcactgccaggccaagggtgtatcagcattctgtgacttcccagagacccacactgatgatgatctctgtacataaactgaagaggtttaaaatttttatttttcattaccaaaatacactaattaagttctttcttataccttgaaaaagcaagaaaatatctgagcatgcaaaaaatgtcattaaactcatggtcataattaactggacatattccagtcttctatatgaagcctgttgatatattctttctgtatacatttactaaacagatctaacaaactaactaaaagaaaacactagaagcaagagttgataactgaaaatcttaccatgaggactgagacagaaaaatttaaaagatagaaatgaatttaagaagcttaagtatgaccattaagaggtggaggcattcatatcccaatagatgtttgcaaaatgggagaagaaaaggtctcaattatctgggccatacgcttattggcacaggggccacacagaattactgtcagtaagctcatctccattttcttgattacacctataaaagtgtgttttgcctggccaggcgcagtggctcacgcctgtaatcccagcactttgggaggccaaggagggtagatcacctgaggtcagaagttcgagactagcctgaccaacatagagaaataccatctctactaaaaatacaaaatcagctaggtgtggtggcacacgcctgtaatcccagctactcaggaggctgaggcaggagaatcacttgaacctgggaggcggaggttgcagtgagccaagattgtgccatcgcactccagcctggcaacaagagcaaaacttcatctttaaaaaaagaaagaaagaaagaaaagtgtgttttgcccaatggagactaaagccaccaaaaagaaatatttaagtaagtaatagagatacatttgccagaattagaaaaagctgaaagacttcagaatgaaagaagagagatgagtggtgaaaactagaacaggatgtattataatgaaattaacaatatcaagagaaaattataaaagtgtcaaaggaaaagtacaaattaattatttatttatttatttatttatttatttatttatttatttatttattttgagatggagtcttgctctgttgcccaggctggagtgcagtggtgcaatctcggctcagtgcaagctctgcctcccaggttcatgccattctcctgcctcagcctcccgagtagctgggactataggtgcctgccacaatgcctggctaatttttttttttttttttttttgtatttttagtagagacggggtttcaccatgttagccaggatgatctcaatctcctgacctcgtggtctgcccgcttcggcctcccaaagtgctggaattactcccaaagtgctgggcgtgagtaaccgcactggcctacaaattatttatgaaggaacaagaataagatgacatgtggtttttttcagcagcaatactgatgcaagaagataacgaagtaatatttttagagtactgaagaaaaagaacttagaatccaaaatttaatttcaagccaaactgtcattcatacatgaagtcatgataaaaatattacctggcataaaaaatttcaaaagtttttcttcacaagggcacaagcacacattgaaaagggatcaaatattttggtaaaatttgtaattatctggaaaataacttaagattaaaggaaaagagaaatataaatataataatccatagtttatccagagttaaatgtagacactatcaatatggtggttgtgaatggggaactccagggatcttgataggcttagtaaaataagaactttaaatatatatatattacatatatatataatatatatgtaatatatatatttaaacatataaaaaggattttttaaatttcaatagatttttggggaatagctggtgttcactgacatgaataagttctttagtagtgatttctgagattttggtgcacccatcactcgaacagtgtgcactgtacccaatcttaagtcttaaaaaaggattttttaatcataaaaggtgggacacactgaaataaatatagtaaaatggcagaaacaagcccaaatttatcaataatttacataaaattaaattaatgaattcaccaaaggaaagaaaaaattagattgattttataaatccgtgatgtttaccagagacacacataaaacataagattaaaattaggctgggagtggtgactcacacctgtaatcccagcactttgggaggtggaggcaggcagatcacctgaagttaggagttcgagatcagactggccaacatggtgaaacccagtctctactaaaaatacaaaagttagctgggcatggtagggggtacctgtaatcccggctactcgggaggctgaggcaggagaatctcttgaacccaggaggcagaggttgcagtgagccgaggttgcaccactgcactccagcctgggcaacagaacgagactccatctcaaaaataaataaataaataaataaaaattttgaaaagattaaaattaaaaagataaagtaaatacaagacaaatgctaactaaaagaaacctgctttaactattttaactaagctctttaaaacctacattaaacaagtaaaactaattttgaaatataaagcattattaagaatgtagtgagttattttctaatgattgagccatccttgcatgactagaatagacattttaatgaatttagaagctacagcaacttttaaatattttgaacttaataaaaatgtctcaatacaagtgaagcaaaatatacaaagagaagtgaacaaatttcctattacattttaagatttcaacacatctctcttgattattgatcgtacaagctgaaaaaaattaggaaggatataaaagaactgcaaaatatctcagttgtatagtcattgtagtgagaccttgtttgacagactctggaacaagaaagccaagattatgatggccagcccataaaattgggaggcagatggtaattgctctggctctaaaaatgggtctagcttcctttgtggcttattacagatatttctgcaaaatcatagtattatagagaattaattaagaatcttgactaatgagcaattataaagtctccttccaatagttagagaatatctacttttttcaactatagtatgggtcatttagaaaaactgagcaggtagttgggcacagtggctcatacctgtaatctcagcattttaggggaccaaggtgggaggatctcttgaggccaggagttcaagaccagcctgggcaacagagtgagacctcatctctacaaaaaaataaataaataaatattagccacacatggtggcatgcacttgtagtcccagctactcaggagactgaggcaggaggattacttgagcccaagagatcaaggctgccatgagctatgatcatgccactgtactccatcctgggtgacaaagcaagaccctatctctaaaaaaaaaaaaagagagagagagaaaggagagagagaaagagagagaactgattaggtattagcaaaagaaagccttaataaattaaatttcaaaaagaattatacaggccataacctttgaacacaacataataaaattatgtttacaaaatattttaagtttccattttaaaattttaatataaacactaaaaaagtatgtgttactgaataaatcataattaattttttaaatatttagtacccaacaataaggaaaacaaaatatatcaaaacttgtgtgagatatcatattttttaatacaagccataaataatattagaaagggagaaggtcttaaaattaaggagttaagtgtccctcttaagaaataagaatgagataataaaaccatggagagcagaagcagaaaataataaaattaagagcagagatcaacacaataaatacaaagatataattaaaaatatcaaaaagtcaaaagttggaaaaaaacaaacatgacaagatcgatcaagagaagaagataaaaggcaaaaattaataatgaaaagtggggtataatttgggccataaagacagataaataagacattagaagggacaaaaaactaatatagcaactatttgcctgcaactttgaaaacttaggtaaaatggacaaatatttttgaaaagtataaacagaactcaagaaaaaataaattggatagtcttataattattgataaactaatgcagcaattaaaatcttcccacaaagaaaacaccagaaccagatgattttacattcaagttctaccaaactttaaacaaatatattctcctttagacagcagaaaaagagagaatgacccaatttcttcaatgaagctagtataaccttaatccctaaaacaaccattcattttacaaacatttggtaaaattcacattcattgttttttttttttttttttttttttttgagatggagtcttgctgtgtcacccaggctggagtgcagtgctgtgatcttggctcactgcaacctccacctcccaggttcaagcaattcttctgtctcaccctcccgagtagatgagattacaggtgcccgccaccatgcccagctaatttttgtacttttagtagagatcgggtttcaccacgttggccatgctggtctcaaacagctgaccttgtgatcttcccgcctcggcctcccaaagtgctgggattacagacctgagccactgcgcctggcctcaacacctgttcttaataagactcttagaaaatttgaaataaataaacacaataaacaatgtacattaaatatttaaagcaaaacttaccctaaatgaaaaattgttggaagaatcctcttccaagttagaaatggaaaaaaaaaattattctattgccacatttaggcaacaatgtattgaagagttttgctagggcaataaaaccagaaaaaataaaaaggtgcataaaaactttttaagttgataaaaagctgtcaatacttgcagatgataatgcttttttacttacaaaaccaaaaggaactacctgtacatgattagaataacaggagagtttgctgggtgcagtggctcacacctgtaatcccagcactttgggaggtcaaggtgggtgggtcacctgaagtcaggagttcgagaccagcctggccaacatggtgaaacccccatctctactaaaaatacgaaaagtagctgggcgtggtggtgggcacctgtaatcccagctacttgggaggctgagacaggagaatcgcttgaaccctgcaggtggaggttgcagtgagccaagatcatgccactgcactccagcctggacaacaaagagagagactctgtctcaaaaataaagaaagaaaagaaaaaaaataataggagagtttggcaagataactgggtacaagagcaatataaaaatgtcaactgctgttctaaacacaacctgaaacatagaaaacacaaagaaaagacaataaattacaactgtcagaagatgtttcagacctctataattttttttagtttactgagatattaaagaagatatatatagagaaatatatttgtgagtagactatttatatgctatcagttctccccaatcaatctattgattcaaattgattcaatggaatttaaataaaaattccacctagggtattgttaaatgaattttaatgagatgattataaaatatatatgaaggagttaagtgctaaaagtagtctaacaaggatacttctgaaaaaaaacaagaataaggaacttgccttaccaaacaccaccttactatgaagctgtaataattggatcagtctggtattgatggaaggacagccacattgaccaatggaatagaatagagagctcagaaacaaacaaatgcatgtaaataactttatgatgtcacagaggcaccatgtcctactagaatggaaaagagaaactattggaggatataggatacatgtaccaaagtatccattacagcaatgttctcatggcaaaaacaattagaagcaacccaaatgcctgtcaaagggagagtaaatgcagtgtgatatattctcacacttgtatattatacaacagttataaaagaaacacagagaagtgtaacaatatgtattaatcttgaaaatgtaaagttaagtaaaagaagtaaatctcaaaggattacatacagtataacatccttttggtaaaaataaaaacaactaaagtgaatatgtttgcatttacacacaattatatataatgtgcacatcatatataatctgtatacacaatggtgttacataaagaggcaataacactttataataaaggaagcaagtgaactaacacaggatctcagacattgattgccttgtgagagggaacaaggaggcagaaggatgggttggttatagtcaaggtcttagcttttgttttagatggtgttttcaagaatacttgctgcattattaaaaataattaggctgggtgtggtggcttacgcctgtaatcccagcattttgggaggccaaggtgggtggatcacgaggtcaggagatcgagaccatcctggctaacattgtgaaaccccgtctctactaaaaatacaaaaaattagctgggtgtggtggtgggcacctctagtcccagctactcaggaggctgaagcaggagaatggcgtgagcccaggaggcggagcttgcagtgagccgagatagtgccactgcactccagcctgggcaacagagcaagactccatctcaaaaaaaaagaaaaagaaaaaaagaaaataataattaaggttaagtaaataaaagtcaccaataattgaccaataattagtgtatatcacgattataattaatccaagtctatgcaacctgaggtccaataaaataaaacaataaaataaagggtagaccattgtagaaatacgaggccatgttagtagtactaatcctgttgcaatttttctttagagacttccttggtcccagggtcaggatggagtgccatggttatttgcttgtgtccccatccagttcttgtggaagcattttcaactagatagtgagccattcgtctggccaaagcaacagtaacatcagctcctcagacttcacaagatgacagagccccattcattcccagatctgaacttcacattgatcctattattttccaggcctaggggtcactttccagcccttctcttgacctaggaacttcttatcattccccttcatcaagtcagttaaacatctctgcatgtcaattgcacctgtgttggtcactggttttgtttcaagtggttcattccatggatggaggactcagtttccccagcagtcacaacttaacgaaaatggcaaatgagttaaactggctagatttcactcaagaacaaaattgatggtcatggtctgacttatcagttgttcccctttcagtcagtgatttccatgtgtattagtttgttcccacattgctataaagactacctgaggctgggtaatttatggagaaaaatggtttaattgactcacagttctgcagactgttcaaaagtcatcaggaaacttacagtcgtggcagaagggtgaaaggatgtcctaccatggtggagcacaagaaagagagcaaagggggaagtgctatgcactttaaaaaaaaacaaatcttatgaaaactcacttgctatcatgagaacagcaagagggaaatctgcccccatgatccaatcatctcacaccaggttcctcccccatcattgggaattacaatttgacatgagatttgggtggggacacaaaggcaagccatattactcaggctctggcccctcccaaatctcatgttcttctcacatttcaaaatataatcatgcctttccaacagaccctcaaagtcttaactcattccagcattaactcaaaagtccaagtccaaagtctcatctgagacaaggtaagttccttctgcctatgagtttgtaaaatcacaaaaaagttagttactgccaagacacaatgagggcacaggcattgggtaaatgcccccattccaaaagggagcaactggctaaaacaaagggactacaggctccatacaagtccaaaaaccagcagggcagtcattaaatcttaaagttaaaaaataatttcctttaactccatgtcatgcatccaggccacaccgatgcaagcggtgggttcccaatgccttgagctgctccacccctgtggctctgcagggtaaacccctgcagctgctttcatgggctgacattgagtgcctgtagcttttccaggtgcatggtgcaagctgtcaatggatctgccattctggggtctggaggacagtggctctcttctcacagcaatactaggcagtgccccagtgggactctgtgtgggggctccaaccccacatttcccctccacattgctctagtagatgttcttgaggtctctgcccctgcagcagacttctgcctggacatttaggcattaccatacattctctgaaatctaggcagaggctcccaaacctcaactcatgccttctgcatacccacaggcccaacactacataaaagccaccaaggcttggagcttacagcctctgaagcagtgaactgagctgtatcttggccccttttagccacagctggaagtggagtggctggaatgcagggcaccatgtccagaggctgcacagggcagcaggactttgggcctggcccatgaggtcattttcccctcctaggcctccaggcctgtgatgggaggggctgcctccaaggtccctgaaatgccctagaggcattttccctattgtcttggctatgaacatttggctcctctttattaatgcaaatgtctgcagccttgaattcctcctgagaacatttttgttgttgttgttgttgttgtttttcttatcacatggtcaggctgcaaattttccaaatataagttctagtttcaggtaattcatttgtttacgcaaatgagcttaggcttttagatgcagccaggccacatcttgaacactttgctgcttagagatttattctgccaaataccctaaattatctctctcatgtttaaagttccatagatctctagagcagggcacaacaccaccagtctctttgctaaagcatagcaagagtgacccctttactccaattcccagtaagtttctcatctccatttgagaccatctcatgctggacttcactgtctatatcactatgagcattttgatcacaaccatttgacaagtctctaggaagttccaaagtttccctcatcttcctgtcttttttctgagccctccaaactgttccaacctctgcccattacccagttccaaaaccactttcatattttcaggtatctttatagcaatgccctgcttctctagtaccaatattctatatagtccattctcactggaagcatgactgaaaggtctcaggaaacttacaatcatggcagaagggtgaaggggaaccaagcatgtcttaccatagcagagcaggagacacagagcaagacagaaggtactacacattttaaacaaccagatctcatgagaactcactcatcgtcatgagaacagcaaggggaaaatctgcccccatgatccaatcacctcccatcatgcccctcccccaacattgggaattactattcgacatgagatttgggtggaaacacagacccaaatcatatcttgccttggtgtagaagacaccatatgcaatgaatgtgcggattagaaaaggggccagactaggaaaacctcccatgaattgatcattttatttcctcacttttattatagcttgcatttccttccctacctccagaggtatgattttgaaaactaaatccaaagaaagacaaaagctattggtggttcccacagatggctgtttctcaaagggtttacaaaatctgactgattatcagagatgtctgaggagggctgtcaatgcaaaactgtggttctcaaaggggtgatccctggaccagcagtatcagcaacacctgggagcttgttatgaatgcagattctcagatgacaactcagactcactgaatcagaaacgctggggttgggtccagccatctgtagttttataggcgattttaaagaaaggtaaaatttgagagaccctgagagcatctcaggtcctgctactgaagagttgggaggtctataggggcccaagtttcagaatgttaacaagatccccctagtagatgctaaagactaccagatggcctcaagagtctgaagccatttgtctttctttctaggaatataaatgacaaagacaccactaactgaggaggatctctcctcctaccctgctctattttctgtcttgttgatctcactctggactcaaggcagttgaatctgttccccaaaagtctatttccctgtgatgctctggtgttaacagaggattgcacatagtttcttggtggaaaaaaatgaatcaaatttctgctttttcagcctaaatcatatattctttttagatatcattttccaattattaaaaacaaactttgcacaattgttccagatttctcactttgtcagcaggggtttcatgaagatatttataaaagctttgagaatcattaaggccatagccacctgatccaggaaatacaaccttgggttggccacaggctaagtgagccctggtacacaggtagagatcaaggttccttcgagtttgactgtttgcctcaaacccacatcccatgcccctgccctgtctgtcttagtcctgaaagctacagaaacaatactacatcttcagactaagatttggtcttttggtcttagaactctccctacagcaacccctctgccttttctttttttactgtagtaaaatatacataacataaaatttatcattttatttatttatttatttatttattttgacacagggtctcactctcttgctcaggctggagtgcagtggtgtgatctcagctcactgcagcctcgacctccctggactcaggtgatcctcccatcttacccttctgagtagctgggactatgggcatctgccaccatgcccggctaatttttgtatttcttgcagatggggtttcactatgttgaccagttagtctcaaactcctgggctcaaatgatctgccctcctaaatttaccattttaaccagttttaagtgtacagttcaatggcattaagcacgttcatattgttatgcaaccatcccaaccatctatcttcagaatttttttatcccaaattgacattctggacccattaaacactcattaccccctcctcccagcttctggtaagccctagtttactttccttctacatgaacttgactattctggatatctcttataagaagaatcatacacgccaggtacagtagctcatgcctgtaatcccagcactttggcaggcctaggcaggtggatcacttgaagtcaggagttcaagacccacctggccaatatggtaaaaccctgtctctactaaaaatacaaaaattagccaggcatggtggcgggcacctgtaatcccagctacttgagaggttgaggcaggagaatcacttgagccagggaggcgaaggttgcagtgagcagagatcgtgctattatgttccagcctaggagacagcgcgagactctgacacaaaaaaaaaaaaaaaaaaaaaaattatcatgcaatgtttgcccttatgtgtttggcttacttcactcatttagcataatgttcttaaggctgatagaagctgtagcatgtatcagaattttgttctttcttaaggctgaaaaatattccatggcatatatataccacattttttaatccttttattttgatagacatatgagttattttcactttttgtctattgtaaataatcctgctatgcacatgggtgtaaaagtatctgttctgctaccttctttcagttctttagaggtatatatgtagaagtgggacctctgaatcatgtggtaattctatgctaatttttgaggaactgctagactattttccacagtgctgcaccatttcacattcctgccagcaaggcacaaaggttctaatttgtccacatccatgtccacatccatcttgggagcatttgtaaaaggtatttatttcctggcaacaacttaaggaagaaacagtgtcttgctcttgtctgtcatgctagcaatgagcacagagcctcatacagagcaagttgagtgtatgttttgcagattgacatggatggagggagataacacccatttagtctttctttcattaaatccctagaaatccccgcgtgtggggcctccctactttttgtattcccatagtaatttaaactcctcttaaactacacatcacattttactttactcaattttcagagtcatgggacttacatcttatttttctctaagactatgagtctcttaaggggagaatatgaagataggctctccttgagttgtttacaactttctcgttcttcatgacctaagtcttctttccccagaataccttttttaaccactgggctcagagaacttttgccccactgagtaacagtttttactaaattggcctgatcattgacagcctcaatcaatatcaaatgcctcaatgaatcaaaaactaaaggaataaatgagcaaacaaataacccatttaacataaattattctctaagttaacacaagttactgactacccaccatgtgctaggtgcttgggaatatcagaggaataacacaccatccttgcccttcagaaaaacatctaatattatttatctcattaataggaggctgtgtaggtaaccatgagattgcaaagagaccagacagtgtcccaaataagggaataagatgcaaggtatataaaactcttcatggagtagatactttttgagctgaatctttaaaaagcagagttttccaaatatacaaagcagagactttgcattccaagcaaaaggaatgggaggaggaaaatacaaaaccgtaaaatagactgaccttgttagaagcctacaagtggggcagccctgttgaagtggagaggtggagagtgaaaagaatgtgtggcaagctgtgacttccttatccagacacatctcatccggctgatacacatacccatattcctgtcacgttgatcactgtgttcaccaaacatgcaatgtttgcccctgcctctgtttgtgtcaaccccaccttcctacttggaatgcttgtcctcacttcctttttctggatccatgagtatctagttttgtgacccacaaacctagatatggtttgatgagtcaactaattattcaggacagagagtgatcactgagaaaaagaggagaataaaagtcaaaagagattctgaagattatgcaaactactttggtttgctctaggtttgagttatcagtgttatgactagagattcatacaatgctgaagagacaaagaaataattctaacacttccattcaagatggtagactgagcatatacactaccttcagctccttccagaaactccagtaatgtgtcaataaactgatttttttacaagaacaagaacaatcggtgaaaaggacaattgcaacaaaattttgacagctatggagcagtaggaccgtggattagtggcttggctgagtccagaaagctgtatcctaagccagtgttggagaaagcttccagaaacagaagaaatctcaaaaggttctggaatttgtggctctatatacatctaaaagtggagatacaggtgaagttaaaaacaggagaatcaattaaaattatatttgatgctgtaaaaccctagatttcttccttcacttcggcagaagaataaagacttattctctgttgattgcaaaacagaggctctcttggcatatgaagagaagtatagctgagaagaagaaaaagttgaacccccacccctaaccctaccaccattcagctctcttctctcacttagcctcagaaagggaagccacacttacaaagcttagcaggagtttggaagagcctcctttggggaagctgaccagtccaagaataaacctagaggcactgacatgaagggttcctgcaacataaaactcaacaagagttgcactctaagagcaacccaagttgataagccttatgctccccatacaaacaccaacagctaccaatgaacattttggtgccccattcttaaaaataattggagagctcagtgtcactactgtcttgtacatttcagctttgataaactttcaacattttgatcagctgtagcctccttctggcctgatcagatttgcatagcaaagaaacatttaagctaccaactagtcggtacatacaggcaaagtgtcaatgtgatgaaatcagtaggcagaagccatctttgcatttgaggtcgtcgttaagaccctctgtatcttttttttttttttttttttcgacacagagtctcactgtcaccaggctggagtccagtggcacgatcttggctcactgcaacctccacctcccggattcaagcaattctcctgcctcagccccccaagtagctgagatacaggcacgcaccaccacccccagctgatttttgtatttttagtgtggatgggttttctccatgttggccaggatggtctcgatcttattgacctcaagagatccacctgcctcagcctcccgaagtgctgggattacaagcgtgagccactgtgcctggttgaccctctgtatcttaatgagaatggtggtctgagaagccacagagctgtagtctagaagctgtgcttttgtgcaatctctaaaacaatatttaatcttttttatttaaaaaaatgtttattgctacatagtattttaaatatttatggggtacatgtgatattttgttagatagaatgcatgcataatgatcaggtcagggtattatggtatgtattacattgattataatttctagatgttgggaacatatcaagttctctcttctaagagctacttgaactatacaatgcattgttgttaactatagacaccctattctgctatcaaacattagaacttataccttctatctgtctgtatgtttgtgcctattggccaacctctcttcattcccccgctcacccacacaccatttgcagcttctgatatttatcattctattctctaccttcatgagatcaagttttctagctcccacatgtgagtgataacgtgtgaaatttgtctttctatgtctggcttattccacttaccacaataacctccagttcctgtaaatgacaggatttcattcttttttatgcccaaataatatttcattgtgtatatatgtcaaattttctttagtaattcatccattgatgaacattcagtttgattcatatttttgctattgtgaatagtcctacaataaacatgcaagtgcagatatccctttgatatgctgatttattttcctttggaaatcccagtagtggtattgctgcatcatttggtagttctatttttagtttttgagaaatctctattttgttttccataatggttgtactaatttatattcccatcaacagtgcataggagatcccttttctctgtatcctcatcaaaatctgtaattttttttcttattagtaatagccattctaaccagagtaagatgatatctcattgtggttttgatttgcatttccctgataattatgttgagaattatttcatatacatgttagccatttgtatgtcttcttttgaaaaatgtctattaatgtcctttgcccactttttaatggaattacttgtttctatactattgagtggtattctggatattagtctcttgttaggtgaatgatttgcagatattttctcccattcaacaagtttttcatcattctactgattgttttctttgttgcaaagaagacttctaatttaacagacttccatttgcctatttttgttttcattgtctgtgctttcaaggtcttagtcataaaatctttgtctaaaccattgtcctgaattgttttctctatgttctcttctagtagttttatagtttcagatcttactaagtctttaatccatctttagttgatttttgtttatggtgagagatagggatccagtctcattcttctgcatacggacattcaatttttccagagctattattgaagagtgtgtctttaccccagtatatgttcttgacacctttatcaaaaagcagtcagctatagatgcatggaattatttctagattctctattctgtccattgatctgtgtgtctgttttcataccaataccattctgttttgccttgtagtatattttggatagtgtgatgcctccagctttgttctctcttgttcagaattgctttggctatttgagcacttttttgattccatacttattttgggattattttttctatttcatgtaaaaaatgacattggtattttgataagaattccactgaatctgtagattgcttcgggcagtatggccattttaataatattaattcttctgatacatgagcaggggatgtctttttatttgtttatgtcctctacaatttctttcattcacgttttgttatttttcatgtagagatgttttacacccttggttaaatttattcctaggcattttattttatttttgtagctattggaaatgcaattgccctcggcattcctttctcagttcagtatgaatgtacagaaatgctactaatttttgtatgttgatttgtatcctgcaagtttactgaatttatttatcagacctaagagttgtttggtggagtctttagtttttttctagctataggatcatatcgtcaacaaagaggtacaatttgattgcttttccagtttggatgccttgccttttatttctttctcttgcctgattgctctggctaggacttccagtactatgttgactaggagtcacaaaagtgggccatacagtatgatgttttgttagctttggatttgccatatatggcctttttgttttgaggtatttaccttctatgccccatttgtttacggtttttatcacaaagcgatgttgaattttatcaaatactttttctacatcttttgagagggtcatatggtttttgtccttcattctgttgatgtgatgtatcacatttatttccctatgttgaaccatccttgcaaccctggagaaaattccacttgatcatggcatatatatgtatatatatatatatattttttgatgtgctgttggattcagtgtgctcaattcttgagaattgttgcatctatgttcattagggataatggcctgcagtttttttcttgtcattgcattcctgtctggtttgggtgttagggcaatggtggtcttatagaatgagtaaaagggagaattacgtcctctttcattttttagaatagtttgaggacaattcgtattatttcttctttgaaagtttggtaggatttagcagctaagtcatctggtcctgcattttacttttgggggagactttttattacagattcaatctcattatttgttattggtctgttcagatttcctatttcttcccaattcaatcttggtagattgtatgtgtccaggactttatctatttcctttaggttttctaggttgtgcacatgcatttgtttgtgacagtctctgatcatcatttgtatttctgtggtatcattgcaatgtctccatttttatttctgattttgtttacttgggtcttttctctctttggttagtctaccaagtggtttatcagctttgtttatatttttaagaaggcagcttttcgttttgttgatggtttcgtttagattgttttatagtctctatttcttcaagttctgctctgatctttttgttgttgttgttccttctattaattttgggtttggtatcttcttgctttgctaggcccttcggtgcattgttgacggtttatttacttgaaatatttccactttttttatgttgccatttattgctataaaattctctcttgggattatttttgctatatcccatacattttgatatgctatgttgtggttttcatttgtttcaaaaaaggttttcaacattggtgcaaaagtaattgcagtttcgaactgtgaattttaaatcattataactaggctcaaacacatctttattaaagaaaataggaaccattacaatcaacacgtttttgcaaacaataaataagtttgttccttcctgtagcataaaaatgcatgcttcaggattcgatgaactcttgggaagcattttctgcattctgctggttgtggaagcattttatttgcaaaaagtcattaggatgcttgaagaaggggttgttgattggtgagaggtcaggggaatatggcagatgaggcaaaactttgtagcctaatttgttcaacttttgaagcattggttgtgcaacgtgctgtcaagtgttgttgtggagagttgggccatttctgttaaccaatgcaggctgcaggcattgcaattttcagtgcatctcattgatttgctgagcatacttctcagatgtaattgtttcactgggattcagaaagctgtagtggatcagactggcagcagaccaccaaacagggaccattactttttctggtgcaaatttggctttgggaagtgttttggagcttcttctcagtctaaccactgagttggtcatagccagttaccgtataaaagccacttttcatcgcacatcacaatccgatcaagaaatggttcattgttgttgtacggaacaagagaagacagcacttcaaaataaagatttttaaaatcttcagtcagttcatgaggcaaccatttatggagctttctcacctttcaaatttgcttcaaatgccaaatgaccatagaatggttgatgttgagttctttggcaacttctcgtgtagttgtaagatgattatcttctacgattgctctcaattggtcattgtcaacttccagtgtctgccgctgtgcttttcatcttcaagtctctcatctcctttgaaaaacgtcttgaaccattactgcactgtatttcattagcagatagtgggcaaaatgtgttgttaatgttgtgagttgtcgccactgctttacaacccattttgaactgaataaaaaaatcattcaaatttactttttgcctaacattatttccagggtttaaaataaacataaaataaacagcaagtaataagtcactagcaaaaaaacataaagcaagaagtacccattaaaatgatgtataatacaaccaaatttatttaagaatgtattccaatatcaaatagcaaattccaacaatgcaaaaattgcaattacttttgcactcacctaatatatcctccttagtttacttcgtaacccaatggtcattcaaaagcatgttgtttaatttctatgtatttgtactttttctaaagttccttttgtattgattttcagttttattccattgtagtctcagaagatacttggtatgactttgagtttttaaaattttgttaagacttgctttgtattctaacatacggtctattctggagaatgttttgtgtgttgatgagaatatgtattctgtagccattgaatgaaatgttatgtaaatgtcttttagatccatttggtctaacgtgcagtttaaatctgaagtttgttgaatttttgtctagatgatctgcctaatactgaaagtgggatggtaaagtcctcaactattattgcattagagtctatctctctctttggatctaataatatttgtttcacatatctcagcactctgatgttgggtgcatctatgtttagaactgttatatcctcttgctgaattcatccttttatcattatataatgaccttctttatctctttttactgctttttgacttaaagtctgttttatctgataaaaatatagttactcctactcacttttagtctccatttgaatggaatatcattatctatcccttaactttcaatacatatgtgtctttacaggtgagatgagtttcttgtagataacatatagttgggtcatgttttttaatccatttaatcagtctatatcttttaagtgcaaagtttaatcagtttacattcatggttattgctgatatgtgagggcttatttctgtcattttattaagtaatttctggttattttgtatatcttttgttcctctctctttctctcatattgtttatcattgtggtttggtagtgttctgtagtggtaatattttagttttttctcttacttgtttatgagcttgttgtgccagtggtttttatattttcatgtcttcatgatggtagttattgttctttcacttccaagtgtagcactcaattaagtatttctggtaaggtcagtctagtggtaatgattttcctcagcttttgcttagagaataaaaaaattatttatcattcccttataaaagataactttgctgagtatagtatcctgggttgccagggtttttttctttttttcagcacttttaatatatcatcccatcctctgctgcctgtgttttctgctgagatatctgctgttagtctcatgggggttcctttataagttgctaggggcttttcttttgctgtttgtaaaaatttactttgtcttcgacttgacagtttgaccataatgtgccatggaggagatttttttgaattgtatttatttgagaatctttgtgcctcctgtatccagatgtctaatttttaaataaacttgggaagttttcatgtattgtttcattaaatatgttttcttaccctttcattttctttttgtcttctgggccaaaaattcaaatatgtggtcattttacagtgtcccatatataaatttaagctttgctcattcttatgtactcatttttatctgactggattttgcaaaaaacctatcttctagttctaagattctttcttctgcttgatctagtctattgttgcagctcttgaatgtattttgtatttaaattaattaattttttatgtacagaatttctatttggttattttttataatatctatctctttggtaaatttctcattcatatcatgaattgcttttctgacttttttgtattgcttttcagatttcataaatttctttttgattgttatctgttgctagagaattcttgtgttcctttggaggtgtcatagttccttgtttttttatgtttcctgtgtccttatgttgatatctgcacatctagcataacagtctcttcttccaattttttaatttgattttttggggaaggacattttcctgaagatgtatctgtggagttggttgagtatggtactttggctttgattctgggattgtgcagtagtgtagtctctgtatgatttctttggctaaaaacagcatcagtggtatctgtgatttcctcagtggcttagggtgcagttgttagtggaggcagtggtgaagttctgctggggactgagacaccatgtgggccagtcttcagggcccattgatggcagcagcaggctgagcatgcctatccttgggcaccagggttgtatatgctggcatgtgttagccagtccaggaagtctgattattggccttcaaggtggcttgctcaggtgccaggaatgacagtggtgggctgggcaggtggattattgagcccctgggcagcaggtgtggcatgggcaatcacagtagcagtggtgggacaatctttgggacccaagagatccctgctgtttttgatgatggctacaatgggctggatgggccagtccccaggtctgcaggtggcacatgcagatgagtggcagctgtggtggtagtaacaggttcagggggttcaacctcaaataccagaaggactgctcaggtgtcaacagtggtaggctagattgggtgatacccacccccctggatggtgtgctcaggtactcaagtttcagtctttgaggatgaacctcctacagtcatgtgttgcttaacaacaggaatatggtctgataaatgcatcgttagatgatttcattgttgtgcaaacatcacacttacacaaacctaggatggtgtagcctactatgaacctaggctatgtggtatagcctattgctcctaggctacaagcctggacagcatgttactgtactgagtacggtaggcaattataacattatggtaattatttgtgtacctaaacatatctgaacatgggaaaggtacagtaaaatatagtacaaaagatttttttttaatggtacatttatatagggcgcttaccacgaatagagtttgcaggactgaaagttggtctgggtgagtcaatgagtgaggggtgagtgaatgtgaaggcctaagatattactgtatagactttataaacacagtacacttaggctacactaaatttatgagaaaaataaagtaattgcacaatgacgtggtgggaacagggaataagaatttttcagctctattataatcttatgggaccaccattatataagtggtccatcgttgatggaaatatcctcatgtggggcatgactatgatttgtaaagcaactgataactgttggaagatagcgagtggagagaaccgttttccaaactgccccttacccatcgcagtcagcccctaacacaggcccccactaattcttttgagcctgttgacagccgactccttaatgcttgtgtctatctctgacatccattgtgcgctccccgctaacatacttacagctccatggcaaggtgagatcagagctgtccagaggagattagtaaagcagacaggaggacaggttaagctgcccctgacctcttatcccactcccggcacccagaccccaccccgtagtttgctcttgggtgtgcagaggtgctctctcctcttcccttctgttgtgctttccccaaatgaccaagcagacctattttatcaatattgaaaatcaagcaagttgcactctacagatgccctctctggctggggatctttctctgatgaagtttggtgtggctgccaagtatggagagtgcagaagaggccacagatactgcttcatgagctcaacaagacctaagcttttgaacagtgctttgcagcaccagagaagctttaggtacataatgagattctctctgcctggcttcttgaaaatcccaagcataagtattgcaagtcagcgtggttctgcaggaagagtatgggttagaaggtaggaagcctgggccctgcatggcaccagggatgacaagtcccattccctttagattttagtttcctcatctatggcatcccatgcctagatgcatctttaaggctccactccttttagcatcctgtgtttctaagaagagtctttgagaaaactgagatgtacactgggaatggccaccaggaaggcaggccagaaggtgtttgcctgatgaccctttggtaattggcaacaatgtatttctccttttatactttccaagaattctaatggaccatcaagtatcaaatcaggaccattggaacgtctctaaatgagttatctttaatcttcctccattcttaagtcttgctcgtttaagttcagctgaaattgcatcctactctgtggtttgtagaaaaagtccacagtggtttttgtctcctggtttcaatttagggtccactctcctctaatcactggatgccagtgtgttttctaataattcctgttttgccagtttctgagttaacagacttcctctgccgctgggtctgaagctctgtcctgccagtggcagctgagacacttcagccttaattatgagatatctttctaagtcctggatgaagccaaaataacaattagcttcatataaatattgagccaggacatttccttctcgtgttctggagaaggtatgagcttgtcctggtaaaatgcctgggcatatacaaaatttcatttcctgcagatggttgaatcctgaatcctaaccagagttcctcaaagagcattccctgagagtcttgtggaggtgtgcagggtcactttgggggctgctccccccatgccacatgtgttgggcattttgtggtggtggtagttctctgggtcagcaccacccctgctgcccatatgcctagtgatactttgcaatactggctgccctacagtctgtggttatgtctattgggacagtttgctgtgggatcctcaggctcagtttcatcttggggatctgctgccctccaagcgaatcacactgtttgtttattttgtttgtctgtttgtttgttttggtaatgcaaatacccaggccatttcctgaattggtctttgagcttaattcaatacactcagaagcaattgcctgggctatctagattaatctgattgtgtccccagagccttctactcaaaacaatctgcttaatgtctgagttttaagagttaactcctaacactgctgacagcctggctctctgctatatcagtgtgctctgcacagagatgcagccacacaaagccacactgcttattgctgagaaaatcctaagtcattcagtaccagggttcctagcccaaatctccaagactacaggggccaaatcaggaaaaaatattctcaactctgggtaatatccctgaaagccagtataagcattcctttattttataggatcttatccctacagaaaacaggggggaaaaaagcaagaaatacagtgccccaggctggatcctctggaagcagatactgagagggagtttggagagcaagacgtttattagggatcaatgcctgtgaaggaggaggactgggcagagggagaagtttaactgtaatgcaggcccagcaaagcctccactatccaatagacgctctctggagagtgtattatccctcacagcttcccatgttggagagaaatggctgggcttttgtgcccctcttgccttgcacaggcacctgatacaggctgcccccaaatcaggcacctgtactgacaccttacatgaagtatcattctctgcagctgcaggagacttaaaaatagctgaaggttgtccgttgaccttggtccttatgactggcaatgagtcttttcttgaaggatctgggtggcacatctgtacgtctatctctgggagggttatgaaaaaagtttatagcactgatagtcactgctcctgatctgtaactcgtggttccactaaagcctctgttggatgtccaaggatgggttgcagcaaatcttccctctccctcagaaaaagcattcaagactgatgtaggaggtggaccagataatgctgccaccccagactgtgtctctggtaggcatctgacatctgcaagcatggaaacctggagtgctgttcagtcccctgggcctctggccagttcagaacaaggaacttggagcatttcctcccagcactaggctggatgcatctcttagttcagctcaagtctctttgcacctgacagccaatactgcagtgatggaataaggaggtgaacttctctgctttcattagatgtgactcttactgtaaaatgtggttagaaatgagcacatgggccgggcgcggtggctcacgcctgtaatcccagcactttgggaggccgaggcgggcggatcacgaggtcaggagatcgagaccatcctggttaacacggtgaaaccccatctctactaaaaatacaaaaaattagccgggcgtctgtagtcccagctgctagggagactgaggcaggagaatggcgtgaacccgggagacggagcttgcagtgagcggagatcgcaccactgcactccagcctgggcgacagagcaagactccgtcgaacaaaaaaaaaaaaaaaaaaaaaaagaaatgagcactcagcacatgttcaatatctatgagtaggcattgtatggtatgaaatggatgacatttgctttccttagacttctgcaaaagtgtttatttttacaaaaggagtttgtcaaactgcaaattagcatgcacatatcccttcctcttctctgctcccatctggcttatgcacagaaattacacttcttctcagtttgcccaaactgttagcacacaattcagctcccatttgcttggtgtcaatttaatattgcattaattagacaattagggaggggccaaaaaagattctcagctgaagtactctaagtgggagtcaggttcattagaaattgtttttttaaaaatttttaaatagtttggttttgacttagcacagaaatgttagttgattaaagtcttagaagctgctaatgaattgactcaatgagattaaggtatttccttggaatcagtactccaagaaaagcatctgaccctccccacagttactgtgtgccaccttggaaaaaaagagtaactcgtagctttgtttataacatgcaaacagccagaagaaaagtaaaagattcagtctgatggatgaggctacagctctccttagttccagcacgattgctttggattgtagtcaagatccggagaaatctgtaagtgcagtagaggggtcaggacgctaggctccagctccagcattctgtagctgtaaaatcgggggctgattgtttttctctcagtctcaatttcggcacctgggaaggtggtggtaattatgtcaactgtgcaggatcatcaccaggatctaaaacagaggttaggttacactgacatggaatattcagacaaaattgcacaatctgaaaatggcatggaactttataaacctaggcaacacggccttgtccttctgtttttattcaaatttggcaaactaggcactattctatttagtaatgattatgaaactatcccttgtgttctggtactctcatagtatcatgaaatgttccccctggaacaagacttaaagccagtctactctaatagcttcatttgtgaaatgctgaaagaattgaaggggcttagaaatacacatgtggtgtgttgagacactaccccaggcctgtggctcacccacagggctccagacactatgctggacctttcccaaacctgatcatgctcaggcaaacctcgctaaaaggagctttgctctggaaatgttttcatggagatgtcatgagactacctaaagtgaaaatatatacatatatgtgtgtgtgtgtgtgtgtgtatatatatctgtgtgtgtacttttgtgtatgtatatctctctctgtcattgtgtgtatatctctgtgtgtgtatgtgtgcatacgtgtctctctctctgtgtctgtgtgtgtatatctgtgtgtgtgtatatgtgtgcatatgtctccctctccatgtgtatctctgtgtctctgtgtgtgtatgtgtgtgtatatatatctctgtgtctctgtatgtctaggtgtatatatatataaaatgtttctctgtgtgtttgtgtatatatatatttctgtgtgtatatctctctctctgtgtgtgagtgtatgtgtgtatctctgtgtgtgtgtatgtgtctatctctatctctgtgtatgtgtatatatatctctatctctgtgtgtgttgtatatatatctctatctctgtgtgtgttttatatatatctctatctctgtgtgtttgtatgtgtgtgtgtgtgtatatatatatatatatatctctatctctgtgtctgcatgtgtctatcaaactgaagaaccttctggactggatttgggtcagggctccctgcctgagtctgtctaccagtggatatttggccttctctggcttaccctcaaactaaggtctgtcgagatttcaaagacaaacttaacgaagttcaagtctgctctccagccctgggttttctgacagagctgagttgagggcttttctagtgagagctgacctcagtcttctatcttaacatcagttcattaccctgattgagcctggaatgtgggcaggtgcatggcttgctgcatgtgcttatggccagggagcagcccaccctggggtagcagagtggaaatggggtctgaaacagaaaccacattcattcagtcaggtggaagcaggcaggcatggccagcatctatcagagggtccctggtaggaatagcaaacttgcttttccacttcaaattctcacacttaaaactgagaacatcagttcttccctttcgctgttatagagacactaatgatatgaaaacacactggagagaaaatggtacctgagatacgccattctagcctgtaacaggagcatgcagagtatgttttgaataaatgaataagtaaatgaattccctaaatgcctaataatcaagccatgattacatttataaattgaaaagggaaacttaggaccaagaatgaattgaatcaagttatattgtttcaaattttaatgttttaacttaaatgtctgaagggggcttaccagagctcagcattgactgtgtaactgaagaaagtcaaaaactgatttagaaattacatgtgttttgcatttattacgtatttgatactttctactaactcacaatggtccctttaggaaccctcaagagtcccgtggagtaggaattttgctgccttcttcatcaaccacaagagatcagttagaaactttgtgtatctgtaaaaccaatgcgcaggagcacccccattcagtccacacatggcctggagtttcctgcatttgcatctgcatcctgtggcaggtctgggtgcatgggatttgctctgagagtcctgccaagccctggcaggtggtcaagccctcgtggatgctggaatctctttgctaagtggcccgcactcctctcccactgcccccaccgtatgcatcctagagacacagaatcactttccctttccagacccaagcatcatcaagcctgttgcccatgaatctgggcaaatgtaatcccattctatataaatgtagataagtaaagtcccagccttcttttcccaaagacagacattgacgtatatgcagaataccaccatcccaggggtcagaagtcctggctggtggacccagcgctgccactagctcccagaaggacattgggcaagtcactttccctttctgggcttgatggcccaggctgtaaaaaagagaggtgctctgaaagggttacactctgggatgcagagatgggggtgggggagcacattcctggggagtgacacaattccaaacacggagatcaaaggagccccacggagggaggccccaaccaggagcttgcaggcctgcgtctgggggtcggtaattagctcctgcagccaccttcctctcccgtgggctcagggtgggcgggtgggcgagcactgtgggccctgagacgggtccttcctaaagcagaaggaggtgggtgggggccagggggagggaagagagagcccaccaggaactgtgacatctgtaatgaactttctgttagacagatgcaaagtttaaacattttaacaaaaagcagtccactccgggctttctcggccccagtgtgagaactgcactgtgcggatacctcttaaagtatttgatgagagactaaaaggctgacaggctaacacttcacttccttccaattaggggcctttaacatcaaaggcccaggccccactcagccgggcttacttgaatgaattagggaagagaatgagtccaggagttgcttcgttctctccctcgcagagacgtggggctctaggggctttaataagatgtttgaggtcaaaagggtcaggtctctgactgggagcaccgggaaactgccagagtgtttcaatatgtgtggtgtttgtcatgcaatcaggctctccaaagcctccccttgtggggccctgtctttcggggacccttccggagatggagcactcaggcaggcaggcaggaggggcccccaggtcccactctggtgggtgttcgaggcctgggtgcaggaggaggtatggctgtgggtctagctaggtctagctttttcccgaaagccgcagcctaagatctgggaggtgaggtgccgagaagcagccatattagatgggcttgcattagctttggaggtttattgtggagacacaggcttcaagaaggcgagagggattcttagccattgagctggccctcagcatcagtcagagagagaatgcaattccatgggccatcagggccaggagagaacaagagcatttcttttgatttcacttaactttattattgcaagaggcccgaatctcctccacagcagcccctgccaatggttttcacctcttgcctgcacatttcagcatccgacagctcactgtcctcaaagattctacaccttctgtagcgagcagctctccgtgtcaggaggagtcagaagatgccttcctgcaacgcccatcgatcacactttgtcttgctttatgtagctgtctctggacctagatagacatggattcaaaacctggatccactgaagcgtttgcttccctggcctaaaaacttaggcacatgacttcatctttacacttctgcttcctccttggcaaaatatgactttagcattgtcttttgagagtgagaaaacagtgaaaacagtaaagtacccatcagagaatcttgtacatagtagggacttaaagaaaggcatgtatttatgtcctgttcacggctcatgaggcttcccttttcccagcttaacgtccctcactcctgacccctacttcactgcagagtgaggaaggcctggtgcaggacacaaagagagtagcctctggcctcaggcagcagagtgacaacagagaccttccacagtgagggcaggtgagctggttccaagatgttcaaatgaagttgagtaaaatggggaagcacttagtaaggagggaacaacagcaacacagaggaagagcctgaaatgcacaaaagttgtgcagaggacagcggggggcggggcttgcccaaccctccaacccacagcccgaggggcctaggacggctttaaatgcggcccagtacaaatctaaactttcttaaaacattatgagatgtttttgcaattttttttttttagatcatcagctatcattagtgttagtgtattttttgcgtggcccaggacaattcttcttccaatgtggcccagggaagccaaaaactggacacctctggtctagatcactggagaaaggaaggagagaaggccctcagctaggccaggactcctgaggaaagagctctgtgtgccatgctttggcacttcaggagtatccactgtaccccagaactgggcttttgccaccaacatgagaacacttttgatcctcaaaacaaagccaaaaagtatggttatccccatagtttagatgtggatactgaggctaagagtgtttcagtgacttgtcccagtcacagtaaatagtgcaattctctagaacctaagtttcctaacgtcaaatccagattcatgaaatgattcatgaccttgctgaaaatacaaaagcaatataaacagacaataaaaaatggagatgggagagctcagggtgggctgggctacgaaggaaaagcttcctggaaaggtgggccatgcatgcagtcttctgcacacggggctttcctggctctttaaaatcatccacctaccatccaggtctaaggagaaacagctagttatgggacacaagttcagattttgcctcagaaatatgcaaggggtcaggcaaatcatgaaaattattattgtgtgagtgtccaaaaacagaggtggctatgccgtatggactaacattaattaggcaccgacagtttgctaggagttttttaaaaagctctgtgggccgggtgcggtggctcatgcctgtaaccccagcactttgggaggctgaggcaggtggatcacttgaagtcaggagttcgagaccagcctggccaacatggtgaaatcctatttctattaaaaatataaaaatctgccaggcgtggtggcaggcgcctgtaatcccagctactcgggaggctgaggcaggagatttgcttgaaccccggaaacagaggttgcagtgagctgagatcactccactgcactccagcctgggcaacagagagagactccatctcaaaaactaataataataaataaaataaaataaaataaaaagttctctgtgttcgttttgattcaaccatggatggttgacatctttgtctccaatgaggaaactgaacggacaaaaggttaagtcccctgtccaaagtcaaagctttggtctaaaacatgcgtctctttggtcccaatggaggactctttccacccacttatttcactcctgaactaagaaactgtgctttgtctgggatcacatcacatggaccttgtgcccagtgacctcacagctccaaagtcacagacaggaaacaaagcgatatcacctgtgcttccacttccctgcgcagaagccaagtgccaggcaccagctcacttggccactctgatttcctatttatgctctgaatgaaaagatcctgaggacatctccaggaaccctattctatttcaccattaattagctgggtcattatttttaaagccctgtcaatattcccctgtggcgaagtcagctttaacccacgacatttacatacaaattgtaaggcatctctacaccttagtcacttccactaggaagagctactgtgatcattttgctccttcctctttgcagcagcaacaaaagagaactccaaccagaatgcatggagcatgtactatttccaggactcctggggccatggggagccagggtctgggacccccaaagagctgtatgtttaattgaggtgacaatgatcagaacaaaagcagaaaacagaagagtaaatgtagtgagtgcttttctatgttagatatacacacactagcactttctcagtattgcatgaaaccacgactgttgcagtaagctagagctttcctctcaggggactcattacattggaacaatcagacaccaacatgagagctggtttccttattttctgcagtaagcataaagcactgcaatgatattatcacatcaccaagcatcaagatgtggtcagctcttccttttctttttcttggcctttatagcagcatccactgagctagacccagtatctacgcaacatgaatagagcaaagattacaaattcagtagataaggacatcataaagtcagaagagaaaaaaagcggtttatgtataaattatacatgttatatgtaagttgtcatttatgtttattatgaggctcagttcctaatggggaaaaaaaaaagagaagctgtttttatttggtaagtcactgtgtggagggactcagagagttagcaatccagatgggcttcctggaggcattggggtttgggccttgaaggtgaggcaggattctctaggacaggagcagtgggaagggcgaaggaagagggggtcacaccctggacagaatgaggtgacatgtggggcagtgagacctggccgaagttctcagcaaggggagtgtctggagagagaagcggtgatcagatggtggcctgtcctgagtgtcaggctgcagacgagccatctggcttctaagggtgtatctaggagcacccccaaaggtgattttatgagaatctgaaatcttgtgtgtagtaccaaagccagagagccttgctccctgagagagaacactggatacacttccctccagccaaagcactgtttctgctggagcccagtacacctcgggtgccggtcactcgaggctgtgtgcactgctttcaccacctgggatgccccctgtgcctttcagcttaccccaaacccaatcatcttgtaaaatttggttcaattcgtcgtctctccactctccaagcctccacttttcatctgtaaaatgagaggaatgacctccctgttctctgtgggaaaggactgttccccacaggagggaaaatggcctgtgcactggaaagcactatcttcagggaggagcagcactgaggaaagagccagaaaggcccagacagtccccttttcagagcagcctgggagagtggaatgagccctcggagctgcactgtcatcatctggcacagggggcactgaggcctatgcccaagagccgtcgggaagtcgagtgcagcacaatggacggacggactcagcttccttccatgccagaggcagcagcctctctgttgctatcattatcttttttctcttcccttcctttactttgagaacagagccgagccctgtctccatttcccctagcccagatggtgatctcattgttttatagattacagagctggtccttggagagcaacagctcccaatttttccccaactgtgggtgctgacacatgattcactaggatgttgggtaattacaacatgttactgagtctctgtcttctccccaccccccatcccaggtggatgtgctggcctctatggcaaccatcaaacagcaagctcataaagccggcccatcttccagggagcagggcagctccaggggccatattgcaaatgtttgaccccaggtacctccaggtcacggggatttattagttggaatctgcagttcagcagatgacattttaaaaggcgttttattgctcgtgacctgtgtgcattgcagggtaattctgaggctttgtgtctgcagcaactgtccaacctgaaacgcccccaccgtgttgcaggcctgcttgatctgcacaggaaatccaggtgaggccaccctcccccagtcctcagtgccagtgtccaaaatgtcagactcccctccaccccaagctgggtctttatgcccagcccagggacagggctttcttgcagaaaacgtggccagaaggagattctcatcaaatcttcccaaaggccagatgtgaggggacttaaccaaagtcaggcagctcatatatgataaaactcacaggggaacccagggatggccttatcatcatttctcttctccagctacagctgcaaaatctttccattttcctctttgctttaaaagcaatgatctagagggcatggcttgaagggtaagtcctggcttagcattagcagtgaccctagtgcagaaagtggcctggaggccaggctattagggaagatgcagagggaacctgtctctgtatgggggacagactgactgggtgatctgtggcctctcaaagcagcagggcacattgtacacagcagcacagcctgtctgctggctaagcagcagctccctctgcccattcccctggttaatttctggcagtccttggaaaatgagcatgggagcctcttcctctcaaccacacagtcagactcagaggctatccttcaggcccttgagtttccctggatcatggcatcatcccctgttattacaattatctacaccatcttctgatcctgcccctgactatgatcatctgcaggcagagttcgggaatgattcactctttgctacccaagacctcctctatgtgtggctcattccctggtgggacttatagcaaatgttcattctatggtggttgtattgagttgagctccaaatacgccaccctcaggggacgatgtctcttccctggtgtattcctctagcaagtaatagaagtgttgaagaagatgcttccaacccaaagacatgcactaaggcatgtgatccgaatcctacaaggcttggcccattcttgttttcagattaagatgataaaaatcacacacacagacacacacacatatacacacacacactgctgttttgtcaagcagcctccttgggagcagacatgtgaactccttcattggcttctcattcaagatcaatgaaacacacagtttagcccaaagaggtaaagatcttctctcaaggctgccagccgttcctttttccctgagccaactcaatcttggctcagttcaacagactcttattgagtgtctactctgagccagcaactgattgagacacccagatgacaaaataaagaaggtaaaatgcctactttcagaagtccgtctgtctaccagaaccaaagaataagaaatcagatcattagggtgtaaaagaatgtttgcttatggaaaggggcccaccagtatacaaaagcaccgaggtggggctgtgagcttgggtgatcgtggagtcatcttccactggaggtgatgcctggactgtatatcggaataaatagaagtggttttgtgaaggagagctcagaagggcatcaataggcagtgtggtggtatgcaggtgtgtacagggaacttcttactgttccatgttgctggagtaaagagtttaaattagggagaggaagatttagaaaaacaggcaaaaactgcatcacagagtcttgtatgccaacctaagaagattcacctctgtgctataggcaatagggagtcattacaggacttcgaatatggcagcgaagacttaagtgccacctgtaatcccagcactttgggaggccgaggtgggcagattacatgagcccaggagtttgacatcagcctggacatcacagtgaaacttcatttctacaaaaaatacaaaaagtaggcaggcatagtggtgcacctgtagtcctagctactaggaaggctgaggtggaaggataacctgagactgcagtgagtcgtgattgcaccactgcacttcagcttaggtcacagagtaagaccctgtctcaaaaataaataaataaataaataaaaaataaaaaacttaccttctctgaaagatccctttggtggtcatggaaagggtagattgcagtcagagttggtggaggaaggggcatcatttatgggacagttgtaacataccagagggaagatagtgaggtctgaattgagcaatggagatggagtggagagaaacagaaggctcttgggctatccaggggatttaggacaatcaggcttaggcatgcagttaagcgtgcagaacctggtcttcctccccaataaagcttcctccctgataaagctccctgataaaggacaggctcctggactgtggagcattcaaggcctgtaggtgggcacacatgatttgcacaagccagttggaaatatgccaggtggagccctgtcccttggactgactgggcagaactcagggcatcaagaatgaagggaaagcagccaacatcttgggagaagaactgcaggatcataaagaccacatgtgctggcctgtcagttactgactctgtaactctccggctctctaaaggggcactgtggttatgggcacggcagggttcatttaattggtagcctttgaaatgtttttgctccccaatcttcataaaaaggaaatgagggctgtggtgtgtggacgaggtgttgagctgctctggctacaaggaaagagatcaggcctttgataagccggggaaataatcagtagcacatgtccccgacacactgcctgattcacacaggaccccaggaatgctaagggaagtggtgaggagaggcgagggatggaagacgttgtcatggggaagacctaagcgagggatggctaactggatggtttgccagtttcagtgatgatcccaaagcctggttcaaggcaatgagataggagagcatttgcccttgaaattgggatgaggccaacatataggtcctgcccttactactggccagctttggggcactgaaagacccggtcttttctcctggcctgttcactcatctgcttagatggggatcctcatgcctacttcacaggctttcaatgacaatccagtgaggggcagcagaggatagtggttaggaagcataagcccagggcaaggcggtcagactgcctcagctcaaatcccagttccatcacttacaggtggtgttaccttggacaagtcaccttacctgcctaaatctctgtctatccttccaaaaactggggctacaatagtgctcatatcataggctgaatcttaagattaaagtagacaccacatgtgtatggtcgtacctacacagtgctccctcacggggagcatgcttgtgaaatgaaagggctgagcactggatccaaacagggaggaggcctattgtgccctgggcctggacagaacaggaggacaggagtttacctccaattcagtatcaaatatattctaggcataatccatttttgtcatcatttaactccagctccaacactgttatattcattttacaaacaagactagaggcatgaagaaattaagtgacttgcccagggtcacagtcacaaggatttgaactcagagcccatgctcttgcccatcaggtggcatgcttcatcatggcatcgtgtgggctgctggctcctgtattggggagctgacactgaattgtccttccattggcctggcatttactgggaggcggtggtatgcccagcatgtgccagggacttcacatatcttgttgcatcttcatagccacgtgagctgactacggttgtccccatcgtacagaccaggtaagaggtctgtgaggcagctcccagctgcctcgggacagcagtttggacctgagcctgtccagccttccttcctcacccccgccatgttcctgccactgcaacagagtgcagcggaaggatgacagccacgagcaggcttgcttgcattttccctcaaggtccttccacaaatcttttcttttctgtacaaagcagatattgtcattcctgttatacgcgaagaaactgagaatgaagtgtatgaagccacttcccaaggtcccaaagcaagcctgcagcacctttctgaacatgcggggagtagcatttaacccacagcttgtccctaaacggaaggcattttttgtgtcccatcccagacaaccagctctcgttgaggatttgggaaggtgcctcaagaggggcaggccacgcgcccctggccactaggagctgcacgcgcagcccatacctatgggctggcagcattggatgcagctttaattagatcaccatggtaacgagctagggagaacaatagacagttgtgtacttgcgagaatcctcagcctcagacaaggccctgctaaactgtaattacgctggagtggaagcggatcttcatttctgggagagaaataaactgccatcctggtcttcttgtcttcccatgttattccaacatcagggtacaggattccaagtgtgtttattttgtcttattttattaattaattaattaatttatttatttattgagacagagtttcactcttgttgcccaggctggagtgcaatggtgctatctcagctcactgcagcctccacctccgggttcaatcgattctcctgcctcagcctcccaagtagctgggattacaggcgcaccaccatgcccggcaaatttttttttttttttgatatttttagtagagacagggtttcaccatgttggccaggctggtcttgaactcctgatctcaagtgatccacccgcctcagcctcccaaattcctgggattacaggcatgagccaccgtgcccgtccccaagttggtttattgtttgaatttatattttagaagtggtcaagccccatataaagatgattatcttttcatcctgggttctgagtggtgtattcccagaggggagatgaggacaaggtaaagaaggccataataatcacacaggtagcatttattgagtattagatgtaccaggtgttccctacgacttcccctactgtcactataagcgtctgtggcgggtgtcctgagccccactttacaaggcaggaagtcggctgtcatgccttgtgccctcaacactgaggagccgcgaaggtttgaccccatggcccaaaggcattggcctgagctcacatcgctgttcagggacaaaaggagatgaaccagttcagctgcacttctgagacatcggggttcttagtcctccttttgatgacatgtgagggatgccctttaatccagttagttttgctagtctgataagatgcagttcaccctggccatcggagtcagcgagacccataaataacagaaagatcatttaaaaataaattactgactgaaagcagggaaaatgcatccatggattgttgctctccaggcctgccataaatctgttgtctttttggctcagcagtggccagggtcacagaccataaagggcttccacagaaaaatgtgaaaaatcctagcaagatgggacacgctggagacataggaaaggcatctggttttctgccttggcctgggttggaggatggagcccgtgggctgggccggcagcacagggtgggcacgcatgcgagagccagctgtggccctgccctcagggattccaggggcgccctgtaaagaccccagtccctgtaacatgttctggtgcctgacccactttttcagaaaggaatggcatttccagtctcactgcagcatgaagctaacatttccctttggaaattggacacagtgaccccaattcgtgtgactgagagtgagtctgattttacattttatttttccagagaactccgttgtttccgaagagaggggagatggaaagaggtgtcagagggcactggtcaggggcgaggagcgctggaaggtggggatggcagaaggcaaacatggggcgctcctaaaggcagccctggctgtgatgtgagagagtagggtggcgtggtggcctcggggagcctttgcacaggtaacgaagtgggtgtcaatgcctgttgcctcattgggttgtgtcaatgatcaagtgaaatggtgcctccagcctgctgctcagaaaggccaccatgagtggattacctctgtacctgtgcttggagcagctccatgggcatgtcaccctgcctccagatggtgtcagggtcccctccccttcctcacaaactttaacagccagcaggaacactttaagaatgcatgactcactgggaaggtccagaatcgcaagccattggcaatttgagctgcaagtgcctttccagattgttagatgagtggcttaaaactctgtggctgttacctcacagagaatgtgctgaaagtcaagaacccttttccctgagggaaaaaggcatctgtggacataggtccaaccatttgtgtacaatctcagagtctctcccaccccttgacccccatccatagacccccctcagaggacttagactccagctgaaaaatccttgccctggcccagcctcctccttttatagctggttaaacagaaagaggaagtgactgcctccaggtcagagagccagggagccccatgctgctccggccccattcctccctatctcttcctgcacaaactgctacaaccacttccagttccacttggcctcgctgcaatgtgttctctacacagcaggtaaagttgccctttacaaatacaaatcacaccctgcacctctcccattcaaaatccactactcttgagattagatccaatgttttctgtgacccacaggcaagggaactgcatgacacaccttcagagaggtcattcgtgccatggcaccaccctaggaaagacagggcaccccacatacaaccatggctaggccctgcctatgaggctcccctcagcacaccccttcagcctcatcaggtgccacactgcccccactccagctgcagaggccttttcacggctcctgtaatggcagaagtgtgttcacaccgcagagcctttgcacacccttttccttcttcctgccgcactctcccttctctctttgcctggctgtgtcctgttcactctccacttctcagctttgtcactttcccaagaaggtcttccccaggttgagctgacctgaatcattcggggtccagagaggacccaggagccgtgagaggttattccaaccagaggggatttaatacaggagatgtgtgctacaggtgtgggaagactgaaaaggttttttaaaattagcactgcatttactcagagatctgtgacttgagagagccattactagctctagggttgagggaacaaaagggaagaggtggggttaccaggacctagaagttcagagaaggggagtgtggggggcaggtgctctgactgccaagcagctgccacgtgtctgtggccagggcctcctcgagggtcctgcacagttggtgcttgaatctctgagtggacaggggacactttcataggcagcactggctcctcagagggcctcctcacacctggacggctgctgctcagagtgcactgtagggcacagctgtgtctaggttgccacaaaccctgagtggctggagctctgtactgctcctttgagaggtggaagaatgggaagggcgtccccttgatcccacctgggagtctaacctgctagcaaaggattctggggaatgtggttctcagactcccagccccatcatctcagaatatggaatgggcttggctgagagacacaagtcaatgactggcacagcccacaccgcatggtatttatctattgacctttgtatctgactatggactctatgaaggttgtccaaaactgtagcatatctccattcttggctcaaagcctcgactgtcagcactcaatcaatgtagactgcacaattgaatagggggaatcagatatttctgagcctcagtttccaagctgcaaagtagagagaaatcacactccacagaattatcatgacgatacgaacataatggatgtgagcgagagtgtactgcctggagttgggtcaggaaggaacctgagagcccttaatggagaatgtctggcttcaccaggcgccatgttcgaagctggttcttaacagtgtgtgaggatgctgaggagagagtgcgaagcccacttaccgcctatctgcccctaaagaatttcaaaagtcccttctgcctatttttgtcctgtggtgcttgagtgactatgtgggttatcgcctgtgacaaacacttttatgtgagtgctgacatttctggtgtttcctgataggacgacatcacctacagagccctatgaaaagaagtcagcaaatactctgacctccgggtgctgggggagaagacagcagacagagagaggaagatctgggcccagaattccttgttcgtgtccagaaaactataaacacagtgaattccttcaaacgtatctgcaaagcccgctgggtagtttatgtcacagaacgtctcagagattagagcattttgcacgcaccaagactcctgatcaaagatgtatctaaacatgccctgtgggtgggcaattcctcaggagccagttcgggaggctgtttgtcacctgtcctctccctagtaaggaaaggcccccctggaccagtcagaagacttgagttctggtctcttactgttgacctcagtgagcttggatgaatcccctctgcatttgtcttgattggttcttgattggttcagcccaagctctgcatttaaatcgcctgtgtcacttaccaccagagatctgatttaattggtttgtggtggggagcagagatgatagagctcagaaagcttcccaggtgattgtaatgtacatccgggacaagtccactgctctagcatacgttagtgttcgtctatcaatcactttgcagtgcttgttaaagctcagctgctcgaccactcacccacagtttctgcttcaatccttctgggacggagccttagaatccaccttccttgtaagttctcaggcgctgctgaggctgtcaggctgggatcagtttttaagcagccctgctctaatccagaggttctcaatggtagagcggtttttcctccaaagggacgtctggaggatgtctgttttcacaagcgggaaagggatgctgctggcatctagtgggtagaggccagggaggctgctaaacactcaacaatgcacaggacatcccctcaaaataaagacttattcaggctgaatatcaacagcgtctctgcttctgcaattttaatgtgcagtcaattttaacacgagtcacctggagattgtgctagattacagattctgacacagtcagcccaggaaggacctaaagattttgcatttttataaactccaacgtaatgtccaaggtgccagtcttccagaactcagttccttcagctccaaagacattctccctcagcctgagatagcactgttattcactgttctatcttagaggctaccacagtgtaatggctgacatgggaagcactccatgatatcaggaggacaaaagacgctcgcaatgtgtgagctgaatgggcttcacctacccaccatcacgcttccaccaggagcactggagagtcagaatcttgtctagttcttcattcctccaaagctggacacagagcttgacacagatcaggtgtttcctatatgtcttttgtacaaaattagaccgatgcagtaaacactagcattcttggaattgcaggttatcattttccaagctgctgctgttgattcttccttcaaaacgaaccccttttctggccacggtgctttttgtttatgcagtactttcacttgcattttctcaattgatgctcatcacaaaattatgaggacagccaggcccaatcccacttatggatgggaaaactgaagtgcaacgatgtgtagaacctcaccttgagccgaagtccagcatccccatgtcatctgaggcagctccctaccctccaggcctcctccactaagtcctgccttctcttcactgagcacacaccttctacgctttcttccccatcttttctgtctttcagttgctcccactctgtgcaccagagagccaccccctctgtctaactggctttctttctaagcctttctgtctagaacactttgggtggctgagggcttcctgaaatgccaaccagagacagagattcgcttcagctgtttgaggaaagccaaggtcctccctgttttgctgcccccgtccacctgctccagctggtcccattaggtgatcctaatgtagaggctgtagtctaccaggtgccctgtctgggatccttctcaccacaaagcaggcagatggctggcacctgctttgtgccaggccctgtggtagcctgcaaagggacacagatttataatctacagcgcttcctcacaatatggtgtttaaaaaggaggttgggttcagatttccatccaaatcccaacccttgattctacaaccactagctgctccttctctctctttgctgatttctcattgttcttcctggttgctcaatgctagagaatccagggccccatcttctgaccttttattttccatctacactcaatccctagggagcttcaccaacatccctgtcccatcaatgacttagtgatttacagctgaaacaccaacctctcttctgaactccagactgatatagccaaatacttacttaacatcatcactttgatgtctaatagaaaacataggtgtatgtatccaaaactaaattctagattgcctcccactgcctcaaacatgttcctcccacagttatcctcatctcttttagtgttaatttccttccatatttggagcaatctttgtcacctctcctctcacaaattttattccatttggctctatgtttggaatatgtgcttctctgcttccccaccctggcccaagtcacagcatctctcactggatgattgtatgagcctcttaactggtcttcctcctccaccctaaccctcccgcagattctcacagagagtgtgatttgaaacaaaaagtgtgattgcttcactttgtatagcaggttgaatggttgcccaaagataatatggccacattctaatacctggacctagtgaacatgaccttctttggaaaaaaaggtctttgtggatgtaattcaataaaataccttgagatgagattatcccagattttctgggtgggccctagatccaaggacaaatgtctttagaagagacagaaaagaagacaaacacacagaagagaagctgatgtaaatctggaggaagagattggagttatgcagccacaagccaaaagattcctggagccccaaccaattggaagaggcaaaggaaggattcacccctagagcctctggagggagcccagccctactgacacctaaatttcagacttctggcctccaaaactgtgagaaaataaatttctgttgctttaagccaccaagatttggcagcccaaggaaactaatatgtagactacataagtcagatcacattcattttctgttcttaatctcccagtgttatttcatgtcattttcagtaaaatctaaattccatgtcatggcccacagggccttgcgtgagctgccacacactctccttctggctgtgtctccctccacgctccctctcatgcgtctgccctagcgacattgtcctccttgatgcatcttgacaaccccagcgtgtccccacctccgagactttgcaatgcattctctctacccagaagagcttttctcagatacccatggctcgctcccttacttccctctggtctctgttagaaaagcagagccctcccccatagcctggtgtcagtaagacgccccttccttacgtggtatatccaccatggtgtgcatcactagttaatataaagtgtagtcattattagtctgcttgtttatctgtctcttaccaacacaatgaaagaaccataagggtaagaaatttgctttcttcactgttgtcttccctgtgcaagaaagtgcctggcacatccaaggcactcaaaacttgtctgctgaatggatgtctcttgccatctgcaagaccacgtacacatcactcaacctctccagcctcagcagtagaacaggggcaacaataaccacaagtgcagtggagtttcccagcaccacaccgtaattcccagaatggctggactgggtctctttgatgtcctgccttcagctttcacagagagacccaacagccttgtgagatcagctcctgcccttgctctagggatgccacccaggccttgagtcacatctttttgtgtccccactgtgacatcacacagcaaaatacttattttaaattagagaactagaaaaagcttggctgtgctggtgagcttctgtgtttttcctttggggatagggaggaccatgtaattcacagttttttttctgatttagcctccaagatgcccaacctttagcaactgaggaggtctttatgagtgaacatccatgacccactttcccctgcttcatctctacgtgataatttacacgttctctgctcccagcattttacttcttatttgtattttaccattttcttgggtataatccctgcatgtagatggaggctggataaatagctcaacaaacaaaataaccaaattcataatctgcggtcaagagggagccacccaaacataaatcattatagtacaatgagctggatctgtagtgaccttccaaaaagggcactgaaggagtctcagagaaggaagcaactaactgtccaagtgagtcaggagatgccgcagagagagagtgtgtgtgtgtctgagccaggagtcaaagactaattggagtttttgagacagagaccctgaggaaaggtaaaaagagcctggagtgtttgggaaatggtacaatgtcctaggtccctggagcacagggtacaaatacgtacaaaggaaggcagagaaaagcaggagggagcttggaccagattctgaagcacgtgaggcttcatgtgaaagatgtttgattctctcatcttagaaaaatatatgcctgaaccgaggaaagaaaaagtaattttattattttttaaataggaaggcttaatttttttttttttttcaaatatcagggttacagagaacttttctgatcatcttgggctctaagtcaacttcctcattttggagatttgaatttcaaggcacagagaggggaggatcattactcaacgtcaggcaaaaagcttaaaagagcccccatctgttttctcctagtccaagattccttcccattagctacagcctttgttttctgctgttggtaactgtcagatctaggacagagtgacccttctaaaagatgcctaagtcccttgacccctaggctgaccaggcacccaggcagaacccgggtggtaaattcgaccctctctgatctcttagcccctcaccgtggtgcagtgggatcacctccttgtctgcacccacttatctcccccaccctcatacctacctctctacttcatttcaatctactttactgagtataatttagatgcaataaaattatactttgcaatgtgtatagtttaattactttgagtgttcagtgactttggctttacacccactgcaatccagaagcagaacatttggcactccccaaaaatttcctcttgctccttggcaatccatctctcccttcacccatgggcccagaaaactactggttagcttttttttttttgcaataaattaatgtactattttacaattttatgtaaatggcttcatagaccatgtgacatctgtatttgcttgactttttttattctgtggaattgttttgagattcacccaagttgtcatgtttataaatggattatttctttttattattgctgataagtgttctattgtatggagctcctcattcactcactgatcaacatttgcattgtttcccattttccactattgcaaacaaagctgctttgaatatttgactatgtctttttgtagacatacgcttttatttctcttgggtagataacttggagtggatgttacagtgtatgtttacctttataaaaattgctgttttccaacacgagtatatgacttagcagtatatgagaattctagttaacttcacatctttaccaacatttgttattgttagtcttcttcactttagcccacctaggcagtttataatggtatcgcattgttttaatttgtcaatttctggtaactaatgaggttgaacattttgccatgtgctttttcatgaagtgtcttttcttttgtgaagtgtcttttcaagccagttgtccatttttaaattatcttgttttgaagttctaatagttcttcatacattctgcgttcttttgtcaaaaaggagcttgcaaatattttctctgtggttcatgttttaatttagctgtgtcttttgaagaaaacattgtgcttttcttttaaatgttgataaaatgaggctgggcgcagtagctcatgcctataatcccagcactttgggaggccaaggcgcttggaccccttgaggtcaggagtttgagaccaacctggccaacatggcaaaacccctctttactaaaaatacaaaaaaaaaaaaaattagccaggcacggtggcatatgcctgtagtcccagctactcgggaggctgaggcaggagaatggcttgaacctgggaggcagaggttgcaatgagccaagattgtgccattgcactccagtctgggcaacagagcaagactccatctcaaaataaataaataaataaaaataaaaagttggcgaaatctaatttatttttatgttttgtacttttagtgatctaaaaaatatttgtcttcttagatcccatagtcacaaagattttttattatgtttcacatcaaaacttttagttgtagctctttcatttagatcaatcatccactttaattaattttttgtgtacagtgggggtaagagctgatgtttgtttattcatttgtttcctgtcagagttgtttcaccatcatttgtggaaaagattcccctctctctattgaattgaaatctttatcacaaattaattggccatatatgtgtgggtttatttcagaactctctatcctgtcttgtgatctgtatatataacctttactgataccgtgatatcatgattactgtaactttatattaagtcacaaaatcaggcagtataaactttaactttattcttttttttaaacattgttttgtctatgctaggtcattcacatttttatataaattttagaatcagcttgtcaaaatctatttttaagaaaagcctactagaatttttatttcaattgtattgtatctatagacaaatttcagcataatttacattataacactatttattcttcctctgatccatgaacatagtatatttctccatttcagtatttttaaatttctctcagtaatagcttatagttttcaatgcaaggggcctggcatatcttttgttaaatttattcccaggtttgttaggttttcatgctattgcaaatggaactttttaaggttttaaaattgcttactgcatatatatatataatatatgtattacacacatatatataatgcagttaattattattatttctaatagctgtttcttagattccatagatccatagattctagagcatttcctgtgtaagcaattatgttatctgcaaatagagaatctttcacttatttcttttctgtttttttttttttttttttttttttttgtgtgtgtgtggtattgcaatggctaggatttccaggacagttgtgaataaaaatgagagtggacatgcttagcttattcctaagattagagaaaaagtgttcaatatttcactattaaatatgttgttagccagagtttattcatagatgacctttatcagattgagggagttcacttctagtttttccctaactacctcttcaactcaaggctccaaggaaaaatggtgcttcttatgaaaaggatggcgcaggtgctgagcagtgctgagcaatcaactatgcagaagctttaaacagaagcaagactttcctcaagaaaaaaccctcagctttccagacctgggatggactctgtccataagctactgattgagctcatcataaatcagggctgatttagcccatcataaatcatcataaatcatttaacccattataaatcattttgattgaggattgagaaagtctttaacaggatgtagctttttgttatgctctggtttcggggtcaaaaaataactttaaaaaatactttttttgtaccacctaagaccaattagaatggctcctttaaaaaaaaaaaaagaaattaacaagtgttggtaagggtgtaaaaacaaattcttgtgcactcttggtgtaaatgtacaatggtgcaaccactatgaaaaacagtatgtcaatttctcaaaatattaaaaatagaattaccatatgatccggcaattctgtttgcagcaacacacccaaaataattgacagtagtatctcaaagagatatttgtacacccatgttcatagcagcattatgcacaataaccaaaagataaaaataacccaaatgtctatcaatggtgaatgaataacaaaaggtgagatatacacataatgaaatattatttagcctttaaaaaggagtaaattctgatatatgctacaacttaggtcgtttaaaatatcatactaagtgaaatcagccaaagggccaaatactatattattctagttatatgaggtacatagaatagtcaaatccataaacacagcaagtggaatggggattgtcaggggccagaggaaggtgaaaatggggaattgttgtttaatgggtacagagtttcagctttgcaagatgaaaagagttctggagattggttgcaatacaatgtgaatgtatttaacactattgaattgtacactaagaaatggctaggatgatatattttatgttatgtatattttaccacaatgcaaaaattttttaatggtttttgtctcttgacccagtatctacattccactccatcctctactgtccttcccccagtcactctccattaccttgaccctaatttattttctctttttttttttttgtttgaggtagagtctcactctgcctgtcacccaggctggagtgcagtggcacgatctcggctcacctcaagctccacctcccaggttcacaccattctcctgcctcagcctcccgagtacctaggactacaggcactcgccgccacgcctggctaatattttgtatttttagtagagacggggtttcaccttgttagccaggatggtctcgatctcctgacctcgtgatccacctgcctcagcctcccaaagtgctgggattacagtcacgagccaccgcccccagccagaccctaatttattttctttagttacattggttcattcttctattatctgtcagacacatcggaatatatgctccattatggcaacagtcttgtctttccagatttagagaagtagccagcttatagaagatgctcaataaaatgcagtaaatggagtcttgaatccagaaaatgtcacaaatcaatgtgaactccttttcataagaatggggtaagaagacttctctatctcatccccacaccagataagaaagcaaacagacctgaacttaaatctcagacttaccacttttgacctgtgtggcttcaaaccagtcactttatatccctaaacctaaacttttcttcccacgaataatgaagataaaaacacctggtatctatcataggatatcaggattacatcataataaaatatacaaaggtatatttataagtcttcagtatactatagtctctggagcccaaatgactaaattcagtcagtatgtcccaagagtgaaactggtctctgatttgtgtcacaggagataataagttcaattgtccctgcgactaatcagggtattttgatggaattggggtgggataatcaattctgataaattgcttgtatttattggcaagatgttgtctatgtaatttataaaaggttcatacttccaaaatgcaatctctgctctattttcactaatatgcattgatcacacaagctggcaaatttaaagaacaagctccagagaaaccataatcataactagtgagcttattaaacgatgccgatgtacagactggcatctgagcagaacttcagtgtctctccattgtctacaggatcccatgtaaattttttggcttggcatttattatgtatgaccattcataacctggttccaacaatctaatctagttttcttccctccccacccaagactcaagacccaactcttcacccactcccttaacacatacacagacacacacacacaatttttgatctggccacaagccactaaagcccattattactctgtgcttttttgcctgtgttctttattcattgcaaggcatacataccctttgcaaatgtatctgcctaacaaacacttactcatccttaaagaccaaaatcaaatgttctctcctttgtgaaaactgtcaaacctatccataagaaaatttgttccttccaatatgttcacacaatcctttatatagcttcaattccaacacctctttcattgttttgtgataaaccatttgattcctttcttccttactgaccatagactccaagagtcttactcattttatatttgatatttttacattgcaccatatctagacctcagtagacattcagtaaatcttcctttgaaaggaagaataaataaattttgagtagatagatagataaatggatggatggatacatgactacctatagtaatggtctggagtttcagcatctttcttcgtggcatctgtataagcccattctcagagacacacctcacatctgatgtttggggaccatcaactctgagagttttatatcttggaagaaccattgatttttcttcctttgtttggcctttcagtcccaatgctattggtgttcatcagaaggacaagaggaagaagggtgagagagtttttttaagaacccaaaaagtcaaaatcagatcattagggatgtagatagctccaaatttttcctggcttcctctgaataactgccatgtttttaacattaactctgctatctatcttgctgacaattcctttcctgctcatagaaatggttgaaatctgccccctctgttcttcaacccctaccactaggactggggtcctggaaggattctaatattatcagaatcaaatatgattctgtttcctatttggggtaaggaagtagcatggtgaaaagtaaataattccatgtttagaatttgtggcctgaactagagtccctgctctcctacttagtcacttagttttttcctctgaaaatggaggcaatattacctaccctgaaaataaaaatataatcatcaaaatccaggaagtcaacagaaagacctcactctaactacagcaaagtttgtgcttaatgggttggctcttttcttctcctctccactcctccaaatcacatctttatgcagaataccttgatttctgcctccactttctgcctctttgttgcttatgacttgaagccttttgtctagccaagtggagaccttgagaatctgtggccaaggatagggggagcctgggggagtgtcaggcaggagagcactgagaatagggaggaagagtctccaacactctgcaagatatgggggcaggaagggttgctttatatcgttttgtttgtttctttgttttaaatatgtagcatacataaagtacctggcacaacagaagtggtcaaaaaactgtatctgtgatcatcaatgccatcatatgaaaaccagagagcatgcacctccacaaagatagcaggtgagcatgtggcagagcaggaaaggtgctgagatggcaggtgagtatttgaactttgatttcaagaaaacctctttcctggtttactgtgttcagaaacccaactactcaacaaccctataagggggctggggtgaagcttccacagaggcttgttattttaagtttagaaagagctgataccattgcttatcaagttccctaatgcacacccaaactcacgtgcactgcccccagaaaccttgactcaaagtcagcaagatttgaaacatgaccaaggctcagagagaagcaatgtctgggttttgtaaccttggggatcaaacattccaaactctctccctctttctgcttttgttctatgaagcagagaagatttcagcacttctgccatgaaattctgccaaactttcagacttaggttgagaccaatttaaataaattaagtgaaggaaacagaatatgctgcttaccttcatccactcatttccttattcactcattcatctatatatgctacattcattcctgtactcttccatccattggtccacctgggtatttaacatttactaagcccttgttgttttccaggtattgtagatacaaagatgaacaagccaaaatttctgacctgaaagaattcctatcacattaaaacagaaaatactaatttatttttgtataaaataattatagagaaccaattatgtttctgtcaggaccctagtctctggaatagaatgccgattatgataaacctgttatctgacctcatggaaccaacactttagtaagggagagagattttaaaaagcaaaccaaaaagtagtaaatactagttgtgatctgtgccttgaaaacaaaaaccagccagagaataatggaggaggggtttctttagaccagatgcttagcgaaggcctccttgagaaggtgagtacatttagtctgagtcttgaaggatgagtagttgctaaacatgcacagaaagggaagaaagagcaggctgtgtagagggaataacaaaatcaacaatgtccctgatgcgggaaatagctcagcgtgtcctaggaattgaaaagcaaacaaacaaaaggtcaagatgtatgcggggtaacgagaaaagggaacagctcatgctgcctctggtggaccacagcagggcacctgtaattattctaggggccgagaggggtctatgaaaggtgttaagcaggctggtggcgtaatcgctgctattgcctcatgttgaatagattagaaggttgcaggagacacctgctaggatgctacaggagaagtttcggtgagagataatataggcttggactaaaaatggggaaaggtgcagatccaagatataatttggagcctaaacctgcagctttcttgccagattggatgaggtgtgcagaaggggtgatgaaaaggagattcaaagatgactttcataatcctggaatggccaacacgcagatgtaggtgtcagggttccatttatttagtggttgggtcggggagggtgttgaatcaatcatcccactgacatgctaatttgagatggcagtgagacaaccaagtagagacaaaagcatgcagtcagatggatgaggctggagctcagcaaagcctgagctgaagagtcacgttggatcgggaatcatcaacgccgatagcctgtcctgggtgcagtgacagaggacaagtaagccagtggagcagaggagagaacagcgcccagctgcaaaccctgaggcagaggaaagttacagaggaagtaggaagagcccaagaaggagctagaaaacgaaagcaaatgagatggaagaaagcccaaactggaggtgctgaggtgctgatggggaagccaggagagaagagggtttcaggaacggggagaggtcacctgtgagggacaaaggtgcctggccttgccagttggaaacacataggcttcctggggtgctgctagcaagcagtttcctgtgtctgtcacgcagaggtagctgcgatggaaagggttggtgcccacgtgcaggctaatttacaagcagtgatatatgtagaaaagtttagagtttctaggtgatgcatgatgtgctccctcaagatagccggtacttgtcaggcagcatcagtggaggcatagcatctagaatgagggaggtgatgctctgtcctgcttgttctgtcacattctgtttccctgagcttggagaggaacaataaccacccggggttgttgagaggaatgactaggattggaggcaagctgtcctgtgaggacatgcaccacggtgaaaataaagaagtgagagtgtttatcccaaagaaaagaccacttagaaaatataattggttccttcaaaaagcttaaggacttttaaagaaaaccaatcatgtgaaaaataaggaaggcaccctgtgtagccccagaaggctgatgggagtaaattacatggtgaagatatcagcttaatataggaggacttgtcttaatgatcagagctgcccaacacagcggctgaaaactacagccagccggccaatctgccctgccacgtatttttgttggtgtagagagctaagaatgattttaatattttgtaatggttgggaaaaagcaaaggaagaataatattttacagcacataaaaattatacggaattcaaatttcagtgtccataagtaatgttttctgagaacacacctacatccatttgcttacatgttatttatggcagctttgcactataattgcagagttgagtacttgtgacggaagccataccatctgaaaagcctgaaatatatttacaatctgaccctttcctgaaagtttgttaacctcttttcttagcagtggttctcagaatcacctggaagctggttaaaacccagtttgctggacccaccctcagaatccctaactcagcagctttgaagtgggccaagaatttgcaccaagtctccaagggatgctggtgcctttgatccagggaccacactgctcaagaggcactcatcacaggagtagtcaactcatctccatggagcatgtgttccccgcaagcccatactcttcctgagggtaggaacttcaattctgtttttttccacaatgggacaatgctggagacttcctaagtatttgttgaatgaattaacgaatctgttaattattttgactttttgatctttggggactttctaatttcctctgattgcaggggaagtgctctaggaaggaagatccaaaggaaaggagaaaggaaaaaagagaagaaaagaagggggaaagggaaggagctctcttcacaaaacaagactttttggtagtgcctaggggtatccttgtgcctctgcttcagtgttcaaaggtatataatattctcttcggctttcccagtcactttgaatgagggagattgtaggcaggagggtagactgcatataacactcctcattccaaggacccatcccatggcataatgatgctttgtgtctccataatgacctttggattctgaaggtattatatatgcatatctaattttaatgatctgatgtatttctcccaatcttttttgtagacattttatttttgtattaagattgtgttccacggataattttatgtccttttaaatttaacattcactcaaaatatttttcctatgacattataaattctatataatatcctttttatacagaatattgtctcatgtgtacataccataatcaatttagctatacccctactgttagatatctatgtttctcctgctactcatgcttttcctggttgttttgctattataatcttcattgccttgtgaaccattattagtcaattctccttctgattttgaaaattattctttagaatagagtttcacaaaaaaaggctatcaaaaagacatagaagaaataaaatgttaaagtcataagggactaccttgctgcaactctgtacaagtaaataagaaaaaaatagataaaataggtattatggaaaaaacacaacttaccaaaaataatacttacaaagacagaaagtttgaactaaccatttttcttagagaaaataatgaatgctaaagaactcccctacaataaaagcaccagccctgaatattttttcataggaattctatcacatttgcaaaaatcaagaatcccaactgctcctgaaactatgttacagcacagaaaagcaaagaaaatcctccagttcttttctataaagaatgtgtcattaaaaccaaaaactaactgcatcaaaaaaagaagacagatcaatcttactaaagaatatcaaagagtgccaggtgcagtggcaggtacctgttgtcccagctactcaggaggctgatgtgagaggatcacttgagcccagagatagtgcactgtaaacgtacttgtgaatagccactgcactccagtctggaaaatgtaatgagacctcatatcttcaaaaagtatatacatatatcaaataaagcattagtaaacagaatctgtcagcataaacaaataaacaactaaaaagcaaaaaacaacagtggttttcctggcatgttgcatccaggaatgcaaagatggttcaacactaggaaatctcttaatagaacccatcattatagctaaggagggaaaaaaatgacatacttatcttccatttactaactatatctcaaattcaccactcatctatgtaaaaattattcaacaaaataagagctgacagttaatgctgcatgattatattatgattgcacacacacatacgtaaatgtcaactcaaaagccagcatcctacttaatagtgaactaagaaacactagaggctttatctctaaacttagaaacaacacaagatatctaaaatctctattagtttttaccactgtttcagtaattaaccaatgtaaatagacaaaaacaatgaaactagaggttaagaattgaataataaaaataagactttatcatttaggttgagaaccaaaagaatcaacttaaaactactgtgaaccatgagaatttagtaattaacaactcaatatatgcaaattaataacctttatatattaaatacaaagacagttaaaagacatggtaaaagagaaatatgttaccaagcacaagcttaaatataaaacatctataagaataaccttctgaaagatacagaagtagtcactccagttcaggtgacagagtgagactctgtctcaaaaaataaaaataaaattagaaaaataaaataaaataaaattgtgtgtatatatatataccctttggcccagcaaaagacaaaagggtgtttagagagagatatataagtaactcatatatatatatatatatatatatatacacatacacatatagaatttaaataagaaattatgtaaggttgttgagagccaagattttcagcataaaaaagagacataatatctaaaaactaacaacccagtaattctaaatttgaatttgaaatactagtgtgaattcatgttttatttcctagctctgtacactagaaaggtctactgaaaaatgaccaacccagtagcaatgagcaccctaccactcaaactgtggtctctgaatagcatttcacagtgaaagagagcaagactccttgaaaaaatgcctcatcctagaaaatgtacgagataaacctggaataccatattatacataaagtgcaagcagttgtccctgtgattctggctagaagacacaggagccaattaagtaatttgagcttctaaaagaatatggatagaaacatcaaatattcaaaaacacaaggtcattgtgttagtttcttattgctcttatcacaaattatcacaaactttgtggcttagcaaaccatcaatttattattgtacagttctggaggtcagaactccaaaatgggtgtgcctggcattgttccttccagaggatctaggggacaattcatgtttttgccttttccagcttctagatgctgcccacattccttggctcatggctcataccaccgagacttctgctctgtcctcacatcctctgtgactcagacccttttgtctccctcttcagctgtcctttgtgataacactgggccaggaggagaatccaagatcatctcctcatctcaagatccttgacttgatcacttctgcagagtgcctttgccatgtaaggtgacattgcttctggggattaagttgtgcacatcaggggctattattctggcaaccatcgtcatcattccgagctgctacggaaccaactcattattctgaaaattggtaaataaaagacaggatgaagtatttatcctgcctttttctctacaagctctgcctcagagttgtcaaatagttaatgaaagaaagtttctttttaaataaatagtctagctaataagttatgagagaaggaaagatcagaatatcaccattatgcaaccctaatgaagtaacatatctaacaatggtcatcaataactgctaaaaccgtttaatggaaagctctcggtaaactttatattaattggctcacctggatgcaccggccaattttaacatcacaaagggagagacaaccaggtatcatatgccccccatggaagcatacaacagtacttttgaggttttcttaccaaaaaataaacctgggtatgaaaagccccctagtgctaaccaccagtctgtaagtaatacaggaaagcagcaaaatacacaatgtgggaaaactatggtacaaacaacccaatatcttaaacaaatagattgcaaggaaacataaaaagggaagaggaacagaaagtgaagacatttaagaggcatatcaacctaatccaatgcatggatcttgtttgaatttttattgaacaaacctggcataaaaagtatttagaaataatcagagaattttgaacactgataggatacctgatggtatcaaggaattgtgatttttcttaggtgataataagatggtggttattttttaaattccatgtcttttttttatctttttttcagggtctccagcttgcagaaaattccatgtcttttaaggatatgtgctgaaatatttagagaagaaatgatatgatgtcttagatttgcttcaaaataatccagttgtggagagatggctaggtatattaaaataaggttggccataaattaagaattgtagaagctagaggttgggtacatgggagtttattattctcttctattcttgtattggtttgaaatttctcataatgacaagtttaaaaataataataataaacaatatgcacccagaaataaaattactgggtatgagtgtttccaaggcatttaaaatgtattgtcaaattgctttccacaaaggctgtagcaatttatagttccactagtagcaaatgagaatgctgaggatataatattttaaagaatatataatcacttggataaacggaggaacacatatttctcagttgtccatgcctttagaaaggctaatggcgtattatgggatattatggcccagtcatgactacacacctggaggccttgtacctgaacagcagggaaaaaattcaaagagtaaatggagttcagcatgacagtcttgccaattcagatttatacaaatctaaattacccaaatgaggggtttcgctgttattcttgacaccattgcagaggatctttctgaacatctattgagatattagtttaacgggaaaatctaccattgtatcttctcagtgaaatctgattatcttcaagaggcttcctcacataaaaaggggggcggggggaatcaatgcctgggtttctctgcctagcatgaaaaataattttctgctatagggtaattttgagctcctgtaatcttccaattatgtttgattgcagtgcctccttcctgtctcagtattaaaggatggtcagcacttttctgcaaccaaaactgactttcagatgaagccgccacttatttcaatggcttgtttataatcagcagctctttgggcatgtggagcatcccctccttggaggaggagcccactccaggacctctccctggctgttagccaacctgttaacgcatcacagggtttaggggtctactaggtgagataagccttcaggtactgtgcagggacacgaagaataatgagttgggtatctgccccctaggagggcatcatgctagtgggagagtcacaggcataggtgtgaaaagtcacactcctagaaggcaccttgccagtgaaagagttacaggtacgtatgtgaaaaatcacgtaacgattgaaccagtcattcattccacagatactaaacatgcttgatgttggtagcaaagagatgaataagtcagaatccctgcacttaaagtattcatcttgtaagaaaacagaaatatgaacaaatagttaaaatgccactttgtaagcgtagtgctagaggaatgtgtcaaggtttgtagtgaaatgagaagggacttctgactattcaaggagacttcctgaaggatgagaaggttggactgtctgtttttcagaaggttggacttaaaaggcggtcagtgaggggaggtgccctccaggcagaaagaagtataggtggaaaggcagggagacttgaaatcatgtgaatctttgagtggaatggcaattcatttgctctggagcaaagttagaggatgggtagggaagggacagaaaatgagaatgggaaggtaggaaatgctagatactagaaggccttgtctgcaatgcagaggcatttgtttgttttttaaactatgctaaagtatgattttgtagagctggacaactgagtgaatgaagaggggagaagtgcccaaggatggcacgttgctttgtgtgagaacctagcgtcttgaaaggatcagggaggaatgtcatgctgagaataaccctgggacatgccaagcccgagaagagataaaactcctttgcagaattacatgacgcgaatcatccattcagataccctaccaccaaggggctggagcatgactccttattccttaggtggcagctgcttctagcgacttttttccaaaggtgcagtgtggaattgggggcagaagtcagagagaataatttcacaattaagaaacatgacaagctcaacttcagccagggggccaaggtcaacatcaacagtcataaatcgtgtcaatggtaggtaaccttgatatgagatgataacattggcactttatctctgtggtctccctcatgataacccacaaccccaatttaatcatgagagaaaacatcagacaaatcctaggagaaggacattcttcaaaatacttgaccagtgttcccaaaactgtcatggtcctcaaaaacaaggaaagtcttagaaactgtcacagcaagaagagcctaagaaaacatgacggctaaatgtaacgtggtatcttggatggcattctgagacagaaaaaaatcaacaggtgaaaacaaagaaggccggtcgcggtgactcatgcctgtaatcccagcactttgggaggctgaggcgggcggatcacgaggtcaggagttcgagaccagcctggccaacatggtgaaaccccgtctctactaaaaatacaaaaattagtcagtcataatggtgggcgcctgtaatcccagctactcaggaggctgaggcaggagaatcgcttgaacccagaaggcggaggtggtagtgagccgagatcatgccactgcattccagtctgggccacagagcaagacactgtctcaaaaaaaaaaaaaacctgaatagaatatggactttagctaataatcatatgtcgacattggtttattagttgtagcaaaggtactgtcctaaggcaagatgttaattgtaagggaaactgtgtgtgtggtaggagggacctagctgtactatcatctcaatgtttctgtaaaactaaaactattctaaaaagataaatgtttttcttttttaaatgaagccaggcaagacaatccatggacttaatcccaggaagacctgcaggtaggagcctcgagatacggtaagtgtagagacaagagtgagtttgcttgctggagggaaagcatttgagagaatcggagagaaaaatatgcaggactaggaagaaggagagaatccggggctaaggggagactgaagcaggcatgaaatggaggaagtagccctcaggctaagtcttaaagcatggaaagaattcgggtaggtagaaatggaggtagtcctcttaaaaacttagaaaaatgcgaacgatgaaagatctcaaaaggaatgtgccattgactagaagaatccatggctgcattatgctttaagtggctttttttaaatatatatgatgaaccgagcttggggaaaaccactttggatcacaggggtgatgacaaggaggaagaggttgagtaaaaagaagagataccattctgcaaacttttttttttctaacacattcaggacctagttttaaaatacgaatattgtaaaggagataattaatgggaacatgttaatgggagggaataaattctaaaatctctcatggggatttctaaactctgattacccttctttcctcccaggtaaagtttgagagctcatcagtattccatggaagaggaagatctgtcttgacatatagaggtcaagacaaaaattgtttgttgagtgaattaatgaaataatagcaattgtcagcagccctaagtgtaactgttcttataaaggtttcacagtttgtgattaaatcaaaattgatctactttattcattcatacaagtctgattctaaaggctactgtgagtttagcatagccaaatatcttcttttaaagcagtagaggaaacaattcattaaaactgccttattgaaagtctttttgctaagagaaataatttttgctaaaagaaaataattactgcagaaaactatctgtgtaaaatgatcaaattagtgattggcctgtttttcactaagcgggtccaccagaagttattccagccaagaattggtcccctttgtggcactgccatcagatctttaaatgcagccaagaattcagcaggtaccatccacaaatacaacccttccatttacttctaggttttgtttgaacccttatgtattaagacagacagagacagggagagggtagagaaaagcaattgttattcagaattgaataatgcttctaacaatctagaacttcaaattgtttttaccccaatctgagatgattaactcaaagcagtcccgacatttatcagatggttatgaaaagaaagcaaaactggtcatgaccaaaaggcccatttctgcagaagttcacattcagtacacccagtcggtagccccccgggagttgaggagaaaagaggaggtctgtaatgcagctgccacacggcgatcaggcccatcagagggctgctgaagctgatctggtgtccagataaacgtggcattcatgctagccatctgtccacaggtcagtggggacagaaactcaaaatcattatctctaatgaatgaatatacaatgacagtcttgtgtgtggcaaaggatcatcacataggaacatggttgggggaaatcaggcattggaaagcagcactaatcttgcaagggaaaacagttctctgtgtgtgtgtgcgtgtgtgtgtgtgtgtgtgtgtgtgtttgtgtgtgtgtgtgtgtgtttaccgttaacccttaatgtctgggataagcttgcaagagaggtgctttcacttggcaccattgccctttctttatccagagcagcactgatattttgcagagatcgttcagttgacaagtttcaggatagcatatatttttctttgggcatgaatgtccatcttgttaccccgtttttgttttgctcctctagggcagaaagctctgtaacttcctacctttcctctgcagtgccacacataaaaccttaaaaaactaaatcctattctcctagaggtatcatgcttttagttgaaatagcaagttcctattccatattcctttttattatttcccaaagtgaattaaaaaatcatatatatggttattatatggttatcatatattatatattttatatattatatatcatactttttatattttatatatacttatatattttatatatttatatattttataatatatgtattatatatgatttaccaagtacctactccatactaggcacagaaaccgggaagatgaagaaaatgtttcgtgatcctaagaattttccagttcaattcagaagataaatgccttaaagaattataaagaaaattaaataggaagagaactacagtaaatcagtaataagcagtaagtaaaacagaagtaaaaatcaacatgctgaaggaatacggagaaaggaaggagcagggaagtgacacctatcaggcatacatagctgtgtagggcactttaaagacattgttgcttttacttttgatatcttccttccaaggtaggaatcattgtccctgttttgtagtccggaaagttaaatcacagaagggttgagtgaaaaatgcagtgtcacacagtaaaggaaaagcagatctggaatttgaaatcgagtctatctgacttcaaaacttatgccagtgggaatccatggacagcttatggagaagaaggcattagagctggagaaaccacaaagacccactttgctccagaaggaggggacagatgaggcaaagactggggggaagctctggagatgaggacacaccctcaggaaaagccagagatgcgatgcgctggaaacaggctggacactgggaaatgtagacatgcaggacactggctgccacgcacattgtggagggccttgatgctacaccaaggaattggacttgatgctgtaagggctgaggacctattggaatggaatcccagagtccaggactgagtttggtctttaagtgcagtcatgtccagggctatctggacagctgatgggatagacccagagggatctatgtgcaataatctcctcaaatgggccatgatgaaacccttgggagctcaccctcagatatgactgtaaggagcaggaacaccactagtccccaagtggtgtacgtggctgggtaaggaccctcactgggtggaggtgaggcaggcacaggactcagatgggacaacacttggaaaacaaaggagagaccattaagtatatcataaagggctgacatttaaagtttcttctggtccagatccctggactaacatctttgggagggggccgtgatgaaacccagtcactttcacacctggggcaaccaagtttctccgtgaatgcaaaggcaggatgtgatgaagctctatggcctcaaaattgttactttccaggtaagaaaggtacgttcatcatattttactatgtggtccactggaagtgggaaggggaaaggacttgtcgtgggaataaaaggcacacgcaggacacccagacactttcagagaacttgaagacagttatcatagcgggactataggtgcacacattgtggagggccttgaatgccacacttaattctgtgagcactggggattcattgtgaaaagaccacagatggatgtggatgacaaacactgctgattttaaggaggggttcaagagctacacatggaaaggatgtggttccaagtaagtcaaggtatccccaagtgtggtctacaggttcctagtggctcccagtggcctcacaagtggtctgcaggtggtggaattgtttcaagtgaaagcatgatgaaacaaccgtgttcgtatgcatttcacaaatttgcaatgtaagattaatgtaatttttccaagaaatctcttccataattactacatgctttacagttttacatgtactatagggattatgttgtcagttcacctaaggtactctgttaataggatatcttacctattgtttcttcatctcattgcacacacttgtacattttgggaaatatatatagtactgtgctgttgctattgttttgttgtatgctaatgagaacactggtggctggcagcccctaggaggcttctgaatgtggctggtcactttcagccccacctcctaacatctggggagggaagaggggcggaaggttgagttgatcaccaacggctaaatatgtaatcaatcatgcctatgtaataaagcttttataaaaactcaaaggactggattctggaaatgcctgagttgatgaacacaccagtgtgctgggaggtggcacaccccagctccacgggaacagaagctcctatgctcaggaccctccagacctagctcagtaaatctctgcatttggctgttcatctgcttccttcattacatcttgtattaataaaccagtaaatgtaagtaaagtgtttccccgagttctgtgagccactctaataaattaatcgaatccaaagagggggttgtggaaaccaaaatttatagccaattgttcagaaattccgaaagcctgagcttgtgactggcagctgaaatgagagggggtcctgtgggactgagccctcaacctgtgggatctgatgctatctccacatagtcagtgtcagaactgaattgaattgaattgaattagaggacatccagctgatgtctactggagaatccgccggtaggatcatttgcatgatgtgtgggaaaaccccacacccacttggtcacagaagcattctgtattgtgagatgatggtaggaaaaactgagtttatgttttcctctatctctatagtcataaatgagccatggaacacgactatggatcaaatataaaatgtgatttcatatattggagtgcatggacactctcattgacaattttgctcaagcagccaaaaaaaaagaaagaaagaaacgtggctactaagtataataatatacatgcaaaaactgaagcttttggatggagggtccatttgtccttagttcctagcacactgtaacagaactttgtcctaaagtcatttttcgacaaagtctgatgacctattaagccaatcagaacagttcagaacaaattgagcaaaacattgtccacaagaaattaatgaatttgtatcctgaaatgtagaaaagaaaggaaaatcaaaaaagcatagttcaatgttaaattttcatagcacaaaaatacgtacaattatactgttgccaaggagcttgtaaaccacccacaaagttaatggcaaatgtgctcagagagagtgagaaagcaacacatttcttttatgaactaatattgatggatgatagatagtatcagtagcagtgattatggcccctgataggacagtaatgaatgagctcttggcatacatatatagcacagcaacaaggggaaagtgctgggaactttttgttgtttttgttgctgaaaaacaaacaacaaacaggcaaatgttgttttcatgttggtaatgattgctttgtgggctgtaatgcagagagaaagcaggcagaagacttaccatgtatatcacaagaagtggcatgatcacgtaaaataagctcacccattgtttatccacagctggacagcaattatctatctcctggccttggttcaaaatataaagaaattgtgaaaatggtggtcattttgccctctcatatttaataagaatttgcttgtgtagggaagaggtattcaatcaaggtatgaaacaagtggtcaggttgaaatgtttcttaaagttataaacaatacaagtaaagatgattatttcaaatgacttccttaagttatatctctggaatatcttgaacttatcatttcaagggcataaaatcgtgtgtgtgtgtgtgtgtgtgtctgtgcacacgctcatgttgagaataatatcaagatttcttaaaactgaattttgattcatcaacttctgatgatttttttgatgattttccttgcttgtctaaaaaaaaaaaagctgtaatatttgaaaactacatctgaatccagtaagagcagaataaatgcatctccaagccaaatactatcaaagagctgttgagaagtccctttgcaagttgcaacactgagcctaccagaaatctccatgtaactggtatgaaagaggaccagtacaaaattactgttcatcattgtttcttgttctaccttgagacctgttgccagggaaacacctgttagagaggttggccttgtatcttctatgcttgacagagcacttagtgcatagtcactcagaaaaacattactaaatacacaagtgaatggaccatcatgagaatctagctctaatattttgtgataatatgatcagagaatatcagagaatagaatacttttcatctttttaacatgtttagtcttcagatcctgtttagaatctctctgctgccctaacttctctttgactccctgtgcttatttccaaagcaaagctatccagtatctttcaggtatccaagtggggcaagcaaagggttttcccccctgagaatccccgggctggttgtgacatatgaggaccactcacagcatctctcaaaactggcatctctccacatcaaacacaacaagcctgttaagaaatatccatttgtctgttcttgctgttgcaagctaaggacgggggttctttggatttttattcctagatccagtctctaatggaagggcagatgttattctcgatgaatggatgttaattccttgtaatcactgaactcttctcaaaacactaacaatctgcttcctatcctgctctagaattctgcagaaaatcagcattcatctcctccatccatagcttccagaatccttgattttgtacattgcaaaaaatgggatagtattgactatttccagtgttcattcagacctctggcacttggtaattttggacagatgacaataggggctccagagcaaaatctcaggatccttcaaatctaatctccagaatagaaggcagtcaggcctagactctccagccctttccaatgatggtgagtgcctctatcagggcccattccaaggaccagagccagacaaatatgccggctccattattcttgagaggtaaagggtcagacggggaagcccactcatgtaactaagaaggtaagagaagacgtcccagggaatatgctggtcttagaggaatgaaagagcaacttagcttttccagggtaccccttgcctgttcatctggaattctaatggaatgttagtcctgctccctccaatccaacttttatgggtcaatatgatccctgtaaagcatagactgatcagtttaaccttcatttaaaatgtgttgatgggttgccattattgccaaagtaggtgaagcccaaatcccttatcatgatgtaaaatatcctctatggcctgccagctgcattcctctctagaatctgggtgtcatgatttggcttctctttatacataactgcacacacctctgcatgcttgttcatgctatgtcctctgtctttgccatcagtcacctggctggatcttaaccatccttcaaaactgcagttgacatctgcttctccaggtagccttcttcccagcttggtaagcgtcccaccctctgggcttccagcaggtcttgtgctcacctgcatagcagagcccaaacactcccaagggctagagtccaagactgtcaccacctccaaaatttgtaaatgccattatagcatgtcatttccccataaaatacagtaaaaataactctgttaccatttatatgatggcaagtatagattgtgtcacttattgatagcaggtgtttggcaattgacgaggtcactggttggccaggtggcatcccctcttgccattctcccatgcacagttcagactgtgccctgtgttagattccttttgctgctgtaacaaattattactaacttggtgacttaaaatgataccagttttactagcttatagtgttggagtcggaaatccaaaatcctgctggctaaaatcaaggttctgtgatgctttgctccttctggagggtctcagttctccattttcttgcctttttcagcttctagaaattgtccgccttgctgggctcatggccctgcatcactccagcctctgccatatcatcacatcttattttctgtactacgtgggcatctttgaaggtgggaaggcgttactctgcctatcacgtttcatagtaagttacaagaaagtatcacgaagctttgggttttcttataacaatttaaaccataaatgataaaaccaagactttgggaaaggtgttctcttacctgttaatcctctcctgattatgagttattggagggcaaggcccagtctaagtcacgtctgggcatccctggctcatggatatgctctataaacatttgttgaactgaaattcttgcttttactgagatcaggggctcttcaaggtcatttagggaaactctttgaaatttggctgaggactgagctgcatgatccttttatccaagcacataaaacaaacatgttttcacttctaatatcatattcagcactctctcctccattctgatcagaccagaatctctacacaagttgctacatgagactgtgttttcaacccttcagcttcctttcctgggcagagtgagaaatgcacatggcaattaaaaataacagcctcagcagaggaaacagaaccacttctgaacgccagccatctggagccaccctgggcttgcagcaatggctacttcttcatggcttggtcaacacccacctgcgtgtttcttctcagcctccaccgcttcaatgtcctctacctgcaggggaaccacagcctcaacaccagccaggctgcatgacatgtgtctagaagaaagcctgactttcagcaggtgttcaataagtgtgtgcttctgctcttaaagtctcagcctatttagtccactcaccacacagggcaccctgaggggtgaagttttgggtggagatgacggcatgggaaattatatgtctcatgccttggctgcaggtgtgctggactccagctgagctggacagagagtcacattgtgcaaggcctgctgtcccattgatgtggtcctggactctcagcagtgtaaaaagccatgttcccatttaaaccaccgcgtgtagacatcgtctcatctgcttctgtgttgcaaacattgctccctccttatactttagttgtcagcatcttcattacataggggccagaattggctatctgaatgcaggagtgtttcctgacctgcccagggactgcaggaaccaccatcgcttgcaccacctggggacccacaattgcatctcagagacctgtgtttctcatctgtaaagtggagataataatatgtttccaaaagggcccctgcacggaataaagtggtagaaataaataacctactgttacctgacacaaagcaggtggttgataaatggtagatttattattattactgtcatagttatttctacagcatcatttcattctggcttctttttggcagacaggagcctcgatcacagggaaggtgattcgggaaatgaaccacaatgcagaccctccaccctctcctcccaggcagcaccctggcgacagccgcaactttcttcactcgtcagagctaatctctctaagagtgggattagctgtgtctgtgccctctcaccgctgggccatatgctcctgaatgacagctgtttgacagcctatgctgggggaacgtggtcttttcaacccaaatttgataaacatacatttcttctgtctgtcctactttgggccatctgtcagtgtggcatgatgccttcgcctggattggcaagatgctgacatcggaccaccaaggaaggctcaaggagaatgttgctgccatggggagtggggggtgaggcctcctcagggcccaggcgaagcatggcttgggctgtccaaccctcacttgcaggaagaagaacacctgagacctgtgttagctttcacagctagcttcgtccccgctcttggacaagagagattgttacaaagtgttgtacagcagtgcttctcaaccatgcatatgcttacagattgcctgaggatcttgttaagatgcagattccaattcagtggatcagggatgaggcccgagattctgcattcctaatgagctcccaggtgagggtgatgttaatgctgctggtcagaggaccataaaagcaaggttataaaggacatctgacttggggtcagaccatctggatcctatagacagcctcttgccaagggaatgctttgtaaacatgattcctgaagagagaaaacaaaacaaacaaacaaaacaaaacagaaaataagaggtcgagctattacgggtctcctgagtgagtgtcccgaacttctcaagctgttgtagctctcactcagtcacctaccatgcccaaacactgctaaatccaccagcccagaacaaacagcttaatagccatattacattttatggcatctaatacagattcagaagaggcaccgaatgcacaggaagttggaagaacaacactgggcatggtggctcacgcctgtaatcccagcattttgggaggctgaggcaggtggaacacctcaagtcaggagttcaagaccagcctgaccaacatggtgaaacccccacgtctactaaaaatacaaaaattagccaggcatggtggcacatgcctgtaattccagctactcaggaggctgaggcaggagaattgcttgaacccggggggtggaggttgccaagattgcgccactgcattccagcctgggcaacaagagtgaaactttgtctaaagaaaaaaaaaaggtgttagaagaacgatagctacaacttgtatctactgagcacctgcagaatgcaaagggcagatgaggcaggttctgggatgtgggaggagaggcagaggggccaggcactccaaaggagaagctccagagcccatagggtagaacctccctatttccggtgagtcccaggctctggaagaatcagttgagaggcaacctggaagtgcttcctttcaaggtggtaaggaaggaggtagaataatatgagcaatttcccaaattgactttggcaacccagaatttcggtggagatgtcggacggtgacatcaatctgcccaaattgcttttgaagatggagggctcaggatctcataactcttctttaactgttaaggaactaattaaatctgtagcatctctgttaactgagttttattatgttaatttcactgctggacaagctaagtcaagcaccggtagactgcactgtgggcttctggctcctgacgaaaggcgctaatgatatcttcaatgaacacagtgcctgtacccacagaatcccaagtgatttaccaacagtttcctgccaattcccacaaggctgaggcctggcggctgagtatcaccctgccggcctcgttcgatgaaacccttctaattcagagcatacgcacacaggtgtgtctgtgcaggtacacacatttgccttgtggcatagaacaaacacggaccacccgactaggtgaaggttaaaaaaatgtacaatttggaatgtgtttacatttttcttttgattgctgataattccttccttttagctgatatatgggccttaattagtggctctctgtatgggatcacagccatcccattggttctgtctaccttccctgcacttccccagcctgctccaggcccaggcacctgtatgtgtgctcacccaccccatccacagcagcaaagtttcactgcagccttggacatccttccaacaaccctgcaagcatgcagagctcatggggttgggatggcatggggcacctgcacatcttggccctgtcccactccaatgcatgatgctgcccaaactgacaaactcattaggagcaagacaagttacttggcttatcagggaagaggcagagtgtgaatgaaaacccctatcatttaactcctagtgttctagaataatgggatagaatgaagctcagaaatcttgaaactcttcatttctaccctctccttgcgaaagaagaaactatgcttggaagataaaagacactcagttgctgaagaacacctagagcagtgcattcataatttggaatctggtctcctatctgccaggtcagagttcctacagcaaacattcccaagtcaatacaatgtgtacttccagaaatttaaagccacacaaggcctggcctgtttggggacagttgggtttctccaggatagagacaagcctaaactctgtcctcctaggtagtgagctgacaggtcctggtagaagatcccccgcagccctccatcctctctatccccacagctgaaccctcagaccgtcatgagtgttgggcagatgagagcaactttgagaaatctgctcaggagccatgacccatagagacaaagacacatgctcagggaggccctccacatttctctcatgggggaaaaagccctaaacacaccccttctttttcttgctttcttttccacacaaaataaagcccccccccaaaaaaaaatccaaaaactctaagagcctctgaaacttggctgcccatacatttttctgaagcctgcttcttcacctcaaaacaaaagcaaaagggaaagaaaaaccaggccgaggaccttgtctacttctgcccttgcttcctgatggagcaaatccctcatgaattatgcactttcagctgctgccaccccaggccatccaggctctgccaaggtagccagctcctccccggctcctggtgtgatctcagccccaggaagggcatcggcactgtcttgatggaagaatgccgggtccagctgcaactcaccactgaccctcccaggtgagctctgcagagagatgcccacagccaggtgtctgtgcctggtcatcggttttcagcctagtttctggaggaagagaggaaccaagaatcagacaggagctagagtgggaggcgggggaaggagtaaaccaatcaccagaaggtggtgctatactttaagacagactagccagaaggggagaagcctccgtgagaaagattataacatttcagagagggagggtgtctaaagataaaatacagagcactgcaatgctatgcaatgaaacgaaatgacgtcagagctgaaaagactctaaaatatcattctagaataatctcatatcactggtgggaaaactgaggcccagagagacacagaggtttgcccaccattgtacagaccagaggaaaaactcggtctgtcgcctctttaggttctccaaaggctgcctgctttttggcaaagccgagattagagaataaaacacgaggattggctcacagtagagaaacatcaggttcaggaattgatgctccagtgaggcagaaggagccacagtcccttcccgggaacaatccacggaggcctcccagagcaaagccgaaactaccaaagagtcaatccagtgtccatcgccttggcagcatcactgctcagcctcatgagtctccacaggatggccaaattaaaactgcgggctatggccgggcgcggtggctcatgcctgtaatcccagcactttgggaggctgaggcgggtggatcacgaggtcaggagtttgagaccagcctggccaacatggtgaaaccccatctctactttaaaaatatacaaaaattagctgggcatggtggcacgcacctgtagtcccagctgctcaggaggctgaggcaggagaatcgcttgaatctgggaggcggaggttgcagtgagcagagatcacaccactgcactccagcctgggagacagagtaagactctgtctcaaaaacaaacaaacaaacaaaaaaaaaaaaaaacaaagcaaaacaaaaacaaccatgggcttcaccacttgctagctgtgggtattcctgtaacatctctgagccttgacatctccatcagtaaaatggcataaaaatatctccctctcagaatcacttctgagaattaaagacccttgtgcaaagtgtctagcacaatcctggcatatggtaagttcccatggcagaactttccctaccctttttgactgtgcaaggagaagccttctcctaagtatcatgcatgtggtctggaaatgccaagtgctctgcaggtggaagaacctgaccttatgacatggctcatcaccaaggaccccaatcatagaagttaaaggatgggttgcaggaggaggagtaagtataggggcagagttcatcccacagagtcaatggggagaaactgacatcactctcaggccttcctgcctgtgaaaagctcagttgcaaagaacaaattccctggcagaaccactgaatgcctacagacacctgcacgcacacacaactaacatacacatgcccagatcggcaaggagggcgtgatatggttgcctaagtgctgggtcaggagaccccagctttcatggtgggctcagatccagcaggaaaccacactgtgaacgccttcccacattcttttcaatcactgactctcactcagggtctgcaggagccagaaagcattatcaccatcccctccatagacaataggcccaagccctcgaagggcttcctcaggaccacatagcaaggcagcccactgagcaggtgagtctgctgggaagtggacaaggcccaggccccgcctcacttatcttcttggtttctcttctcgcctccccatgagaggcctgagcctcagttccctggctgagaggtgagagggtaagagagggtggaagaacataccctgcttgaggttgcagccactccatggccccctggctgctggaccagtccagccagtcccttgacctctgtctaggggaaatagccccagaatccctaaggggccactaatttagaacacattttacagagactgaacttttggggccatcttttagaacagcagtgatgaagagacagatattacctacaagggtggggggaaactgactcccatcccttcacatccaatactcaactattcattcatgggtttctgtgcctctacccacacctgtgccaggaatgctcgctgagtgctccctgtcattacaacttgctgataatgctgcaccctcattcaacatccagcctggctcctattatgcagtcagagaaatgatccctgaggaggagtctgtcatgtacatctgtgctgctgcaacacgtcactcacagtgggctgtttatgggggtcatgaagggtacagatgctggactgctgggctcccactctgattcaccacctgctagctcgcgtagccataggcaagcaatttcatcctccaggacttctgcttcctccatgattaattgaggataatggtggtctactttacaacccatgtaacatactgatagtagctagtttgtagcacctaataaattttaacgaagattatcggtgtttcttgtatgcattcatttgacatttgtagtttgcctactatgtgcagaagccattgagatccttcaacctcaggaacaagagctgtggcttccacactggaggactgaggaggaaacaagacaggccagtgtagacactaagcaaaggtgacccgctccttctcccttatccctgtcagaatgcttctcagactttcagtgctccacatatggggaacatttgtgaggtcatcgtagtttgtccttggcattctccagactctcctctctgtgccaactgcttcctctattcccgaagacacagagtcctcctgaacctgccgtgaccaatcttgttctttgttctagaaagaattctcttttatttctatcttgattttttggggaaaaaaaaaaaaaaggtctgcctcagcttcccaaagtgctgggattataggtatgggtgtgagccaccgcacccagctgaattctcctcttgattcatgctttcaaaaacccttagagtgtccccactgcatgacaatagcatggtaggttttggagaagaaatagagatggctgacacaggatccctgcccttgcccttgaaaagccaacatcttactatacgttctttttttttttttttttttttttttttttttgagatggacctcactctgtctccaggctggagtgcagtggcattatctcagctcattgcaacctccgcctcctgggttcaagtgattctcatgcctcagcctcccgagtaactggtattacaggcatgcgccaccatgcccggctaatttttgtatttttagtagagacagagtttcactatgttgagcaggctggtcttgaactcctgacctcaactgatccacccaccttggcctctcaaagtgctgggattacaggtgtgagccactgtgcctggccctgctatacatccttttttctcaaaaggtatttattggacacttactaggtgtcaggcacatgcatagttgtgaacaagatggaccgagtgtctttcctgctgaagcttgcaatcaagtggggaacaatctgtaagcaaagcatgcaattgtagtgagaccagaatgcagggcttcatgggagtgcacaggagacaacagaaaataatgacaacgggagattaaagttgaggagaagggaggatggaggctgctggaacacgtagcaagaggccagctcttgttgaggccagggctcaggaaagcttcagagataaaagaaacaacaaagcatcggtgtcgaaatcacagatcctagaatcaggcatctggcttcaaataccaggttggacactcacctggctgatagagttaacttgggcaaggattcgacctttctaagcctctgttttcacatctgctaaaatgggaataacaccagtccttaaagtacagcactgaggtggggactggaggagctgatccatggggaataagcagcactatgcctgttgacacatagatgggctcgatttgagtttgtccttgttgctctcactgagtgagatgtgagctggaattagggattgcctcgaggtgattatggagaaaagcatcttgtgctctgccctgagtggaggccctggacatggacaagtcatttcctttccctgggccttaattttcccatctatgaaaaaaatgggtctgacgacttatcactgagttttctttccactgtaaaatgctatgacggggccagacatgatggctcatgcctgtaatccagcactttggaaggccaaggtgggcagatcacttgaggtcaggagtttgagaccagcctggccaacatggtgaaaccccgtctctactaaaaatacaagttagctgagcatagtggtgggggcctgtaatcccagctactcgggaggctgaggcagaagaatcacttgaactcaggaagcagaggcttcagtgagccgaaatcacaccacagcactccagcctgggggacagagcaagactccgtctcaaaaaaaaaaaaaaaaaagaaaaagaaatgctatgactgttttgctctgaccttttgaagtctatgaccacacagaataatcacccttttacatagcatcttaatacctatgttcaggcagaccatggacaaaaccacatccttggtaatggcaaggatgccaatgtaaagatgtgacgcaacttggaggtggtgctgtattctgcataagccagtccccgatgctggtgaactctcctgtctatttatgttcagtctcagtctgaatcttcacagccaactcattcaccactaccactacaggtgcccaagagaagtgaagacagactgtcataacatgtattctgattcaagaggcatgtggtttcaatatgccccattgtgttcatgacattgtggctgatactttattgtctgcctttcaacagaatcctttctctagagtttgagccaagtggccaaaaccacacaaattcgactggatgttgaatttttgccctctggcttctgcatggttttaggaaaaggcttttcttttgttttctatcttgttaaatagcatcaatatctacctaagacagaacctgggagtcattctagacttctggtcctcacgttcaatagttaggcaataacctaacacaagaaactctacctccacatcatctttcagatgagtctagtgagttttagcctcattgctacatcctggctgagacactcatcatgtccttgctcagatttttgcaataaagttgatttactattctccactgactccagtgtctctcccttttcaggcaagaacttcctaaaatgtgtgtgaatgaccatttccctccactacctaacacttttcatttatattttttattttttttatgagatggagtctcactctgtctcccaggctggagtgcagtggcatgatctcggctcactgcaacctctgcctcctgggttcaagtgagtctcctgcctcagcctcccgagtacctgggattacaggcgtgcaccaaaatataaatattttttgtatttttagtagagatgaggttttgccatgttggccaggctggtcttgaactcttgacctcaagtgatctgcccacctcagcctcccaaagtgctgggattataggcgtgagccaccgcacccagccctaacacttttcaactagctccccatgccctacaccagtggtttccaaactggagcgtgcatcagagccatgtggaggactggttaaaacacagattggtgagccttacacccagagtttctgactcagtcagtctaggacggggtctggaagtttgcatttgtaacaagttgctgggtgatgctgatactgcttttccagggaccaccctttaaggactactgcactactctacaagacataaaccccttggcctggtgtgcaagattcttgacaatctgtacccagtagaattttttttatgttattttaagttatgtcacgcacttatgcatctaatatctgtggctaacaaagccaaaactccgtgtagaacagagactttctagtttgagcagagaatctagactgtagctgtaaagctcacacccttacgaggcaagtggcagagatcaggcagaattcaacgggcagcccaggactcatccacccagccagagtctggcaagcattggcacacaagttttgtaactgtgcttcgatgtagatgccatccaaaatgctgtcttcatctgatgccttgaatccatgtggcaaaatacacaccacagccaactcatgatttaagccaaacataaacaagatctaaaacaaaatagggtggacagaagccacatggaaaggtagtttaaggttatgaaacctggcttgaaaaccacatgttgtctgaacttgtaaacatcaaagagccagactggaaaactgtaataatagaataataattaataataataaaatcatgccttcctcactgttaccccaggatataaaaccattaaaaaaattaagatgtgataggcctattaagccatttactctgtcccctgctagagaagattggctccatttgtaggatcttaaaaaccttctgttccagggaggactccagatgcctagaagtctggggaaacctcagaaaaggtaacattacaaaaacccagctaactggctatagagcagccttcatttctcctgctttggaattctgggctgctgttatacaaaaacgaggccttttcccatctccttggaaggaaaagggaagcgctgatctccacccttacagagttgtcttcagctgccacctccaggggaattttgtggaggacggtgactgtgatcctgatgaccacacatgggttcccagagcaggacccctgagatggagttgctaacactgaccgtccttaaagaattgaccagaatttatcttgaccatttggccaacttgtgcgcacttgcctgtttctttcagcgctcataatgaaaacaacttgaaaattcagagttaatcatgaaataaattattcttgtataatcaacgtgatggcaatactcaaatcattcattcttttgaggcaaattttttaaaagttgggtaaatattaatttatctttatccttcttaggaataacttccttcctgccccccagaacaacaacaaaaaccatctggcagatggaatcattcaataatgctttggaataaagctgattttataatatttatttgatataaatgtctatcttttctgctatcataatatgtattttcgtatattatctcgtgtatcataaaatgagctctttgctaactcaatccgtgatttgctgacttgtgagaagggtttcttgcaacttatatcttaatcatcttcacactttttgagtagcttttggtcaaagggatttatagcattttaagtttctcagggaatcattgtaatttctttttagagctgtgccatccaatatggtagtcactagccacacatggcaatttaagcttaagtgtaagtaaaattaaataaagcaagaaaggaaatcccttagtcacacacctagggagatattaaatattccaaagccacatgtagttagtgactaccatattggatattgcagatgtagaaaatatttattatcacagaaagttatattcctcagctgtgtttcaaaagtttaccttcttcacaaaagtcattttgttcttttacttaaaaataaatttggctcatgcctgtaatcccagcactttgggaggccgaggcaggcagatcacctgaggtcaggggttcgagaccagcctggccaacatggtgaaaaccccatctctactaaaaatacaaaaattagctgggtgtagtggcgtgcatctgtaatcccagctactcgggaggctgaggcaggagaatcacttgagccgaggaggcagaagttgcagtgagctgagattgtgccactggactccagcctgccgacagagcaagactccacctcaaaaaataataataaataaataaataaataaataaataaataaataaataaatttgggccagtcacagtggctaatacctgtaatcttggcactttgggaggctgaggcaagagaatcacttgagcccatgggttcaagaccagcctgggatatgtggcaaaaccatctctacaaaaaatttaaaaattagtcaggcatggtggcacacacctgtaatcccagctactcaggaggctgaggtgggaggatcacttgagtccaggaagtcatggctgtagtgagccaagattgcaccactgcactccagcctgggtgacagagtgagaccctatctcaacaacaaaacaaaacaaaagattttgttctattctgaggtttatcccatgatccttgcctctcccatcccacacctctgctgtcagaacccaccttccctatcaacttctcatcctctcctccacaaatacagctacttcttcacttatgcctgtagacctgggcctatccaatcctgagaactatccctatcctggcaatcatacaaaacagttgctaaaatcaattaacaattcagaaccagactcaaattccaacactgtaatgattggtgtcttgatcccattaatgtttttgaacattttctttcctttgtccttgaatgcttttctgtcccctacttaccagaatttctatcaccctgcctgctctgacctcaaatagctcccagctgcaaatctttgagaactgctctatcctttaggcccattcttggtgtctcttggcctatggctggccatgggttcagtgtcacataggaagatctggaaaatgcatatccaggctatgagtgctcactagttttcatctcaaaggtcctatgtctgctcaaattagaagatggcaaagtagaaaggacactactttggggtacaaaaatggaattctgaccccatttttccatttctagctctgtgaatttggggcaagctacaaaacatctctgagcctccttggcctcacctgggggataataatagcaaccatgggcttaattgaggattatatgatataggatattaaacagccagctcagcggtgagtttatataaatctagatactcaataaaatcattccctttcaatgtttctctttaaaaatatatgaattagtggtaatagaataatgcagcgggtagttggtgttttctttaagctgttaaaagacacagctcttaaaagtaactatttaattaacatcttgcttttgttcatattactacaaaagtctgtgttagccatgctctgcatggaaaacaatcctttaaaaggccagcactttcagagctaacttcaaattagtgaggcacacgtactctctgtccactctaagtttctaatcactaaggttattcctgtcccaaacttctccacgaacacaaaagcagaacaggcagcatggcgtggtgaggaacgagccaactgcctgaggtgaaatcttgacttgagcccttcctgattgcagattaaataaaataacactctagaatggcatctggcatcaggcagtgctttctccctaaatctgtgtatgaaattattctcatactccaaagaccatgggaaactcacctgaaatattgtgatcactgggaaaaatattcagacgcaggcttttggcaattcttaccaataatggtaaggatatattgatcagttgtttgggccaggccctgtgcaaagtgctttagctgcatccttccatttctttaagcttcaacctatgagcccttgggcaaattccccaatgagcccagagcaaaaccagaattcagtacaggaaaatctgactctaaaatccagactcttaacttcagtgtgtttctgcgtctcccagtaggcacgtgccgtgcggaggcctcctgacctaggagtgacgctgaagcctcacatactgggttcagttctggttccacaacttgctatctctgtcagcttgcaatttcatctgagtaatctgtttcctaatatgtaaaataaggatgatactacaatgttgggggggttcctatgacaatgtagtgaaatgaagtgtgcaaagcacctagccacacagtaggcatacagcaaatagaaaccgtctgaacaaagaactagcgtgcccatgatctgcagaggaaagtaaattactttttcaccccgggagctgacaatggtctaagttctcattggagcagttaagtgggtaattgctttagcaaaagggggaactaattataaaagtggaagtcctgggaaaagcaggctttgtatgttgctgcctggcttggtgtcatcagttgtctctaggcctccagtttccaacctgctgggttctctctggaggttctgaggcatttaagagaaagagaggccatacattttttaaaactgctctttgtgaactgcaacttttgcaacaactcaagtccctgaaaatctttgtgctgatatttcttgaggttgcctgttttgccaagatgcctgctcttaaaagtaaagtcccacaaaatgatttttatgtttttggccatattttcacttcctgggctctgtaattactccaagtggtgcctgaatctactcaaaaggattccatagaccaggagacacgccagaatgctcccaccctacaagctgctctccctcccttggacttccaccctccaatgtaacttccagagaaatagctccagtgatctttccagacaatcaaatgccataaacccattgcttaagtggttctccattgtctatagggtctataatacagggtccagctctttccataatctggacctaaccatgacctctcccactgatatggctctcaacccctctagacctcttataatgaacttctgtagtttctgaaaggtttcatgttttctgcctgtgtgctttggcccacagtcttctctttgcctggacactctcccttccccatttgcttcttgctaagtccaaacaattaatgccttgacactcagctcagtaccaccttgaggtagattggagcttcctcctcggtgttcccacagtgacttgtccccttttttatagctctaatggcaccaactgtgaattgattctgcctccccaatgagactacaagaccttcaaagttaggaatcctgtgtcatatcataagtgtagggtcatgtgcagaaaaggtgcccaataaatatttggagaaggaagggaagggaaagggaaaggagaggaagagagaggcgaggaggagggtgaagagaggagatgccaaatattaattacaaacagaagccgaagactcaactctgacatctttggcttgagcagcccctcctggctcctcctggcaccagatgttttggagcatggacccccaggactcacctggcgcacatgcaggttaggctttccaacttgaccagcacagtctggattccactattttacctgtgctcatacagctttctgccttttgaaacaaagtcatggctagaacatcagcatccaaattcttggcaacctgctcacaccaagcacaaccgcagtgggaggggtcacaagactgctgcacctgtaatcccatggacagctggcattgtcttctgaatctatggggttgaaaatattcaggcaccccagaaacttcttactggttagtcctcaatagaccttccctaaggatttacccttgctcttgttgcttttattaagtgctatctctactctttctcactctgttccctggtgttcatatccatttatcccccaagaatggctgtagataaggccatctcaccaattccatgtttcccaatgtctccaaaaagcccatggaatccttgtcttttgggagaatattaaaggatgcctggcataggaaaaaatcgttagcttagttgtcagtagaacctgggtttgcttttgaactcccgcaggtactgggcaagtaacttgattgctctgagtcagtttccttgtgtataacatgggagggcaggagtgttaagagtgcctctttcatagaactgctgtaatgattgggtatcatctgagcagagcttttcacacatggtaggtactcaaccaactgtagctaaaacaataataattatttaaaattttaacctgaaataatttaaaataataattaaataattaagccccactgtacaaaccataactaacaaaaataaccaatgtgaagaagttacaaagattcaacaactctgacagtctgtttgtaatcactaatctcaaatttgtcactactccccaagaaggttttgaatgctctcttagcttgctatggtcctcctagatcttcatcctcaaatctcatcaaaccatccatcctcagtctcttatccttcattagggttgaagaaccccttcatccatagaactccctctttcttgcatatagtgctttaagataccactgaatatatatttatgcacatacacaccattgaataagcttttatgtaattgatatttgattttgcaataatatccaagtctctagtaaattatagtggaccagatgttaaaagccatatgacgtctacagaaagggcaaaagtaaaatggggaagggagtagtattgtaaggatattgagaaaatcaaagttttttttctattgtttcacccaacaatcaacacagaatatttctcctctggacaccaagtgtgtggagatttctccccaccagcaaccaatcaatcaattgtgcagcagacgccagtcaggtgtcctctaactcagttcaatcctgactctgtttacctggagatagcatcagatctcacagcttgagggctcagtctcacaagactatcccccacttccaatgaaaattgtaagactcaggtaagactcacgttgtgacctgtacttctgactgactggctataattgagactcccaccccttcctcttcttcaattaatttgctagagcacagaactcagagaaacacttacttatatatgctggtgtaatataaagatacaggtgaagacacagatagggtgaggtacgggaaggaactgggagcttccatgccctccctagacacatcacctctaagagacctcctatcagctatcaggaagttctcaaaacccaatcgttttgggttcttatggaggcctgaattgtgtagtctagattgattaaaccattggccatcagccaatgaatctttagtctctctcccttccctggtggttggggggtgtgactgaaagtcccaacgctctaatcctgccttggtcttaccagtaaccaacctctatcctgaagctacctaggggctgccaccaccaatcaacttattagcatacaaaaagacactatcactttggagagtcgaaggattttaggacttttaggccaggaaactggatgaagacaaaatagatattttacaatgtcccaagaacataaccaccaagaaggccagccaacattcagaaaggagggaggtgaaacaccagctatggagatagcactctggagccatttagcaccagggcaagaggtaagaccccctccacactcacatacccacacaccaccaccacaaagataacagtaacagtatacagcagcccagtgaaataattgatgtgtgtgacaactaccaggcaggtgtggcacatggcatgtccaggctaatgagggtcctttgagtttctcaagtccaaactttcattgttcagtgaacagattaagacccaggaaggttaacagactctcgttttttccttccaaaagtaaaatcccctagaaaatggtaaacttggtttaattatcttgcttattgtgtataatgatgattgtgataacatctacatgtgttaactgcttgctataagccaggctttgttctacttgcattaacttatttcatattcaaaataacccttagaggtagggatgattatcagttccagggagtgaaactgtggcagagagaagtcaaacaactcccccaagttaacatgtctaataagggatggcacgtggagaggatgtgtgttattgattcttagaataacttctattaaaaatcttaaaacatagataatatttgcacttttgttatctgaaaaatcaatttatatgatacatcagtttccctaaagataataatgatacgctgatctattatccttctctatatttgattgataatccctctcatcaaaccaaacatgtgttgcttctctgcaggagtgagccttcttgctctgcctaactctgcctgagaagcagtaattcagtttcaatctgaaattatttccatcctgtttaattcaatagccattaattccctgacttcactccctaacccctgaacatctgcttcttccaatgcctgtttttagctcatcggtgggtttgatggcctctgttaagcacttacttctcacatacttggctaaaatctttaaagcaaatgatgatcagagttttttttttcctgaaatcttaagacatattctcagctcactggaaaatagataacaggatttcactttaaacttttaagccaagagataaggctggaggttataaattttgattattcaatattcacacctttttgctggctgcctaatattctctcttcatctttaaagactcattctgaaagagtcacctctaatgggaggcatcccagactgcccattctgggtcaggagttcctccttgactcttccacaccctgtgccttattttctgctatacagtggtccccccgtatccttgagagatgggttctatgacccccagcagatacccaaatccaaagatgctcaagtcccagatagaaagtggcataacatttgcaaagaaactaacgcaatgctcccctgtactttgtcatctctagattacttataatacctaaaacgttgtaaatgctatataaatagttgtcatactatattttttatttgttttatttgtggtcttattgttttttttttttctaatattttctatctgtggttggttggattcatggatgcagcacccagggaaggtctactgcacttttttttttttaagaccaaacaagatcgggcatggtggctcacgcctgtaatctcagcactttgtgatgccaggacgagtggatcgcttgagtccaggagtttaacgccagcctgggaaacatgatgaaaccccatctctacaaaaaaatataaaacttagccgggcaaggtggtgcatgcttgtagtcccagctactcaggaggctgaggtgggaggatcaattaagcacaggaggtcaaggctgcagtgagccgtgattgtgctactgcattctaacccgggcaacaaagtgagtcaagtctcaaaacaaaacaaaactaaagaccaaataggatcacgacttacttattatttcacaacttaattttttaaaataatctcaactttcattttcgattcggggagtacatatgcagtttgttacctgggtatattgtatggtttggggacaagggttgaaaaactacctatcaggtactatgctcagtacttgagtgatgggatcaaccacatgggatttaccacacaattaaattttctttttctttctttttttttttttcttttttttgagacacacttttgctcttgttgcccaggctggagtgcaatggtgccatcttggttcactacaacctctgcctcccaggtacaagcaattctcctgtctcagcctcccaagtagctgggattacaggcatgcaccaccacccccagctaatttttgtattttttagtagagatagggtttcaccatcttggccagtctggtctcgaactcctgacctcaagtgatccgcccaccttggcctcccaaagtgctgagattacaggcgtgagccaccacacctggctacactgttaaattttcaatgcgtctcccttgctagactttaagcctcttaatgacaatgattatctatttttttacctctttttctcccaggcttaacagagtgtctggcatacagttaatattaaatgtttatgagatttcatgaattaataaacttcaaatttcaggaacatagaatttgggtcataagctccaactatccttcctggtttccagcttccacctctaaattgtgcatagtaagatgcatcatgcaggcattgtgggatataagtgcaatcacaagtataaagtgccttgtaaatgataagttccataaagtaataactattaatgttaacagtattatttattgctcaacagtctgtgattgattaactgaattaattgattgatcaattagtaactaatttattagaaaacacatgatttttacacgttggtaccatttaacccattcccgtgcttttcctttaaagtatccaagtgaaagcaagaaagttccagcatccggaggtttccaaatatccaagtgctgggcagtataagcctgtgaggtttggatgtttggctaggagcctcatctgtctctaggaggttttcctccatctcatcttggtttttgtaaagcagtaggttgagacacagagacagagcaaaactctgcacatctgaacaccagggtgcaggcacagccctgtcctcaggcaggagggactctgagaagactagatagcccagagcactggcctggtttgactgcagctccaaagaaatggcagtcacaagattgcagctcatggatttgaaatatgtctttgatgtgacctcaccacagccccttgcacacccctcctttagactcagagtcaggaagcaaccacgaagatacagggaggaactggaagtgtggaaagagccaggagatttgcatcttgggataactctggcactccacgctggcatatgtgtaagcaagccattcccctttcctcttttttcatctataaaatgagagcgtgactctctcacctacaaatgagagatcagaggtggcgatgaccagcatgcatgtatgcttcccctgctgaggcctctggggataatggccaattcacctctctattcttttccactggctttgagatgttggcctcagagtattcttcaacaccaaattccaggcaactgctcaatccagcaaagttgtcttgggagatgaaacctattggtcacctctggtcactagaagacttctaagtttcttcgagttgtaggattcagagccttctcacggataaacatctaaaccaatctgtaacatgtaaaggtcgtgcaacctcctcatgcttctatgtgagcatagatgaaccccatgtcaatcaaatgctttctctaagtattaatattatgtgccttgaaatgcttacttggcaaatctgctcttccaggaccctggaaacaaggcccccaaatcaatctcttgaatgtacctagaaatgggtttacttgtgctttgttctgtgaacacactcaaaaacaactactactgtagcaaaggcttggatagaaaaggctattccaattgccctgtgtacagtcgactccaaacttcttttaaaaatttagtttgttaaaaaaaaaaaatctgtaaagacaaatatttttcctaagaggaaatatagaaaactgatcaacacaaggacaaaatgtttttctcactaataatcaaagaaagcaaattaaagttacccatgagatatcatttcattaccaaaaaaagttactaacatttttaagaacttgataacccccaatgctgacaaaattaggtgaaactagtaaacatatactagtattgacattataaattgactcaacccttttggaaatagcacgtagcaaaaatcacagaggtagtcatgtcttttatgacattttttcttttctgaaagtgtatattaaagatacaatttattacaatttagctacctttgggaaaatagcaaatattttaaatatttcccaaacagaagttggccatccgtatatatggatattgtgaagccatcaaaaatagtaatttttaagcaatcttaaagtattcctagtgtaatactaagaataaaaatcaacacacaaaatgtcacatttatcatgattagagttttgtaaaggtatgcatatgtatgaacagaaaccaacattttcaagaaaaataaaaaatgattgggttagactgggatttgttctttttcttttaaaacccgttcttctattttttttttttttcattttttaaccaaaaaggtcagctagctctatttgatgttgctatgcactctctcctctgtctaaggggggattgtgaacatcactgtgaaagatgccatcgtgggaagccaaggatccgggtttcatgcacatgattgctggatgcctggacggaaagtctctgggttcgccttcagatgctttttgctgttcagggaattgtgaagcaaataccaaaagttgcaacacgccaagctgcaagataaatattgttttggacttgggggaagaaaaagggaggagggcagaaataatcttattttagatcttgtcggttctcaaggtaacacacaattgatacacacttggccagcggagaacagaacactcattaaacctccacattttggcgccatcataaggctggttttgaccacctcggagcaagagcctcagcattcacagcagataattctgacttgaggacggggttctagacactctttgattcaaaaacaataaatagcaattaacttaggcaattaatttgccaatcttccgaccaactggaaactgcgatttagagagcaatttggtatttcggtgcaagttaacctttcggaggtgtttgcctccgcctaactactgaccacccctctttaaaattcaactgcatctcaggaaacggggaactttccaagcacagaacttccccctggactcttattcactagcttgtcaatcagatgttcaaccttcctttaaagtttaagccttattaacctacacactggatttcactggtgataggccattgcagacaaaaagaaacccctctcaggttccaaatcctgtcgtcctggttcagctccccacaaattccctggaagggatgaaaggatcactcacatgtctgatccttcaaacacaagcaatgagaggacggtgttagaaaaaaaaaaaagtttgtggaggccctgctgattgagacatcttggagaaaaaacagctctgctcgtaaccaaattctgcccggagcaaacgggagtacccagcctcagtcttcacagaccctgtcgcaagcatgctgtgcacaccatatgcaagatccgaaccaaacatatagttggcaaaggtactggtttcagagacgggcatgccagggttgcccagatactggtacaaagtcagctccagagttgggagtgtctagtcgagaagattctaactgaaaagccagtagaattattcatggaggcagcttggatatcaaaaatatggtctctatgactggggcaaaggaaaaggcaatcggagacctctctcatcctgccaccatccccagggatttcacatcctttgatttctttctctttgttccatcacagcagaactttaccttgattctgaacagtttttttcatgcatttccataaggcttggcacctctgtcactttccacactcactagcttaaaaacaaaacaatatgcatgtccctaatgagtggaaactaactggaagacattgaaatgcgtggtgttatagacagggaaatacagaaataaggatccatttgtcacttttcagagccctgctcctccccaaggccaggtgcagcaattggagaggaagggcactcagactttcactatgttgtcatgatatttattttacctgccttttagaatttcagaaccaactacattcctgggattcctagttatcctaggaataggcatgaacttggagggagctattggaagcctattcttgccccagacccactcactgggtcacaggcactggagctctcagttggcaggcttggatgctcttccaggcagatggaacaatggagggaccccttctccccgaaggacttccaaggcctcagaactccactcccatgccaaacccagggcaggaggacaggggaaaagcagagccgcttgcattttattctattctatttgttccttctctttgactctattttaagtcacatttattgggcaactacaatttttctttcttttttttttttggacacagagtcttgctccgtcacccaggctggagtgcagtcacatgatctcagctcactgcaacctcagcctccagggttcaagcaatcctcctgcctcagcctcctgagtagctgggactacaggcacatgccactgcatccggttaatttttgtacttttagtagggacaaggtttcattcttttggccaggctggtcttgaactcctgatctcaggtgatccacttgcctcggcctccaaaagtgctcagattacaggcatgagccaccttgactggctcaaaaatttttttaaaaggtggcagtggctgggaggtgtcaaaaaacaaattcgtgctgctgcatctcctaaccagtagcccatgagcatgaatggcagcccgaacctgatcacactaaatagcatctgtagccctgatgagcaagctgagggtaccatggtgggagaggccaagggcagccaagatgccccagtctgacagcaccagttattaacattgaaatgcctcagtactgaatggcaataaatgatgttgccctgggcctcccaagtctcttgattggtgggcgctaggtgacacagatagtaaaagatgtattatattactgctagtcaaacccacaggatccatcaactcccctagtttaggccctgtttgttcctctccccatataaccaaggcccaagatgcctagataggggagcttcctgtggtttatgactggaagaaaatctccacaattgctggtaattaactctggaattgcatggtgaatctttgttaaacacccctcttccaaaagtcaggaggttgaataaatattaaaacattatacttttatcaggcataaaaagcagacttcattcttgtaacctctattgaaggtgccatagtgatttatttttaaggggaaaaaaacaacaaaaaacaagtcacattttctgttgcaagaaacacggctttcagatagactattaattagttactctatagtccctccctttagtttttaaagtaaatagtgaaaatgagccacaacaaaagaaagactattatgatttattttagtgcttattgaaggcacgacagacatcatggattttttttttcaaagagaagtttattaaaaaaagaggaagaaaaaattttcactctaaggttgcacatgtcgctagcttatgatgtcatttccagaccatggggtcacacaagaattatttgtatggatgattggaaagccattagagagaacacaaagaccaaagactttaagtattttttttcaaaaagcccctggcacagccccactttctcgcccgcccattcgatgtccttttgaggtagccaagtccaacaaggcatgaagaaaatgattccctagctctagtgactcctcctgtccaaagcccagagcttggcatggtgggttggcatgagagctgcaagggcagtaggcgcactggtgggaattacacagagcatgtgaaggtcaaggccgcagctgtccttccactctgcaggctccgtgttatcagggtaatttaccagcaggtgaaatttctcactctcatccagagccagccatgttcctccaaggacacctttgcaggaaagtgtactgagttatgagcactcagggtcaacacaggggaggtgctgacatggcagagatgaacagaggagattaggtgtgactttctaggattagctgttagtcactctcatcgggaatctacccctggcagtatgacctctcagcttccacagttatataaaccaactgctcaatagaactaactgggtaattcaaaatattgttggataaaggaggcagcctgatttagcaggaaaagcaaaaggttttgaagtcaaacttaaaagtcatgagctgtctgactttagactctatgaactttattttatttacctgcataacagggacagtacccccatgagtgaatagctctgtaactttagaggtggacaaggcctttgtaatcacaaaatcaaagcattgaaacataaatggaagatgaaggtgactgtgcagtcttcaaaaaatgtaaagaaattaaaagaaaatgccaaattagaaaaatgtttggcaactttatatgtacataatggattcatatttttaatatagagatcacttgtaagtcaataataaaaacaataagcaaaaaaaaattttcaatgagcaacagacataaaaacacattcataaaagatatataaatgaccaataagcatgtgagaaaagttcaacctcgctaagtatcaaaatattataaattataccaaagtaagagtccatatttggcctatcaaattaaaaaaaaaatgttttaaataccaaggttaggctggggtggaagaaaatgtatattatcctgtactgtaggtggaagtgtaaattggcataaccttattgggaactatttgaaagttctagagatgctcatactctttaaccaaacagttccactcttgaggattgatcttaaggaaataattacggatgtgttaatgatttagctaaaaggatgtttgctgcagtgctgtttgtaatagcaaatatttagaaacacaacctaactattcagcattcattcaagtaagtcattcaacaaatatttaccaagtacttagtaaactgtggtagaccaagtaaaccaagtaaatcatggcacttcaatgtaataaaatactctatagcattaaaatgagatagaatatttaatgacagaagaaaaggtggccataatatattgttagcaaaataaggttaaaaaaggatatagaatataattgcatttggggagaaatattaatctatattttcataacattttggaaataataataaggatttttaaagtagttattgctgggtgatgggatatggttgtttaaatttcctgaattttactttctctgcattacaactttttctcttaccatgaattgttttatgattttttaaagtcactaatttattaaaagcatgtaccttgtgttttaaagatcaaataagaaaagtgtctggtacataatgagtgcccctgcaaacatttaatttgtctatctgtttatggattattccagtaccttcagtgactaacctgggaactagctcatttgggtctgagctcaagcttccagtgaggaattagatctttgtgaatgacatccttgaatacacagtctgtggagtcattcaagcagttcacaaatatgccagttctctcatttgtgaaggactgcccggctttgctgctctttttgttccattctttgttttattgctagtgtacttgtatctctgtaatagctttaccttttctctgtttctttcttgagttctgccagcttgtttttaatctccttgtgttgactttaatctagtctttcaactctcaagtttcttctttgagctttaaaaaaaataataaaatgaatattgtgtataatgttttggtaactttagggagttgtttgaactttgtttccttagatcataatgtgttctccatgtgcgttttctggtacccctatcctcttttctctttgcagtatttatgcaagggttgtatgttgggctctttcttcacgtcctttatctttaaatatggccaaatactgactaagagtttgtgagagcgcaatggaagtgaactaaatcaatatgcagttttgcattagatttgctacctctccatctgttcacgaaatctatgacttcctttacttttggagagtctctgcccacgactttggtgcttaggaggttggttcagctcacctaaatgccttttaggatagtccttctcaaggtataaaatgcatactagtcccctggagaccttgctaagatgtgggttctgattcatcgggtctgaggtgtgctctgaagttctgcatttctaacaagctcccaggcaggactaatgctgtgggtcctcaaagcacactttgaattagcaaggtgttgacataggaatgcgtgcaactttagctccttggcctccggcatctgcctcatctaggagactggtaagagagaacggatttgctgtgtctctatagtgtcttcttcagactcacttgccctgaagtttctagagggatatgttccttgctctagaggtctgcccactgtcttaggccatgtggctgtcatcagagaaccactggataagactcttaaggccctgattgttacttctagaaaaatgtgttctattctcatggtctgaaaagaaatgtgagcatgtcagatttgtacctcattttggtgcagatttcacagtatttggctagcacacttcatagcttgtggtttgcggttatagctgggtttttttttttttttttttttggtcttagtgaaaataaagttttatttgttaatttttctgtttttcattctctcttctggatttcaaggaaggaaaggggaaaaaaagaagcttctgcatctttaagtggaaatcagactgcaacttttggtgaatttccccaggtaatcagtttcatggagccttgccagaaggcggctctggaggaaagagttgaactaggcaggcctccccctcagctggtccttcagctgtgcctgccaatcctgttctctgcttcctggccccctctcctattcttctcagcaactttccaactgtattgctttccccaggcctcctccaccctttctgcatcttctcggaagaccttgacttttatttcaaagagaaaatttagcctctccagcacccacaaggtctctcaattttcattcccttcatgataaacttaaacacagttgattctcatgattcacaaattttgtatttgtaaattcacctactcagtaagatttatttgtaacccctccaaataaatactcacagtgcttttgcagtcatccctggacacacacaaagtggtaaaaagaatttgagtctccaacactcatgtccaccgcccctgccaggtggagtgacgtggtactctgccttctcacgtggctcaggttgatgcaaaagtaattgcagtttcagactgtgagttttaaatcattataactaggctcaaacacatctttattaatcaaaataggaaccatgacaatcagcacatttttgccaatgagaaataagtttgtttattcctgtagcataaaaatctatgcttcgggattcaacaaacacttggaaagcattttctgcatcctgctggttgtggaagtgttttccctgcaaaaagttgtcaagatgcttgaagaaggggtagtcaattggctagaggtcgggtaaatatggcagatgaggcaaaactttgtaccccaattcattcaactttcgaagcattggttgagagacgtgtggtcaggtgttgtcatggggaagaattgggcccttttggttgaccaatgctggctgtaggcattgcagttttcagtgtatctcatcaatttgcttagcatacttctcagatgtaatggtttcaccaggattcagaaagctatagtggatcagactggcagcagaccaccaaacagtgatgatgactttttttggtgcaaatttgcctttgggaagtgtttcggagcttcttctctgtccagccactgagctcgtcgtcaacgattgttgtataaagtccactttttgttgcatgtcacaatctgattgagaaatggttcactgttgcatagaataagagaagatgacacttcaaaatgaggatgtttttcatttttgctctgcatatgaggcacccacttatcaagctttttctccatttcaatttgcttcaaatgtcaaatgatcatagaatagttgatgttgagttcttcggcaacttctcacatagttgtgagaggatcagcattgatgattgctttcaattggttgttgtcaacttccaatggtcagccactacactcctcatcttcaaggctctcatatcttttgcaaaacttcttgaaccatcaccacactgtacattcattagcagttcctggaccaaatgcattattgatgttgcaagttgtcaccactgttttacaacccattttgaactcaaataagaaaatgactcaaatttgctctttgtctaacaccatttccatagtctaaaataaatacaaaatatacagcaagtaataagtcattagcaaaaaaaaagaaagaattgcacattaaaatgatgtataacataaccacatttatttaagaatgtattccaataacaaatggcaaatttcagtaatgcaaaaactgcaattacatttacacccacctaacactataaacacgtgtcgattttgtgggtcatttagtatcatgttttttacattttttgtgctcttttttggagatttcactgtttagaatggcctccaaatacaatgctgaagtgtcatctactatttctaagcacaagggggctgccatgtgccttatggagaaaatgcatgtgttaggtaagttcagtcaggcatgagtcatagtgctgttggccctgagtttgatgttagcaaatcaacaatatatattaaatacggcatctttaaacagcagcacacataaaataagattacgtattaattgattaacaaaaatgctgtgacagaggctcatgggaaccttatcctgtgtttctcctaggagcaatgattgcagtatttactaagtcagtgttcttcaaggtgaatgtagaacaaaactgctgcaaataatgagaatcagtgatacagctttgacctttctcactttttctcatctcaagactcagaaccatcctctcccctgtgtcctcaaccccatcccttcctcaagccttcactccatcagttatctccatgttctatgtttttcacttccctctcccctgtttccatcaacttacatgtcaactgaagaatgatgaggttcaggaatttggaaaggagagctttatttctcacaaacaattgcagcctgtagtgtggccattctgacaggctgggaaatgtagcctccggccagaaaccagaaacaattcaagggtaggaagaataaaaaagggatttatgctgagtacagtggtcaaatatatatacatattcaataagctatgggaggagtcatgagtatttatgagaggagaaacacactcatgcacaattgagcctcatgcctctcccttgggcccatgttcaaaaaatggtggcgccagcatgatctgaggatagagttttcagccctctgatgtcaaaaagtgaagcagaggacacaaaatcctctttgcacatcctccatagactggccagacccacttcatggtcatggtcggtggtctcttatcaggaagggatgctgggtgttgtgctgaaagggaggggcagcatcaggaagtcaattgctatcaggggtagagtctttccaaagatttgatttattttcctcccttagggaagaacacctaatggtgattagccagggagggagcataatgaggcaggttcaacctcttttcctgtcgtggccgggaactcagtttttaaaatttctctggggtcccttcccttggtcaagaaggggtccattccgtcagtttgaggggggtagaattttattcttatttctcacacatataggctgaagttcctcctatgctaaaaagcagtcattattaacttttactaactgtaccctgcctttgacactgagctaagtgctttacatgcttgatttctttgactcctcagacccactctataagaggaagatgcaatccctactttacaaagacaataaagtgtgaagatgttaagtaaatggtcgtagagcttgtaagtattgaaggacacatcctcctttagtgactatccagatttctcttgtccttttcaagcaaactctataaaaataaaatataattcatggctctatgtcattgcctgacattcatttgccctcaccactctcctggaacagctctcacccattagccaagacaatcctttccaacaggtctccttatcttccccagtctggcccttgcatttgatcctactgtcatagcaccaccttgaaaccatttctttggttcccaggacactagcctcttccttctctctgcctatgctagaggttccccttgtgtcacattatggccaacacgtcccagtatgtcaccttgttcacaagagttccaccccaggcccattgctctttttgccctataaaactgtacctgacacaggcttctgcacctcagagaaggaaaggtggagagccccggtctccacctgctgatgaggaatttgcaatctagctgggaaggcaagacccctgtggctgaaagtgcactgttgtagcctggatcaggttcagccctgactctacctgctacagatacccaggggagggagagatccctgaagaccagagcagcgtgggaaggcttcctggaaggggcatcatgggccttgaaggatttggcttcacagagaatttggctatgaagatacaagaagagacacactccatgaggaacagagaaatttcaactccttcactgacacattcccctcctatgccacagtgatgcctctcacatctgagccatggcagtgttggtcacctgcacctaatttgcatgttgaccccacaacctcactttatcttgtactgctgtggcctggcacatgggccctgctccaggggatggtgagcaccctggggtggaggcagggagcggggaattggtagtgttggtgtgtggttggcacaagccagaaagccaagagggcctggttttgcattccagtgtgaccacttagcaatctgtgaccaggagccaattacctctctcagcctgtttccccactcatttaaaagtagctttcatagggctcttgtgaggaccacataaggtaaagcaagtcacacatggtggctgatgtgcaagtccatgctggagaaatgtctgacatcattattcatctctggacccgccctacatggacctcatctcaggcctagcatatggaagtgaatgtgtcttttcttttgaaacttggattccccaatcagactatgtatcacaaggatgaggccacatatttatctcaggatcccccaccatgttagtacaggaatcttcagagagtaaagggcagaggataatcagagaaatgagaactatttgggcagattggctttgggcggtctttgtgactaaatatacttctcaaaagtgttaagtgcttgagaaatatctgcccagaaggaagggcttggaggaatgcaagtagcctctgcccagcccagggtggagcttcgcagaatgaaagaaggtgccggcggtggcccgggggcctccaaccacagcaccctgtggctccaggaggcccatgtcctccgcagtgagcataagtaggatgccaccagcgctgagggcccagacaggaggcacgccacgttctttcccaatcaatggctttcaacccagtttcattctagggatttctaagaatgcaggggccctaccatcattattagcctgtaagcaaaagggtaaaagggaaaagaagaaagaaaagaactcctcaagaaaatgtttcccctggagtattttaaaatctggtggaaacacttttctccagatgcgttttcccggcagggtgaccctccgtggcggcaggcagtgacggagaggagtcttcccatagctcagcacacaaagctggtgttgttgaaatgagagccgtgtaatcagctaaagaattcctgagcagaaccaagggcagcagatacccaaaccttgaacttctttacctccctgcatttttcaagtgcttcctggagaaaggagcacccaggggcctggattctcttctaacttaattaggggcatgcagaaatggggctgaccctgagaattgtctctggaggcccagggctctgaatattcctgcttggagacagcaagagccttggcaggtgtttgtgttaaagggatgtcatggacttttccagtgccctgactccggaatgatggggaaatggcaatctcctccccaacaggctatctggaggccctctccacaggttctccacaagaggctgacatttctccactagtgactataccctcatggcccatggaaataaatgaagagtcaggaatcagcattcatttttcagctcctgccatgtgccaggccccagctgggggctccgagtgcagacagaggcaacaagcacatgctctgacacctgactgcctgtgtgggtctgaatcctggctctgccactagctatgtggccttggacccgtcacttagcctctctgtgcctcagtttctttattcatacagtggggatagtaataatagctactcatagaaatgtggtgacaattacaatgtgatgtttctaacgtgcttaggacagtacccagcaattagaaagtgcccagggaaggtcagctgttattatgaatactttattatgggaggcagagccctgaagaaacaggtccacaatcccacaggaaataactcatgacgcttgggtttgaagctcacaggctctagtgctgtgaaatgggacacccttggacctacctgtgaagcaaaatttgattcagttaaataaacactgtataagatactacttagtctgtgccagacccgcaggagatgggagcggctccaggaccagactggtccctgctctctagctgctttgggtctgtggcagaggctgatgtgtaaataagaaaccacaaaacaatgtaactagtgacgcagctacaggaatcaagtcaagagaaagtgagaggctctgagaaactcatcacccctggttcgtagcattttcctagatgaggcaagagggttggaaagcatgcatttttatactttatgagcaggaattgctgctttgcaagagctcgggcagtttggccaataaatacttattggatttgtttttatagaattccattttccattggtaccattctctggccgtgtgctcatccacctcaagagctcccccgccattcccactgctgagagttctgcccttggggactcctgggtctgaaccaggctggcatggctctgctctctgcctgtcattccctgcgcactcctggtgtccatgtctctgtatgtctgcgcagcacgtcacatgggtagggctcgctggggggtgcagcctttttatgaggagtctccatagacagctcttgctgtaggtcaatggcatacaccctacaagtaactgaatttgaggacttgcagctccttggagataattacctccacgcccacaacgtaatggaaaaaactgagactcaacatgggaaatagacctctccaaagtggcatctcagcaagtgcccaggggagctggaactggagccctggaatcctgacacagcccctgctccctcagtggccgggctgtcatgtgtcaatgcatccagaacacatagcctgtctatttcactgacccttgcctgtccctgcctggctcctcctgggggtcctcaggaccccctccacctcacctccactctgaagggagtctcagattctgtctccaggtgttgctgtgggctgactctgaggctggccaggctgggcaggccaggggcaaagggagtgcaaaccaataagtctgaggcttgaagacagctggcctccacctctgcttctgcctccagtgcagctggggtgctgaaggaaggctagtggaaaccctgagttccagcactggccagatatcacagaccgagagactctgggcctcagtttctccacccataagatgagcaggctagccgaggtgctgggagcactctcccagctgtgaacatctggatccccacctcccctaacgaccgcaccccccaaaacacacactcagtagcagtcacaacaacgcattcccctctccaaggtggatggggaaaagaatatgcaaacatgcctcattagagctggaagtcaaaacagcttctctgtgtgattcacccaatcccacagcattctgcggaaagcgaagcaaagggagctttcatcgcgtgccagattgaagcgtgggcagctgaggtaaaagaacaatttctctagttccaaacatgttttgggggtgccggcatcccctgtcagctcgccttaccgtctccctccccatctccaggcactcgattacccctgcccccagaagcattcctagtcttgaactttctaatcatggcctgcctttgtctgagcacttgggatcatatggcatcaattgagaacgtaacccgactcaggtttggtatttaacatacctgctgcagaggaagtgtctttgaaggcgaggccctgtgcggtggcccccgaccctcccttctgcacggcccaaccctgcacctcttaatcagtctcctgaactcaccacggaggtctcacaatggaagggcaattatgagggcgagcagatgaaagaggcagccccaatggtccaaaaggttcttttgcttttaaattatccatgatttacctgaataaaaggagaggaagtgcctgaagattattctaattgagccagacttttcaaatcatggaaataccagcatttccaaggggaaatccaatccgttcaaattgcccccgtgagtaactcatacaaacagaaggaaagagggggctttcatttgccaatgtgggtctgatcagtgtaaattggataaatggtgagggccagaagggcatgaagctcccagagtcctctgcccatgttttcttagccaggtttgtaaaagggatcattctggagcagagggcgtttgaggaaattcctccatttcggcaccaagcctcctcctcctgttattgaaaacaggccaggcagagggtgttttctcctggctgatgcatgtccttccaacttccagcttctctgccctgaaggtctgcagataacaggcatctttaaagggcggacacggattgtctatgcctgtatttcagttaaagagttcaagacaagaagaagacaaaaacttggcatgactgcatggcctccctcctgggagaggctgaaagcctctgtatgaatggacacctctgtgaatgggacaagctgaagaggaggaatttgaggcagagaaattaagtaccttccataaggtcagagttcgagtccctgggaaagctagggcaagaccttcctgcttttgggttccctgctcgccccaagttgagacaatgggccttttctttggagcactcaaagccatgtatgtttaggaacatttgtattaaaactccatgtgtgttcacagaggctgcctatatatttgaaactttggttcaaaaatttccctgggcattggaataagtactatttagaaataagtggaatatgtatattccatgttggtagttctcagtatgccaaaagaagcctacttctatgagttcatatatatataaagtgtgagtgtgtgtgtttatatataaagccacatatattacatatctatgcatcaggatcacatttaccataatttaaaaataaattgcagataacaacccttgatacacaaggccacattttagggtagagagttctacttgttaaacaataaaacctgcctttgctaagctaggatgctagagtatttttgtttttgcaaaaaaaaaaaaaaaaaaaaaaaaaagataaccttagctttgttagaccctgtgactaagacttctgttaaacaaacaaaacaaactgtatggcaccttgaaactcccagggtgctttcacacaccttgtccaattatgcaaccttcacagcaatgctgagaggaagtcggggtgttgtttctactcccatgttgcagaggaagaaacggagccagggagctgggggagccacacctgcaggcagcctcccagatcctcggccagcactttgtgatgaaggtgctcaaggtggcccagaatcccacagtgaggcgattccaaacccacccagtttctccacctccacatctccacccatgcattggtggctatctacagagcaagatgagctagccaaagtagaacttattctcatgcacttaagcatgagaagctgaggtcaaggattctttgaactatttccaaaacctcaagaacattaagaagtgactccacaaagacatgttgagacggttaaatttagcagtcatgaaagtctagggatccaaagtttatttaaaacagcagcaacatgttagtggtagccccagctctgctgttgggatggatatttataggatgtaaataacttctgtctccaagaacattaatggagctgctcatgctcatgcccatttgtgtaaggagcatactgcaacagctctgcaaaatctgggacacatatctgtacccccttcttttcatgccagttaattttatggaatccctctttgggagtggaaagggagtggaaagagcttcacaaggcatcattttggctcaatatttgagacatgaagataaactgaaaagaggctcaacacacttagagttgtggcctctgttttcaacttcgcctccgctgggcatcagtcttgggctgctcacatcacctgagctccagtttccattatctcattcccttaggtgagtgtaatcccttcccaggctgcctcccacggctccacaaagatctaaagacagcgtagcgacgcccatatggagggacgccagcaggtaagtcccatccactgattaagggggcttctgtaggagaataggaagggctccaagggcagagtatttcaggcttccctcccattaccaatatcaatttgcagattccatcactgcaaattcatgtccttggtaaaatgcatctgtaaccacaacattaatacctgcagctctttccctgctatttgtggacacgagaagagcagtgaagcagttgggtcactcattcaaagctgaggtcaaaagaggccctactgtgccttctttcatttttcaagtttttgtttttttatttttaatagagatgggggtctcactatgttccctaggctggtctcaaactccagggctcaagtgatcctcccacctcaccctcccaaagtgctgggattacaggtgcaagccaccatgcctggccctgatctgccttcttgtttcagctctcatgctataaacaagtgtcccttttgcagtttatttactgttacattttccacatttttacactttttgttggtgatttcactgcttaaaaatggcccccaaggaaagggctgaaatgctgtctcattttcctctgtgcaagactgtgatgtgccttacggagaaaacatgtgttaggtaagcttcgtgtggacatgagttccagtgctgttggcaatgagttcaatgtgaatgaatcagtaacatatattaaataaggtgtcttccaacagaaacacacaacacacacaatacaagattctgcattgataggctgactaacacatcatggccagaggctcgcaggaacctaaacctgtgtttcctctagaagccatggttcagcattggctaattcagtgttttcggtgcctttatagaacataactgcctcaaataacacgaatccactgtactcatcaaacatctcaatcctgacaagaaagaccgaaatccttcaggcaggcagacaatgttctgccgaccttgctcttgtgctcttactgatgtaggtgctgctgcatgtctggtgtgcctggccccaggtgccaggacctcagaaccacccctgacaccagccctcccccttccctggagaggctttcccatgtctcaggcttcaagccccagctcctggccactctctctaaactcctcccagtccctgcagccaaaccaatgtccccctctctgtgctctggtgtccccatattgtgccaccacacaatgctggatggcatgtctcccagaaggcagagagcagagtgagtaggtgcgccgtggtgagggtagtgactgcacttgcccatgagggctgcagtgacatgaaccagtgtgggacccacacagcatttagaacagtgcttggcctacagttagcaccgagttagtcatattttaaccatctgcttcctcccgtagcctccaggattcttgaggacaagaatctccccttcttgcccttatgtgcccagtaggtaagtgtcagtgaatgaactaagtcactgtctccttcattatgacgatggaaaatgtggggatttaagaaaaaaaaaacagaaagacacttttctgcagtgaagatgttgaaacatttcagaagtcaggctccgcaggcagtaggggacacagtggagagggatgaaaggcttctttgacattggtgatgcttgcaaaattgacatatgttgttggttcccctgtttctgggaccccctcaggctggtaggtgatagcgaaggaaggggtgaatttggttggaatggcaaataggccacagaagagaaggctggaggggaagaagaagcgaagggagttagaacagggactgtggatctgcggggagaagactcatcaaggcagagggcacagaggagaatgcgtgccctagactcagagtctggctctggatgctcttgctgcctctctggactgcggcctatgggcagctattcccactccaggccacagcttatacatctgggacagaggtcgtaatttccacccttacaatgctgcctagatcaaatgagataaggagcatgaaggtctaagagatttttggcacagaccaggagctcattaccactagttcccttcttttcatgggctcagcattggttgaagaaaggtgtttccttggggtcccacagctgccttgctgggaggtttccataataccgacagtgctgactgccatcagagggaacaggacctccaaacctcagcgcccccaaggacacggggccccctgtgtaaagacagatggacaggacagcaactccactgaatctctcccctgcttggcctggcccaggccccaaagcaggacctctagcccttctgacttgctcaaggcatcagaggctcaaggtagaaacagaatctgaaagcagtcaggcactgtaaggccttgtaggctgcagtactcatctccctggtccagtgaccttttggtgtcccccgtggtaacaacaccctatgattttacagcaactttcccaaaggagctcaaagtccggggagatacatgacctcattagttttcactctggtggggataaggcagtcagttccagcaggtctcattcatggtagggaaggtgaggccccatgagtcactggcaggagcagacacagatttctcaggaccagaagctgctgagacccttctcctcctccttgccctcctcccaccaggcccacggagatttgctaccaggtattcctgcagcaccatgtgtgcccagtcctgccctggggcacctgggctttagttccaagttctgctaccacatgctccccaacttgctctgagcttgtccttttggggttgaaaataattttccttatccaaacctgaccttgctctgttcaaatcaagggcttttctcatggtcaaaccagatagactgttctagacagcatagcattcctgggggcaggacctatggtgataggcaaaataagagcgatttattacctgagaggtgaagaaggtgctaagaataaaaataaactagatcccttttccaaaatgaagcacacaccttcataatggactggttttcacaatgggttttaaagacgtgtttccccagtactcttacattccatgcaaacccataccacacagatgcgtctgttctctttacgtggacacaaacacacgtgtgtacatacacagcttccctaatgcgtatttgctgacacagaagcccacagcacgagcactcctgatgcacacctatgcaccctggccacatggatgtgtttgcatgcactcccgtgtcacatggggagacacatgcagacacatgcactcgcgggggacaagccatcccctcacatcctctctcgcttaagttgcatctccctcttgcagacatctagagtagagtacattccctgctccaaaaattaacttcaagggtggtcctttctggacccctggcctctgtttccccaacacaagaccccagcccccaacatgtgagaaagtggagtctcctctgactctaagcccaggactcccccatctgggacctcacagcccccttctatctgtccagccaagcagctccttgattcaaggccattgcattttctgagtatggcctgactgtccagccagggctgctctggaccagcaggcactgtggacatcatgccactagagttccaccttgcatggcagcccactgtgttgaccagacagccaagaaaagagggtcacgctgtcagggatattaaagatatagaatgacagaaacagccctggactgagaggcagaggcccccatccactctcctgttctttcacacaaccctggagaattttctccagttctttcatctctttgggcttgttttcttatctttaaagctatgacaattataacagcctcaagagacttctgtgctggaaggatgaagtgtagtgtaagcaaaacccctagccctgtgtgtggtctgtggaaggcacctgacaaatagaatcctttttctttccttataaccaaatcccctgcacagccagtgtagttggatctgtaggtctttggtctgtaaagccagaagagacagggcttccaggtcatattgtccaacctgttatcctacagatgtggaaatgagggaggaagaagggctcataagcaagaaagaaggctcaccaaggtcacattgctgtgaatttactggactcaatttgagatcaagctccaagtatcagactggaaagggtcttagaagccatttcttcacaaggttgacaagatgttctgcaaagctcagctttgctttgtgggaccccttagggagcaaggggtggactagcaagagatctcagctctctacccctaccgcaaccatttcaactcttcctaggaaatggtgaaatattgctgaagttgtccacatctctcatgttatagctgagtaaaacaacatccatggagggcaagcgaggactcatcacaaactcgggtttcttgactactagaccagggtactcttctgtctctatcttactaaatagaaccagctcattacccactccttgtgaacagaattgagccaccctaaaagcttggttaagactttgtaaacagagtagaatgtgtctcatcataatgtaatacacccacattcctatcattggtctgttcctgatgttaacttttaaaatacagttcaaacaccacctcctccttgaagccttttttaaccacccccagccagagagaacggatgacttccttcactgtgccttgccccctgctactcagattttttccagggtgcctataactctgctttgcaccaagtcccttgcacactcatcttctctaccaaaatcttgtggctctttgttccctgagaaatggagaaacataagacctggcacagaatggaacttagtaaatgtttgaatgagcgaaccaatcaattaaacaatgaatgaatctgctctcctaatgcatgacccccaccacacccatcatctgtccagagtaacctctcatcactcgcagctaaacacagggaagtcattactgtccagtgccattcagtgccaacagatcccaaaaagaaccagtgccaagcccggcaccagtgctctgagcagtctgacactctcccctagggtatcccatggaatcccaataccacccacacagaatgaagagggtgcgaattctttgcccccattaataatgggcccatttctcatctggcttcagagcctgtgaagccaatccaggcacagaaacttcaaagggagcttggagctggaattggccccagagggcacagagcaagacaaaacacaagccacagtttttatactatagttggtatataggaagtcattgttaccaagagctcgccctgccaagcctaccagattgaaggagctgaatatctcccatctctgcatagcttagcacttagtgcacaaactattttggctccaaggcccaccagactgaaatgggaattgcaatgtggggttttattctctcatggaaaactccttccacacctaaaaaagaatcagactctaaaatcaagtctacccaacgtgaccttaaaaacaatgtagtaagccagagttatttaaaacaaactagaataatcctaactgggtaagaacctgctgcctctgggctgaggaggcctgatcccagagagggacccctcctcctccctaggccttttggccccatgctccaatggtctcctacaagccttgatttcaatatgagcaaagccaggtggaaactatgagtttgaatgaatctccccactagactgtaagcaacttgcagaaagcacttttttcatctccttactcctttaacaccttgcaaagtgcttgactcaacactgtttaaaattatctttcttatttattggtttacttgtctgttatctgtcttccctaccactagacttaaagaaccatgaaataagaaacatgttctattttgcttgtcactatatccccaaaggctggagaagagactaaaacatagtcgcactaataaatatttgatgaacaactgtcgaatgcttggcatatgatcaggatggtcttcaaccaatccagttctcccctgttttagaatgcactgagaatcagtctgggcaacatagcaagaccctgtctctacagaaacttaaaaaaaaaattagccaggcatggtgtgcacacctgtagtctcagctaccttggaggcgaggtgggaggattgcatgagcctgggaggtcaaggctgcagtgagccatcattgcaccacagcactccagtcagggcaacagagtgaggccttatctcaaaaaaaaaaaaaaaatttagaatgtgctgagaatgccacatccttgagatagagaggagctggccggaatagccagagctctgtcccagtctccctcagaaacaagattccatcagtgcttcagccccacatgtcatgtgaccttagggtataaaacccatggaatgctgctttccagggtccctctgcagtgctgcaaatgaagcgtgtgcagttgaagctctatccaccccaggcagcttccctgagtcttgggggatgggtttacaacaggccctcggcatctcttgccccttgctatctatctgtaagtaataaaccctctttatgtaacctgtgatatgcatgggtgttctgcctcatgagactagacaagctggtaactagtgcatggtgaaccagctgcacagtatgcactcatgagtgaaacaatgagtgagtgaccaaatgaagtgtccatccatgtggatgatacagattatgggagaatttgataaatggaaagaaaaccaaatccaggttattcagaaagaagcggggatattctgaccaataaacctaggacaagtgggaacaggttgttttcaaaatccgtgagggtctccctggggaaagaggaatgggatgtcatgggctgcaggatctagagcaagactatggttgcaggtagtagaggagtggaggaagagaatgaactaacagtaaaatgtgagacctcagtggcagtccaagatgaccatcaatcagcatggtccttaaaaatcattgcagcatttgggtttcttagcaatgcccccattaacctatagggaacctttgtgaaaattaggaaaaggtgtccccttgcatggatgcagccctagaggcacactccacaggttgggggagtcacacagagaaaaagaagtctttcccttggagcttggactggatttcagcccccatgtgcctcctcaggtgtgtgcaatgccaaaattgcaccattctgggttgctgccctgttggagagaccagtgactgcaggggtccccagacatgctgccatagagatctgggaagattcttcgtaaatacagtctcctccagaaatgcggatttactcactcactcgctcattcattcattcattccttcattctgctgctgctgctgctgctgctgctgctgctgctgctgctgctgctgttgtagcttgttgttgttgctctgtctctgatgcccacatgattccggtgatcggtcagatctgggaatggctgggctgaatgacctctgtgaatgctttcaatttcaacatcttgattgttgttgacacattgtggggacctcacagctcctcagaaagaggatttcatttagaatctgacacatcgcttcttcttttagcaaaagtcaataaaagcttttcaaagaaaaactctccaaagcaatacaatttgagagacaaaaacaaaaaagagagagctcattgatttaaaccaacttggaaccctagcaaagatcagttcacggcaaatcaaatcaattgttgacagaatgatgccaaatactcatatttttagggtcttttagataaaaaggaaaagacattacttagacatttagtaacttcttgtcatatatccaaagtccaacaggtaaggagagatcttgatgaatggctgctttcttcccatatactctgcaaatgtacaaggctcataacatacaactgtagccagggaatgttaccactctgcaaaccaaaacctagttctagagacaggggtgggggcacaggcctgtaatctcagctactctggaggctgaggcagtagaatcacctgggcaacatagcaaacctcaactctggaaaaaaaaaattagtgaaacttatctctggaaaaaaaaaaaaaggaaaggaaaaagaattttttttttaatgaagtgaaagttgattctcgcctccaactatttttttaagccatctttgttcaaggccagcgtccaagaggacaggcaagacattccccaggaatgaaaggagagggaagaaggaggacaaaaaaaggaggtaaatccaagttcctagaaggcctgcgtttgatcacacgatacctattttcagtaaccttgggggctgcagattcctcagccaggctgcctgccctcaggaattcgacctgctcccgcgagctcaccttcttctgctctggtcatgccaacaccctcactcactgccttggccccatgggatgcccattcacccctacctgtggagcttgtttataaagggcttaggaggttgaaatattacctctgcctattactagccataccatcctttgcttacatttttctcatctgtataatggggatcataaatgttcctatttcaaagagagataataaatgtgagaattaaatgggcaaatgcaagcaaagcatgagaacaggacagtgtgcatagtgagtgtgaggcgaatgcatgctctggttattttaaatcgcatgatgttcatgtttgaagccaccctccccacgctggcttttttcatcacatgtctcactgcgtgggaatttttccatgactgttgcctgctctaggtgatgtgttccctgtgggaagggtccacttaaatataaatccccagaactaacacaagggttggcccaaagagcacttaacaaatgttgagggaataaatgaatcaacagaaagtcagtggtttaaggcatttagacaactatgtgaatctcacaactaccccgtgagattagataagcaattattatccttcccattttatggtttgagcaactaaggccctgagagattaaatgatttgtttaaggccgggcaaggtggctgatgcttgtaatcccagcactttgggaagccgagacaggcggatcacttgagcccaggagtttgagaccagcctgggcaatatgactaaaccccatctctactaaaaatacaaaaattagccaggtgtcatggcacatgcctgtagtcccagctacttgggaggctgagatgggagaattgcttgagcctgggagccagaggtggcagtgagcctcaatcatgccactgcactcagcctgaataacagagccagaccctgtttcaaaaaaagagaaagatctctttaaagtcccatgggtaataaaggggaaataagcttcctgtgcattgtctgacaccatgaggttttttgcaggtctgactccatattcttactgatggggagatatggatagtcttagaaagaagtgctttaactaactcttaatgttagtgaagcattttctagatggagaacataaataatgatactctaggtgaaggatgccgtatggtcataggcaatggcaagcatgcagggggaatacaacacttttgtacgagattccaagtttcttgaggccaggggcttcattgttcccccaatgattaccaccacagagctcaagtgtctggcacagagcaagcaagcaattgcctgttgaaagaatggatggatgggtgggtggatggatggatggatagatggatggatggttaaatgggaggatggatgaatggatggatagatggataaatgggaggatagatggatggatgaatgaatggatggatggatgagttggtggataaatagaggagaaaattagagaaaaagaagctcctctgcttacagaaaagttggttcctagagtgttcttaagtccaaagtggtattttacaagcaccttctcatgccatctgttggtagtggtgagagttgatgcatttaattctggtgcatgactgttttcactttatttttgtttttgtttgtttgttttttctttttgagacaggctcttgctctgtcacccaggctggagtgcagtgacataatcacagctcactgcagcctcaacctcccaggctcaagtgatcctcccacctcagcctcccaagtagctgggattacagatgtgcaccaccatgcctggctaattgtttgaaattattttttgtaaagatggggtctcactatgttacccaggctggtctcaaactcctgggctctagcaatccccccaccttggcctcccaaagtgctgggattacaggagtgagccaacacatctaacctgttttcattttaactcaaaagtacacaatagaagaaaacttatactggaaaatgtagcaagaaagaaacaatgatcagcttattgagggctttatgatattgtgcttggacattaaatctggaggtagcgaaaccccagagtgttggaagctagattctgcctgtgtctctctggtccagaatgatctcttaggttgcagtggagagggtgaactgtgagggaacagattaaagacaggggcccaggtaagaaacagctgtcatggagtaagatataggtggaaattgagtcctaatatcttttcaaccatctgggacacctagtctctcatatcagtttctacaaagatgtacaatagaggttgggtgatgtgatgtcatttaggtcctctgacaagccttctcaagagtgtgggaggtgagttgctcccatacacattctcatcaagtcatctttctctccatctacccccaagaatgggagttagacagcaacagacaattcaaacaatgtgagtatccaaaactgacaaagcagattttttggaagtttagcaattgccaagtgaaaaacttgatggttcatttaacactttaaagcaatgtacctaatggcaattcatgtaggaagattggaagtggatttttatgcaaaaatgcctggaatgacttgcatctggcctatgacacaccatcaacatcctctatctcctcacccccaagactgctggtagcttctatttttggcaaaacagaccaacctgcttcgaggtgtcctttattttcctgggatttggaaggttgtgccatagcatttgtggacagaacatattcacagtagcaagacactgagaggaaagagggcatccgctggcattgctgacagttttctgggagctctctcacaagcaggcagccttgagatgtccagggttcgacagcaacagatcagtgacacattgcttagaatctgctattaattaaaaagtgatattacggggggaggagccaagatggccgaataggaacagctgcggtctacagctcccagagtgagcgacgcagaagaagggtgatttctgcatttccatctgaggtaccaggttcatctcactggggagtgccagacagtgggcgcaggtcagtgggtgcgcgcaccgtgcgcgagctgaagcagggcgaggcgttgcctcactcgggaagcgcaaggggtcagggagttccctttcctagtgaaagaaaggggtgacggacggcacctggaaaatcgggtcactcccacccaaatactgcgcttttccgacgggcttaaaaaacggcgcagcacgagattatatcccgcacctggctcggagggtcctaccccacggagtctcgctgattgctagcacagcagtctgagatcaaactgcaaggtggcagcgaggctgggggaggggcgcccaccattgcccaggcttgcttaggtaaacaaagcagccaggaagctcgaactgggtggagcccaccacagctcaaggaggcctgcctgcctctgtaggctccacctctgggggcagggcacagacaaacaaaaagacagcagtaacctctgcagacttaaatgtccctgtctgacagctttgaagagagcagtggttctcccagtacgcagctggagatctgagaacgggcagactgcctcctcaagtgggtccctgacccctgacccccgagcagcctaactgggaggcaccccccagcaggggcacactgacacctcacacagcagggtactccaacagacctgcagctgagggtcctgtctgttagaaggaaaactaacaaacagaaaggacatccacaccaaaaacccatctgtacatcaccatcataaaagaccaaaagtagataaaaccacagagatggggaaaaaacagaacagaaaaactggaaactctaaaacgcagagcgcctctcctcctccaaaggaacgcagttcctcaccagcaacggaacaaagctggacagagaacgactttgacgagctgagagaagaaggcttcagacgatcaaattactctgagctacgggaggacattcaaaccaaaggcaaagaagttgaaaactttgaaaaaaatttagaagaatgtataactagaataaccaatacagagaagtgcttacaggagctgatggagctgaaaaccaaggctcgagaactacgtgaagaatgcagaagcctcaggagccgatgccatcaactggaagaaagggtatcagcaatggaagatgaaatgaatgaaatgaagcgagaagggaagtttagagaaaaaagaataaaaagaaatgagcaaagcctccaagaaatatgggactatatgaaaagaccaaatctacgtctgattggtgtacctgaaagtgacggggagaatggaaccaagttggaaaacactctgcaggatattatccaggagaacttccccaatctaacaaggcaggccaacgttcagattcaggaaatacagagaacgccacaaagatactcctcaaggagagcaactccaagacacataattgtcagattcaccaaagttgaaatgaaggaaaaaatgttaagggcagccagagagaaaggtcgggttaccctcaaatagactttaaaccaacaaagatcaaaagagacaaagaggccattacataatggtaaagggatcaattcaacaagaagagctaactatcctaaatatatatgcacccaatacaggagcacccagattcataaagcaagtcctgagtgacctacaaagagacttagactcccacacattaataatgggagactttaacaccccactgtcaacattagacagatcaacgagacagaaagtcaacaaggatacccaggaattgaactcagctctgcaccaagtggacctaataaacatctacagaactctccaccccaaatcaacagaatatacatttttttcagcaccacaccatacctattccaaaattgacaacatacttggaagtaaagctctcctcagcaaatgtaaaagaacacaaattataacaaactatctctcagaccacagtgcaatcaaactagaactcaggattaagaatctcactcaaaaccgctcaactacatggaaactgaacaacctgctcctgaatgactactgggtacataacgaaatgaaggcagaaataaagatgttctttgaagccaacgagaacaaagacacaacataccagaatctctgggacacattcaaagcagtgtgtagagggaaatttatagcactaaatgcccgcaagagaaagcaggaaagatccaaaattgacaccctaacatcacaattaaaagaactagaaaagcaagagcaaacacattcaaaagctagcagaaggcaagaaataactaaaatcagagcagaactgaaggaaatagaaacacaaaaaacccttcaaaaaattaatgaatccaggagctggttttttgaaaggatcaacaaaattgatagactgctagcaagactaataaagaaaaaaagagagaagaatcatatagacgcaataaaaaatgataaaggggatatcaccaccgatcccacagaaatacaaactaccatcagagaatactacaaacacctctacgcaaataaactagaaaatctagaagaaatggataaattcctcaacacatacactctcccaagactaaaccaggaagaagttgaatctctgaatagaccaataacaggatctgaaattgtggcaataatcaatagcttaccaaccaaaaagagtccaggaccagatggattcacagctgaattctaccagaggtacaaggaggaactggtaccattccttctgaaactattgcaatcaatagaaaaagagggaatcctccctaactcattttatgaggccagcatcattctgataccaaagcctggcagagacacaaccaaaaaagagaattttagaccaatatccttgatgaacattgatgcaaaaatcctcaataaaatactggcaaaacgaatccagcagcacatcaaaaagcttatccaccatgatcaagtgggcttcattcctgggacgcaaggctggttcaatatacacaaatcaataaatgtaatccagcatataaacagagccaaagacaaaaaccacatgattatctcaatagatgcagaaaaggcctttgacaaaattcaacaacccttcatgctaaaaactctcaataaattaggtattggtgggacatatttcaaaataataagagctatctatgacacacccacagccaatatcatactgaatgggcaaaaactggaagcattccctttgaaaactggcacaagacagggatgccctctctcaccactcctattcaacatagtgttggaagttctggccagggcaattaggcaggagaaggaaataaagggtattcaattaggaaaagaggaagtcaaattgtccctctttgcagatgacatgattgtatatccagaaaaccccattgtctcagcccaaaatctccttaagctgataagctacttcagcaaagtctcaggatacaaaatcaatgtacaaaaatcacaagcattcttatacaccaacaacagacaaacagagagccaaatcatgagtgaactcccattcacaattgcttcaaagagaataaaatacctaggaatccaacttacaagggatgtgaaggacctcttcaaggagaactacaaaccactgctcaaggaaataaaagaggatacaaacaaatggaagaacattccatgctcatgggtaggaagaatcaatatcgtgaaaatggccatactgcccaaggtaatttacagattcaatgccatccccatcaagctaccaatgcctttcttcacagaattggaaaaaactactttaaagttcatatggaaccaaaaaagagcccttattgccaagtcaatcctaagccaaaagaacaaagctggaggcatcacactacctgacttcaaactatactacaaggctacagtaaccaaaacagcatggcactggtaccaaaacagcatggtactggtaccaaaacagagatatagatcaatggaacagaacagagccctcagaaataatgccgcatatctacaactatctgatctttgacaaacctgagaaaaacaagcaagggggaaaggattccctatttaataaatggtgctgggaaaactggctagccatatgtagaaagctgaaactggatcccttccttacaccttatacaaaaatcaattcaagatggattaaagacttaaacgttagacctaaaaccataaaaaccctagaagaaaacctaggcaataccattcaggacataggcgtgggcaaggacttcatgtctaaaacaccaaaagcaatggcaacaaaagacaaaattgacaaatgggatctaattaaactaaagagcttctgcacagcaaaagaaactaccatcagagtgaacaggcatcctacaaaatgggagaaaattttcgcaacctactcatctgacaaagggctaatatccagaatctacaatgaactcaaacaaatttacaagaaaaaaacaaacaaccccatcaaaaagtgtgcaaaggacatgaacagacacttctcaaaagaagacatttatgcagccaaaaaacacatgaaaaaatgctcatcatcactggccatcagagaaatgcaaatcaaaaccacaatgagataccatctcacaccagttagaatggcaatcattaaaaagtcaggaaacaacaggtgctggagaggatgtggagaaataggaacacttttacactgttggtgggactgtaaactagttcaaccatcgtggaagtcagtgtggcgattcctcagggatctagaactagaaataccatttgacccagccatcccattactgggtatatacccaaaggactataaatcatgctgctataaagacacatgcacacgtatgtttattgcggcactattcacaatagcaaagacttggaaccaacccaaatgtccaacaatgatagactggattaagaaaatgtggcacatatacaccatggaatactatgcagccataaaaaatgatgagttcatgttctttgtagggacatggatgaaattggaaatcatcattctcagtaaactatcacaagaacaaaaaaccaaacacctcatattctcactcataggtgggaattgaacaatgagatcacatggacacaggaaggggaaaatcacactctggggactgttgtggggtggggggaaggggaagggatagcattgggagatatacctaatgctagatgacgagttagtgggtgcagtgcaccagcatggcacatgtatacatatgtaactaacctgcacaatgtgcacgtgtaccctaaaacttaaagtataataataaaagaaaaaaaagaaaaaaaaagtgatattatagctatacaagaaaaaacgactaagctttatacgtagaatggccattgtccaagccagaacacttttgagagtgaaagaacacactattaataattgtggtgggaagagagaagtttacaagagaagtaaacctgaactatcccctgcgaacaaggaaaggttgtcatatggccctgtctcactgctctgttcacctgtaaaatgaaacacttcacataggtaacttttccaggtaactgaaatttaccttatatgagcttttatttgctttcctttttgctactgttgatgaaagcatttctaaaaagttaaactactcctcaataaccaatatattttatctttttctcaatggtttagaatcaccttttgcctgacacagagttgacttgcagagtagttgaatgaatcactaaattattataaacaattattatggtgtattgtacaatataccacaagcactcacagggaatttgagtaagttatttttgcctctcttgacccagttttcttagatctaaaattgagagctaaagagagaagggtcttgcaggtcccttcaaattctaatagtctatgtttgaatttattaatttgctcccagaagtgatcgtcattttaatgaagctacctgtgaaaaatattttaaagaggaacagaagacacaacatgtaatttgtgaggagtccacgtggctctaaagtagccattttccatttggaaaggacttagttacactcttgtgcctaaagtagtgacttaacaatgaaaaagagacagcattttcccacctctgtggttcccttgctttctcgtgcatccaacagtcacttcctgctcacctgcttcctgaggggatgccagtgtgaatccaccaagtcctgcagccccaaaacgacaggttctagaagtggagaaccaacatggatacacacggctttcatccaagagagaaagagtagcgtcagaagaggaggcaaaggattgctgtgggagtttggaggctgcgatcagttccagcttggtggggtgaggcggagaactgggagaggcttcatgaagaaggcctcactgcagctgtggacagttaataaaagtgcatgttcagaaatgcagagagggtcttccaggtggagaaagtagtgtatgcaaaagcatggaggtggaaaaatgtttcagcaggaacaaccagtcagatgtatctgggatacagtcctcaaaagcaaagactgcgtcgtatttatctacctttttgtctccagaacctatcgtctaataaatcctcaatgatgactgattgattgtatgaacgaatgaatggaagaaaagtaataggaataagtttgggatggttgtacttcgctaggtggagtgcctgtctatcacatgcatacgagaggatgcagaagagcttgacaggtcttgaatgctggactaaaaagccaggctggatccgtaggtaatgggagccactgaagatttctttccagcaaagagactgttaagatgttaggatacctggagtggacaaagtcaatcagccagtatgcaagacacagaagggagaaaactgacagtggagcggggggtggggcgggggggctttttttactcttaggctgaagaattttaaagtatttctcacaaacatgctgtgataataaaatgaaaacgatgtacaaagagaggatttaaagatttcattagcggctacaaaaattgtttacctcggataccaaacgtggctctaccttttacgttctgcctcagaaagtgtgttgtggtacatccggatttcttgaaccggaagttatcgggctcaagtgctggtaagggaggagaacaacatggggtggggtggggtggggtggggtggggcggggcggggcggggtcccaggaaggaggactgtcagtgaggcaggaactgagaggtgctggcgtgtcccatacctctctcaccttcagaactccctgaggcctcatgttctttctgtctgtcatcagaggctgagcagtacagcagttgagagaagaggctcaggaaccaggtgacccgcgtacaaatcttggctccaccacttaactgcatgagtttggaaaagtttcttgtcacccattggcgtcagggatcctgcttgtgcactgaagtcgtgactgcccccagctctgtgttcagggacctcccatgggaagctggtactcgagtgtggtaggagtgtggacaccacagaaagtggcaaatgctgcaatgctcagagctggtttttttatatttttccagagagcaattgttaacacggacagctcaccactgtttatacatacgtttgccatcattaaagcaggaatataagaataacaataatacagacctcatgaggttattagaatcattaaattagctgatgtgaatcaaatgcttagaacagtgcctgccgcatagttggcactcaataaatattacccgcgattatcccaggtttttgcataggtgtctgtgttctggaaaacagagaaggactgatgcatgtctcttaaaggagctggctgttcatctccacctcaccaaccagcacacagcccaatgcccaggcgcaggaagtgtgggcccaattgaaatcatcccccaaaggaggtgaatttgagaagaaccaacgtcccctgcagggatcagcattagcattaggggaccttgctcctttaattaacaaaccaggcgtaacttttactacgcagcctgtcctctcctgcctctccttctttcttttaactccagttctttaacaaatccctcttttcaggaatgggaagctgatctgtttggggacgtgccagtgaagcggtgtgcgttggcaccaccagcggctgtcattctcaggagacaatgggattggagcgccaagggggagagttctccatgcagaatttccctgcttaatccgctcttgtgcgctggcaccaagtcaacaaaggaaaggaaccaaattacccgggcggctttggcaggctgcaccactgtcagcgggccagaagttaattccctcatcttcccccgtgccaccaactcagggggcaggtctggccaggctggctttctgtgtaaggctgtcaggtggcgtgaaggggaaagaacaggcgggcagagggtggtccaatcgccggtgcagcttcacagacagacggacggacagatgtcctgtagcagccctgcccctctccctgcccccaaagcctcaataccgggttctgtctgatgcaccaggggaaggaggaggagggtacctgatgcgcagcgtctacagtccccatataaaaatggggagtggaccttaacttcagtggagacagggcatagggacctcaaatagagcaattggcagttcaacctggcaccaagatgggctgtcatgggggtaatggtaccccatcactggggaagaggggggactggcacctgggctgcccaccatgaaacactccttctccaccacagtttgggtggggaaaagggtcagggagtgagtatttagtgagcctgctcggtgcaccaacccacttaatatgcttcatctcctgggaccctcacagaggtcctgtcaggcctgtgacattagcctcacctaacagatgtggaagctgaggttcaagagtgagcaacttagccaggggcctggaccagccatttgaaccccgttctgcccgagcacagggctgagtctatttcagagactgaaataccacagcagaatttccaacattaataaccatacaataaaaattattttgtgtaatattgcactataggtctacatacacaaaagtttactgaaatgatgtgcgccttgcagtgtgcaatgcacttcattttctattctattgtatactcctctatttatttttttaatttaattttgttggggatggagtctcactctgtctcccaggctagagtgcaatggcacaatttcagctcactgcaacctctgcctcctgggttcaggtgattctcctgcctcagcctcctgagtagctaggattacaggtgccagacaccaagcctggttaatttttgtatttttagtagagacggggtttcacctttttgcccaggctggtctcgaactcctgacctcaagtgatccacctgccttggcctcccaaagtgctgggattgcaggtgtgagccaccacgcctggtcactcctctatatttttaaacgcagaggttaatatatcaaattgacatcaggacccactaatgagttacacccatagttggaaaaacactatgctaccagcccaggatatatcctctatggagggatactctcccagccagcactgcagcctggccctcttctggcaggcagggtgagggcactcactttaatgtaactgggtggccacttgtagggctatatctaatatctgagccttggtagtgcctacaagccctttccttccctttcgcctgacttctcgggcccacatggagtcctccagcttcctctgatgctcctgtccccatcaatcctgctttcaggaaggatttgctgttctgtgtgctccccacacatacacccctccagggacactgcctgccccagatcactcatggggatctagaggtatgttgtttggggagctaccatgtacccgccttagtcctgctttaattctgaacaccaggctgtggcttgctggtaactgcccggggtaagtggagtggcacaggcaagttcaaaggggcccctttgcatagactcccctgacagatagcctaggggacgccattaaggtagaaggtagagcaggtgctgacatgcagccaccctgggtgaaggaggatgaggctaactggacccccagggagatcagctgggaccgcaccatccccagaagtgtggatccacccaagggccacgtggatcctcaaggagtgaggagtagacctgagccacgtgggcttccagcagttccctagttgctgtgatctggagaaggtattacaggcttacaggtgtgcatttctacaggggccaagggcagggccaagggtcttggcagaagagctcagcttcaagaaaaggtcagccaggacttgcttcagagccctgccataagaaaggccccccggctgcctgaaggatcccctgggaactctgccatcggtcagagcctcccattcaccaccccagcaccaaagacacaaaacccaggtgcattcctctcagaacagaagctacgctgtgcagggcaagccctgaggctctgccactctggttgtgtgagcctgggtgagtcggctttgccctttgagcctgtctcctcatcttttaaatgaggaggttaaattgatccctgtcactttaggatgggattagcacacagatgctttataaacccttgcttactattcgagcaatttaaggcgaggctaatacagagcagtgactggatagcagacattgtgctgattctccttcaatccccataaccgccattaatattcggatgtgattgaagcccagagaggtagatgattcgcccaggtcatcaagccaacagcagcagggtgggacgtaaacccaggaggctcagctccagagccacagcctctccctgctgtgcggctctgcctctgggcagctgtctgtctgcactagtcaccctgccttatagctctggtttctgtgtctgtctccttccctggactctaaatatcttaaggacaatgtcttattcatcttcaaaggaaggagcagtcggagtcgagcagtgcatggcacgtaagaggagccaccagcatttgctaaatgccactgaattcttgatgtgccactgaatggttcattcaaaaggaataattttgcccagagatatgaaatatcttaccaatttccctgcttttctggaatttgctgctccctgaagaggtctctgtcattcctcagggacggggctcctcaacagggccaccatggaattccagttttgtggacacgttctcaaggaacctgagctgatgcagccacaccactccaccccacagagtcctagtctcccctctgcctgtcagaaaacagccttccctgcctagcacatttgcctttcagaagccttctgggagcagctcagcccactcagacctcccctctgttggagcccagagcccttaatgtccgtgactcactgggtgaggactgcccttgcctggcacctctgcaagacagcatgccctcctaggagggactgccctgccaggatagactgtggactgtggactgtggactgtgatggagcgtgacctgcacaggccccagatatctggaccatcccgccccatggagatgtcacatctggagtctgcctccagattttcactctcattcccttccatggcctctgtcgtccccagcaggatgacgggctcaccctctgttcagacatcaggcctcgtctcttccccagggactgctctgacaattcctcccccagacacaaaccttctttcagcagcgctgagactctaagcccctctccccttcagccaagagccattgtatcagctgtgatttatgtaaaggcttttgttggactcctggttttgacagtctctgtgttttcgaatggtaataattacggggcctttcatcctttatttacgggattgctctgggggcagagaggcctggtgttgggggagggaggctggggagggcagactcgttttctgagcctcagaagcaaaggagtaggggtcctttggaagttataaatagcagttcccaagaataaagaagtcacctctccaggctaagggagctcacagaggacaaaggatgccgagagctgggaacaccaggcttcttcaagactgacagggctaaacgggagtttccagggcccggcctcttgttttcaagaagctgatttttgtctgaactcaagtctctggctgaggtgaagggaagcaacttaatttccatcggctagccagttgtgagtctcttcttccatcacgatctctgattgttaggaagggcttcctaaaatcgagtggaagccaacctctcatccgggtgctcatccaaggcccagatgctcctcaatgtttcccagcctcccttgcagctgggatgggttgtgtggctggttctggataatgggatgggtggaagtgacacgtgccacttccaggtctggcttaacatcatcccatgtgtttctccagctatctcttcccttcactgggaagggaggaagccatttctgatggcaatgcttaaagcaacatgactgaggctaactgcatgaccatcgcccaactttaacatgagcaacaaatgaacctgctttgtgcttagccagcaggatttcagggtttattcattcctgcagcagagctagtcctgtctgattagccccagctattgttctgaggttcctggacacatagatgactaagactggcttctgccctcaatgggctcacagtctgacagaagagacagtcacatgacttagtagtccagaggctgccattgccagaggccaggaccgtaccggcacagagtagggtccttacctgacttggagggcccaggggtgcttcctggaaagaggcagcatgtggaatgccttggggaatggtgcaggtcttggccagcagagcagaactggggaagattttgggcaggggaacagcacagaaaaggcaggaaggggagatgcaccagtgtcatggaagatgctgttcactgctcagtgttggtcctccctagagcagggttaaatccagtctcaactgcccacaggctttatcgagagaagaaacagctaccctccctaccatgatcagagcaggcttttgtggggagctagagtttagattacaaggaggacgtcgatcataggaaagatgtgcatcacaggttggatgtggatcacaaggaggatgtggatcatggggagcatgtgaatcatggggtaaatgtgggtcacagggaggatgtagatcacggggaggatgtggatcatggggaagatgtggatcatagggaagatgtggatcatggggtggatgtggatcacagggaggatatggatcatggggagaatgtggatcatcggattgatgtggaccatgggatggacatggggaatagggtggatgtggatcacggggtggacttggatcacagggaggatgtggatcatagggaggatgtggatcatggggaagatgtaaatcattgggtggatgtggatcacgaggtggatatggatcacggggagaatgtggatcatggggaggatgtggatcttggggtggacatggatcacggggtggatgtggatcacggattggacatggggcacagggaggaggtggagcatggagaggatgtggatcatggaatagatgtggatcactggtgattgtggatcatggggaggatgtggatcatggggaggatgttgagcaaaacatggatgtaggtcacagggacaacatggaccacaggatgggcaaggatcatggagaggagatggatcacagggaggatgtggatcatggggctgtgaggaccacagggtgcgtgagggtctcagggtaggcatggattttgggaagaatgtgcagcacagggaggaagtgggtctcagcaagggcctgagagcccctcctggtgacggacaatgggccctgagggcctctgctggtggtgaactatgaggtggctccaggaaactgacttttgctaacatgggtttcaggacctcgttcaggaagtctaatgataaaacaaatcattcgatgcacctaaggatcagagactacggcttttcatcctaaccccagccttgtgctcttttttcttctttacctaggaaagccggtgcagatttacaaaagagcatgaggctggaagaaagccagacctggatgaagctcccagctgtggccggcgtgagctctttagcttctgaagtcacttagcatcttgtttggagccttcaagtcctctctgtgaaatggggccgataaactctaccttaaaagtttgttggccagacacagtggctcacacctgtaatcccagcactttgggaggctgagacaggaagattgtttcatcccaggagtttgaaaccagcttgggcaacatagtgagactccatctcttcaaaaaataaaaaaattagctggccgggcgcggtggctcacacctgtaatcccagcactttgggaggccaaggccggtggatcacgaggtcaggagaatgagaccagcctggctaacacggtgaaaccccgtttctactaagaatacaaaaaaaattagccgggcgtggtggcaggcacctgtagtcccagctactcaggaggctgaggcaggagaacggcatgaacccaggaggcgaagcttgcagtgagccgagatcgcaccactgcactccagcctgggcgacacagcgagactccgtctcaaaaaaaacaaaaaagaaaaaaaaaattagctgagtatggtggcacaaacctgtagtcccacctactcaggaggctgaggtgggaggataacttgagcctgggagatcaaggctgcagggagctgtgatggcaccactgcactccattctgggtgacagggcaagacctcgtctcaaaaaaaaaataaaaatggaaaaagaagaaagtctgctgcaagccaccctgcatcctgtcaggcagtgacaggcttagcacagtacctggcaggcgggatcctcaacatttgttggtcactattattactgtcatctttgttattatttattttattttatttttatttttgagacagagtcttgctctgtcacccaggctggagcacagtgttgcaatctcagctcactgcaacctccacctcctgggttcaagcaattctcctgcctcagcctcccaagtagctgggactacaggtgccagtcaccacgcctggctaattttttttttttttttttttttttgtatttttagtagagacagggtttcagtatgtgtgccaggctggtcttgaactcctgacctcacgatctgcccgccccggcctcccaaagtgctgggattacaggcatgaaccaccacacccagccatctttgttattattgagcacctaactcacagggctgatacgaaatacccataagagaaaagggcttatctggaaagtgttatctaaagatgcagtcttagcccatagatgcccccaccagcaggccagttggcacctgggtactgggcaagccccacagacccatggccctcctgggcggtggttgagttacagaagacaggcagcaaagacactgcggcctaggggcatgactcccggtgaaagcacaagtgatgcttgtcgggacattaacaagctgctgcttgttctgtgtagcgggcattgagcctctggacagggaagagaaggcagtgcccatgacttgccatgccctgaacttagatgatctcgtttactcctcacaacaaacctgtgagaaagtgtcagtatccccatcttaccaatggggaagcttaggcccagagagggcaagcaatttgctcacaatcacacagctggtatggatttaaactcccaccttagccttagcgtgcctccaggacccctgcaattccctcttaccctgaacatggtcctgggggaccccatcttagcatgtgcaaaaccgaacagggtgagagccctgccacacttgaccttgcatttagtaataacaatgaggggggagggagaaggggggagggggaggaacagaaggaggagggagaacattaccaacatttagcactcaccggtcctggtacttgctcaggactttaattgagcaagtaaaggacccatccccgcaccaccaccaccccaagaggatcttgggtctgaggagctgaccgatcccctcattcaatcctcacagccctaccgagaagcactctcattatccctcccgtacaggtgaggaaacagaggctcagagacgttaagtaactttccccagatttagcatctagctgaggagcaaagctggatttgagccaatgtctgcctgacactacagagctccagcttttatccactcctacctctgaactgcctaaggaaaaggccaaatgcaccagtatactctagagagaaaacttgatgggggcaaatcagggaagactagtaaatgtatggcaggaggacagcctgaagagggcgcagggctccccgaggttccctgctggctgggctgctggtgaatagatggagaaagctgtgggccaatatggcctagacgaatccagggactctggagaaagccctaggccacttcagatcctttatatacccactgagttcctcacacaagcaccatgaattacaactctgtgaagtgcaagttgtgactattccatgttaaagatgaggaccagaattacttaaatgacttactcaaggtcaggcagagatagttgctctctctcctctgttcccaaagctccttgtgtacatttctatcattcttttcttttcttttcttttttctttcttttttttttttgaatcagaatctcagctctgtcacccaggctggagtgcagtggcaccctcactgcagcctcgaactcctgcctcagactcccaagtagctgggactacaggcatgtgccaccatgcttggctgattttttaaattttttttgtagagatgggcgtctggttttgttgcccaggatggtctcaaactgctagcctcaagccatcctcccacctcagcctcccaagtcactgagattacgggcatgagtcactgcacctgcctggtttcatactttttttttctttttttttgacatggagttttgctcttgttgcccaggctggagtgcaatggggcgatctcggctcactgcaacctctgcctcccaggttcaagcaattctcctgtctcagcctcccgagtagctgggattacaggcacatgcctccaagcctggctaatttttgtatttttagcagagacggggtttcatcatattggttggtctcgaactcctgacctcaggtgatctgcctgcttcggcctcccaaagtgctgggactacaggcatgaaccaccgcctggccctggtttcatacttcgttgtctgttttctctagaagactgtgagcccctcaagaaggaggccagtatctttgtcatcgctgagttctcacctctgaacacaacgctagaaacatagtagataagtaaatgaaggaatggagtgaaaattgaactctgatcctccctcttctgtcctccctccctccccttgaccaaggtatcaaacatgcaggtttcactcccagaagaattactgctttcgtggtacaggcaccactgttaataaaaggtatctagtgttcaggagagttctgccttctcgttttacatgtggggcaacggggacttggagagaggaaaggagttgctcaaaagctagtggtccagctggattatggagacatctctgaccctgccacactacttgtgtgaccctgtatcaatggcctaccttctctgtgtcttggtagctccccctataaaatgggctcgaccttcctcactgcagcagtagggaagtgtcattgaggtccttttggagcagaaccatgccgatttcctggagtcagctaactctgggcagagcccacccttctgggtcccagggactccatctgtgtgtattaccctcatttctctttggcactgagaagctgggactgtctcagggcatggaggcctctgagctccttggtagaagaaagatgaagcatgcccagctctcctggtgtatttctttccttgaaattcaaataatgctatttccccccctccttttcctccaaggtgacttggtgattggactgtggatatggattttctatgatgtttaagatttaccataaaaatctacatgaattggagatactattattagactaaaagcaaagaggctcatttctttctgtcagagggagcgagatcagaggcttttctgctctctaggttaaaaggtacaccttcccagaaagatgagagccagtgacggttccaacaaacgtgtcctatgaatttactaaaaaacaaattatccatcttgaaggaatgaagggatcatttgaatgcactcctgcttctgaggctggagaaatttttcctgcctcgtgtctgtgcaccgtcgtctctgatggggcagcctctgtctgtgagatcagaattaattaaactgtgcttagttcacgcttttcgtgccgttagagtcggagagctgtttgaaataggattcctgctgatgaatgggtctgtacaattatcggtgacaatatggtgcataccctgagtcctgggctgagcgtggaggcccttcccggcagggaggtgagccaggctttgggacagaaacctgtgttctccccaaagacggcatggttattttctaaaagacaagcccttttatgatttttcttttaatagcaggaaagatggctgcagctctctgttggtaggaaagacggtgagtgcggtgttctgagagccagccttgtagtcacaccgacctgggctcagatcctgcctttctaagtatagagctatgagctgcctcacagcatttctgagcctcagtttccttttctgtaaaatgataatggcacccacggtgcagattggccctaggaccagtcattatcggggaggggaggcatccagcaccatggccgaggattagagggtgctcagtcaggtctccattgcgtattttgacatctctaatttgaagttgccgaggtttgagtgtggctgccccatgacatcagactgcagaagcagttctgaaaactcccttcctgcttaatgaatgaagacagattctaacagctggggccagacaaaggaacatgtgtcaggctccggaagctagtctccaaaagcacccagggagcagggaggaatctgggtgaagggcagggcggagtggccagactgcgtgggcctacgccgctgcttccgcttcccagaattcctaggcctgcatcagttctgcccgattccgccttcttccagagcagttatgagcccaaacagaagaatctacaagccttcttttataagcagagaaagagactcctagcttcatgaacagctttcttcacatgactctccatcactggaaggggtgatagcaccgcttcagatattccactcggagacggtcaactcttgatcctacaatcacacttagcaatacagcaaggatgttcaaaatatcaatatggaagagaataatagctttctcagaaactattgcttgtgatatccaaaagacgattaaagatgtataaaatgcccacgcctcttcaacagagaaaatcggaaattcaaaccagcaatatcagaataccctgccaggtacttaaggcacacaagaattgtcctcacttactagctgtatgtttatgaaaaaaaaaataacttagcttctctgagttgtagttctcacatctctaaaatgagcccttgtgaggataaaatgcaaataaatacagttatgtatcagttgactatggggatacattctgaaatatgcatccttaggcaattttatcattgtgcaaatatcatggaatatacttacacaaacctagatggtaaatatcattgctacacacctaaactatatggcatagccattgttcctaggccacaaacctgtgcaacatgcaactatattgaatactgtaggcaatcataacacaatgctaaatattgtgtgtatctaaatgtgtctaaatatagaaaaggtaaagttgaaatacggtgtgataatcttatggtaccactgtcatatagtcggaccactgtggaccaaaacaacgctatgtactgcatggctgtatgtaaaatgaccagcactctctgctggatacagccttctttaaatgtgctcctggtgacggaattcacctttgccatcaatgacaaacacttgtagcatttatgaattggaggtttacaattctgttatgtaaagtctaaccaagcaaaagagatttgtagaggcagcaagaggggcagtaaagaatggtagacatggcgtccacctaacaactccacatggactcttggtccagtgaatttttgaagagggggatgcatcttaagcatctattttttgtggaatcaatataagtggcacaatttgttcaccaagatagacaaaggtatataaagatgttgctggttttgtttgtttttctgtctggacaagtgtctaggcaagacatgctccctactttgccacaaaatgaaaatgtggggccccttgttcaaaaagaaagaacttcaagacagtaacaagaaagcattaaggaaaatacggttctcttctccaaggacaaggcctttgtgagcttagggccctgggacatcactggtttactggtttacttttataaagccagtcctgagtgtgggacttggaggaggtgacagtgctgtaaggagaaaaaaaaacctgctgagaggccatctctgaaccactcagtccagagaagtgtggtcacatcacccaaagtcaccatcttaatcaaacttaccactcttggacatgctataatatttatttgtttactgactatactctagaatgtaaaagactttgatgccttatacagcatggcataatacattacatgtataggtgtacctaacatataataggtgctcaataaacttttgtcgcatgataatgtaaaagcaaagatcaagcctggaacatttcatctagtgcaggttgctagcacctctttgggtttctgatgctgatgttctctgacagagcaatgaatagcaggtagaaagtataccagtttgggaaatgggaaaacctcatttgaaaacctcaaggtgaaaagatgcaacctacagacacaagccacagttgaggttttcccatttcccaaactgagtgagtcacaatctcacttcattctatttctccgaatactgtatctgtgctggtaccatgtctaatcaaaattagattttctctgagtcacaaagacctgaaaaatagcacctgaaaaaaatagacattaatctgctcaggggaactataaacagtaaaacaatagacattaaaatcaaaaggatgatccataaaataaaaattgacaaattggacttcatcaaagataaaaacttttgctctgcaagccaggtgtggtggctcacgcctgtaatcccaaaggcgaggtgggtggatcacttgaggccaggagttcaagaccagcctggccaacagggtgaaaccctgcctctactaaaaatacaaaaattagccaggtgtggtggtgcatgcttgtagtcccagctacttgggcagctgaggcacaagaaccgcttgaaccttggaggcagaggttgcagtgagccaagatcgtgccactgtactccagggtgggaaacagagagacacctatctcaaaaaaatgaaataaaataaaataataacaacaaaaaaacacacaaaagttttgctctgtgacagaaactattacaaaaatgaaaggcaagtaatagactgggagaaaatatttttaaatcatgtatctaacaaatgatttgtatttagactatataaaaaattctcaaaactcaaagtaagaaaacaatctaattttaaaatgcgcaaaagagctaaacagacatttcactaaagatatatggatggcaaataagcacatgaaaagataatcttcattattagccacaagggaaatgcaaattaaaaccacgatgaggtaacatacatacccactagaatggataaaatgcaaaattctgacaatatcaaaaccgatgaggaggcaaagcaaatggttctctcattcattgccagttggggtgtaaaatgatacaggcactctggaaaacagtttcacagtttcttataaagttaaacatacacttaccatgtgaaccaacagtcccattcctgggtacttaccctagagaaataaaaatgcaaattcaggcaaaagtctttgaatgtctctagtagctctatttataattgccaaaaactgtaaacaattcaaatgtccttcaacatttgaatggaaaaacaaactgttgtacatccctgcaatggaatactactcaggaatgaaaggagcaagctattgattgacacagcaacatgtatgaatgttaaatgttaattttgctgagtgaaagcagccggtctcaaaagttatatagtatatgattccatttctattacattctcaaaatgacaaacctatactggtggagaacagaatagtagtaagttattttgaaaataaaatttaaaataaaatataaatataaaagtttacttttctcctgatatggtttggctgtgccccaccaaatctcatcttgaattgtagttcccataatccctaggtattgtgggaggggcccagtcgaggtaattgaatcatgggggcagttacccctatgctgctcttcttgtgatatagtgagttctcatgagatctagcagttttatgaggggctttacccccttttgctcggcatttctccttgctgccgccatgtgaagaaggacgtgtttgcttccccttccatcgtaattgtaagtttcttaaggcctccccagtcgtgctgaactataaatcaattaaacctctttcctctataaattacctggtctcaaatatgtctttattaggagcatgaggacagactaaagcatctcccatatgaaagaagtccaggtataagtatctgagccgagtatagaggtaacacaatcatcaagtagatagattttctcagttatccaccttcaccatctctaagaaatggccctgcagaggctcagaactcaataccccaaaatatggcacattggcaattgagaaaagcgcagaagcaaggtcactctgcccttctccagcctttctcccctgaagtatagttataaagaaattctctgaagtacctcccctaaaagtagggcatacctccccttattctagaggggttttgcccaacatccagaggcaaataatgtcatacaaagacacaggaaaggtctaaacaaacaggccttgctgaagtttacccagtttattaccattaggttattcctttttctgtccaatcatgtttctccataactatacatttctttcatcagacttatcataaaattacccagttttccctgggtctttgagtcctcattcctgaagattcctatgtcacttaaaactttagttaaataaatttgttatgcttttctcttattaatctgtcttttgttacagggatgtcagccatgacccttgcaataggtgaagacgagctattactttttctcccctacagcccgcatcctcctgatacaagaatattgacagagcaccgctcatcacagccacattccaaacatcaggatggaggaaggggaaacacagggagccagctctgtttccaggagtattccctgtgattatgtttcatttgccaaaacacggccacacctagctgcaagagagcctgagggatgcaaactattatctgagtggaattcttattagtaagaaaatgggaaaatgaatattgaaaagcaaattgccttccaactacagagtcccaattcctttctccagctcaagccagtcttctaagcttttggctcatatatcaatagcccacttgacctttcccctaggacagctaacagtgatctcaaattcacatatttctaaaccaaaaaattttattgtctcttcctccatcaccaagcctgttcttcctccagtctctcatttttaatcaaagccccaccattcacccagctactcaagccacaaagacttcccagggactggtgggcttgagacaatcagaatctcttccagaagctaattactatcccattacaatttggcacggacccaaacatttccctgctcataaacaaatcaacaaatcagaaaacactgagcatctacaaggtgctcagccctggctaagaaattataaggacaccatcagctgaggagacatggggcctggcccaggagcttacagtggagtggcaggagaaggacacacacacaaccagagagggagcaaagtcagataaacacattaagcgccaaaggactctgcagaccaccggtgtcaggacagctagagtagcatcaaggatgtcccttgatataagcaaaataacaccacacccaaagtccagttagaaaaagcaactgataaagctatgttgcaggggcaggcaggatgtctcatgcctttaatcctagaaatttgggaggttgtgtgggatgattgcttgaggccaaagttcgacaccagcctgggaaacatagcaaaacctcatctctacaaaaaattttaaaagttagtcaggcatggtgatgcacacctctagttccagctactagggaggctgaggtgagaggatcatttgggcccaagagttcgaggttgcagtaagctatgatcataccactgcaccctagttatgaagaggggaggcaaaaaacaacaacccacactttcccaatacttcaagacaatggtagaagagaaaccccaaaggctccatgatgaattcattatgcagactgacaataaggatcttggagatcagggaagtttctagaagatgagatctgagctggactatgacagtcaggtaagattctgctacctggagaaagagaaatcctttgaaagaagactttggggacacgtgccccagcttctcctgggggttattgacacagaggaacgtggcacaagggagcagtggtgtgtctgacatctctccaatcagtggaaagcagaactgggatcaaggaggaaggaagcacaaatactgccagacaaatttagataatccctacagtgtaggggtggcagtgtggttatgggcagtaggtttgagagggtaactgtgggtggtggatcctgaatacagaggtgatgtgttggatatttttctctctaagtcaaggtcacaaacccactgcctcctgcaggctgaatctgatccatagcaattatcatctggtatccaaaagaaagtgaatgcctttagggtgttctttagttaaatgaagtcctcacccctgtgatcctactgtggccacttcacaactttgtgatgactccatagcccaaaggcatttgagtttttaagctttgtaggaaatttcatggtactttcagcaaattaaggagtgacatgcttataaccaaatttctagtgcaatgatcctactgcctgtgcaagaaagagtgtaggaaaggagaaacctcgaatggggcccagtacttataccataatatatgtcttggacttgcaaatgatgagccttgataattcagcttccttagcttgggggtaacttgtcctctgagctttactgaaagacaaattggtcattacaggcttagctctgagaagacttcctgaagggcctgagaaaatggtgtggctccagctgtttcagctcccaatgtttgagtctttacagctcaggcaccacacaagtgagtgacagaaccttcaggtgattccggttcctgttactactgatggtgactgtagtagacccagaggtgagcccagtcagctctcagcaatgcaagaagtagcaatcaaaagaactgtttttttcaactgagttttgagatggttctataagcagggagagacaattggtaccccaggtctcctgacccccagtgattcctactgcatctccatttctgagggcacacacatgagcaggtcccagagggcctagcaccaccccaactgctctgagaccccagaacgaggcacagggcaggggaagaagcagacaaccatatctgcagaatgggtggcagcaagttctggtgacatcttgaccagtggggttgttagagaaaccctttggaagaagcatgtgaggacacaagccccagcttctcctagaaggtaattgacatgggggaacatggcataagggagccctggggtatttgacatctctcccatcagaccacaaagtctggtcatcagctgaacttctcaggtcctgccatcttaagaacttgaattaaatcaagttggcttgctcaaaaactatcaatggctcaattctttattggaagaattcttaagtctcctgcctgcacattaagtgttgcagctctttcactgctgtagttcaccaagttccaagttcttgtcctacgactgataagaatggggtatggatacactggagagagagtaaggcaaagtagaatttattgagcaacagaaaagctctggacagtgagaggggacccaaaggtcggttgcttgccacaaggctgagtctaggagttttatggacttgaaatggggaagtgcatgctgattggtctgtggatgtgcttgaaaaagcaccattcagaaataggcacaaaagcgtagaggataaattggggaagggtaggtatatgtaaaataggtaaaggataaggaccaatctggagacagcatgccaaatgggaatgggagttctcaatctggcccacggatttatccagagctcacagcttgggtttcaggcttagattatcctttgctcgaaggttgaatttcactggggacctagccctgtctgcctaagaaattacctgcctcctgtcgctatcaccagtagggctctaataaactcttcccattttgtctcccatggccatgtctccttttgaaaccagctttgcaaaagtcacagctgaggaaattatggcagtgagataaactgacatggctgactccatcttgtctctagcatcacaggttggttgtgttttctcaatcctgggcatgggctaagctaactttgaaacaaatttagtttatagtttaaataatagtccttccccaaaactaaactgttcttgtaaaactaattaaaggccaccaagtcaggatgagaggggcttaggttctaaataaccaccagcctttattctggaggtcataagattttcaacttctcccaattactcttgaagataacatcacttttgaagaacctaagactggccttttgagatatcttttcaagattttgcatttctgacaaccagatggccccacctggacctgccaaccagtcctgtggcccccacccagggaactaactcagcacaagaggacagcttcgactccctatgatttcatcttctagcaaaacaatcagcactctcgactcactagccccatacccactaaattaaccttaaaaactccagtccccaaattctcagggagactaatttgaataataataaaactcaagtctcctgtacagtcagctctgcatgaattaaactctttctctatgacaattcccttgtcttgataaattggctctctctaggcagttgataaggagaacttattgggcagttacactttcctccttctagacacaccttacacaaactgtttctgtgccttagttcatgacatttcccataggtagaatattcccctcctctccctcttctatctaccctattcttagatcctgctggagctcagatccgctctcctatggaaggtctttcgtggccacactacccagttgcctctgtactccacagtacactagtgcctaccattcatccatgcattgctgaatcagagaaggtccctgatgtaggagtttacagcacagtgagaagagaggagacagaaagaccacaacaatccatctgcagcatcagaaattccttccaacgaagaaagctatttttgtttgtgtgtgtgtgtgtgtgggttttcttgccttgtattttgtggaaaaggtaaataaatgactctaagaaatactatttattaatgattttctttttaaaatcatacacatcacactactggcatctggcacctctttgtgtttagtttttctgtgcaatattgtatcacagaggagccagcaacttttgtttttccttgcaacatccatgaaacttttgctattctgtaggatgcctatgtgacagagatcactgatttgatttaaaaaaaaaaaaaaaaataggaaggaaggtagggaaaggataaaacctaaactccttagtatgtctcaccaagtctttctgagctgtccttcttcacttggccagtcccaccttcccacactcccacgtgccctcttcattcctggcatatgccacccacagggcagaagattctgtgtgctttcattcttctctgttcccatttcctcctttacctgtggtccccagctccaaatgtctccatggttagcccataacccagctcccactccatccaactgtggaaactctcattcagtgctgccagtgaaatgtaattgacaacacaccatgtgtattagtttcctaggattgctgtaacaaatgaccacaaacatgatggctgaaaacaacagacacttattctctcacagttcaggaggccagaagtcagaaaacagggcgtcctgagggtctgtaccttccggaggcttcaagggagaatctgctccctgcatctcccctgtggtggtggccagcaatcctcagcttgcaactacatcactccaacccctgcctctgtcttcacatggccttcttatgaggaccacggtggttggacttagggcccaccctagtctagggtgaccctatctaacaaattacacctgcaacaaccctatttccaaataaggtcacattctgatgttctgggtggacatgaatttaggatggcactattcaaccaagtactctaccatagactctaccatactctagaaataaatcactgttgttgttgcttcaagtgcttacagtgtagcgtatgtacctcatgtgtagctctttcataatgctaaccacagatgtttgcattcatctatctattaatttgtccccaacacgggcagagaccacctcctctttctttttgttttttcagctccttgtgcagggcctgccactcaactgacttcctaagtaaattgccaactgaaaatgcaggaaagccatttacaaggtctggggccctaaggaccagttctcccaaaatccctgcctgtggacagtcagttttgctcaccagaaaagccttgcagcccagggggtctctatgcaagtattagttctggatctgaaatcgagggttgctttgtgccaggcaggctcattttgagatctgagattcaaggccccatgccagatgtgaaaacaacaccacaaaatcacatctctggccactgcccacttctaaagcttagggtagcagagaacatcaggtacaaccaggatatcacattctctctatttgggtgacatatttctggaaaccctgaaagcaaaccaaccccaactcaataagggtagtcacaatgccagactcacaactaatttgcaggatattttaaaacatgtaattatgggttattgataaggaggtgccaggaagaaggtaagaccatggttttgcccaaaccaggagccagctcctgtgctgcatacccactgcagcctggacatatgtggccctccaggcatcttctttggagggaatgcatgtctttttttcagcataaggatttggacttctttttaaataggaatgtgttgttcttcaaacaaaaattacacaactcaaagaatatgtgtggcttttagggagcggcaacagctgagaaacctacactggttctggaggaaattcaatacgggccaacctaatcgccatgacggagaatttggaatgagtctgaaatgccttcgcattattggacaaacagctctccctccttcctaagcaggctggggcgttcctggtaaaagccctttgataagaagaagcagctcctgggaggcgagccacccaccactttcttaggcactattgtcctgagctgggggattgtgacgtgggctcccggtctacacaatgccgcacctcctgcaatgggccattcatcggccccaaggttccctgatgggagggagcccattgaccccgggataatagatgaaagtgttttctcacttgccttcccctcctgaccccttgccaccatttttcatgcactgtctcctcttcagccagacggaggaattcttcctctgatgatgaaggcccaatgaccctctcccgcatcccgtaagctggctgcttgcggaggattgcccaaaggggtccctgcataatgcaactaaaccaagcaagggtcacttcctttccacccccgcttctacgtgtgcacacatcaactcacaccccaaagcacaggagcagtgcttgtaaaaaattcaaattagtgcatttattcatttgcttgtttgtttgcttgtccagtgtgtttgacctcttggtgaatccacccaagacaaaatgagttcccaattcaatgcccaaagtcttccccatccccactgtcttctcaaaagggccaggtcaccaagcacatgggggcagcagagcaagttgcaaagtctatccagtggatggcacaactgcaaggaccatggatcatccagcaaagcccaggtactcagtggagagccacctgggagatgggactgaccaaggccactgaccagttagtggctcccctgcaaccagcacccagctccccagctccatgccagggctccgaccccttcaaaatgcctccagaggaggtacattctcattagcagtgacaagcagacaacaatctggccttgacaagcgtgttttattatgtctgaaaatctatgaactgccatatatttctttttgcagcccataagtggcaggtaatggtacttggaaaggagcaagctgatcagaactcagctgagggaaagggaaagatggccaggcctggggtctggggtgactttgggttcttgagccgctgaaggatcctggtgtgagaaggtggccctctgtgtgcctcttgctgcttcttcacctcgtgtgcatgggctgcaggtggggggatggccagaggcagggctggggaccctgatgcttgactatctgggagtgctcagggacctgcagtctgtgtgtagggtctcagcaccaaggccaagctcggggcagaccctcaccatcttagagagggactgtggaggaccagcatcgggagcgcaccccggctcccagggatgattccacagagaagttaatggaccttgggcatcgggcctctgatagcgtggggtctttccaaggccctgtgtcaggcagcattcttctgtgaaacagatgcaacaagatgcgtgtgcgtgcagagaaaaagagagagagagacagagagaaaaagagagagagagattatcagagagtgagggagaaaaagagagatggagagagaggcagagaaacagagagagagacacacacagagcacagagagagatgaccatacagaaagacagagatggagagagggagagagataaagatggagagagaaagagagacagagacacagagagaaagagaaggaggcagagggacagagaaaaagagacagacagggagaaagagagagacatagagaaaaagagacagacagaaagagattttaagcaactggcccatatgactgtggaggcttgggagtacaaactccgcagggtgtggcagcaggctggagacccacagaagagttgcagttcaagtctgaaggctgcctgctggcagagcttcttcctcctcgggagtggccaggccttcagctaattgggtgaggtccacccacattatggagggcaatctgcattactcagagttcaccaatttaaatgttaatctcattcacaaaacaccttcacaggaaaagccagaataatggttgaccaaatatctgggcactgtggcccagccaagttgacacatacaattaaccagcacagctcttacctagttgggcatttataaattatgttctacctttttttttcttttttaagaaaaaactccccaaatgcaaaagcttcaggccctacaaagcctcttcacacagcaatgtccaggccttgctagggttagaatccaaggcccctgcctgccttggatgctctgcccaggccttcacaggaggatcccagagcttcagggaccagatatggagagggatgcccagaaacagcctggctgctcgggaggggctgaatgcttatgcccctactcccccaagatagccattgccatgagaaaatccactttcctgcaagggaaattgtgtgagaattcctatcatctcccagaatatttctaatgaacaatctgaagcccagagaggcaggctgagggtagaataatccaaggctgtttagccatccaggttcttaccaacttagagatgctgtcagatctcgttgttagaagggaagtccctgggcaagcaggggcaagtgcagcaggcctgatgtgacacctgtgccgtggagctgccagccagtgcctggcgagggcaacctttgctccagggatcctgtaaggacagacacacccacagaaggagctgcctggtgagccagcgtctgaggtgggagtgcactggctggtctgcctcttggggacggagcgagtgaaggtatttcagcgagtggcacctggaaagacttgtgtgggcacacttccaacaccctgcaaggcccacagagacttttccatgctactctgggcccaaagaggaaaagtgacctcaccctgatcagagctggcggctggggcatacattggttgcttactcgatagtcattccctgccaatgccttgctgacaggagcccaactccattcagtgttcacaggaagagggtcctggcccagggccaaatgacaattggtctaatccctcacagtgagcccatccttctttgccagtgattggtttggggctgggcacgagactcggttctagtcagtatgacgtaagtttccctggggaactctggccgagggtttcaggaacacatcctaccccggtgatagatgagatgattgttcagagagtattgatgctcctattcccctcccctcccctcagggtatgatgcacatgccagcccaccatcatgtcctattggccaagcaaggcatctgcccagacatgggcagatgccttgcttggccaatagcatgtgagcagacatgaaacagactttcgatgttctcacaggcttggtcttaccatttgctccctgaatctgtcatgcaatcaacatgctgggttgctggtgagtacaagaaaattaggatgactgcggaacagacctgaacctacctgaagcctcagagacgagctcagcctcgcctcagcctgaagcagaacagtcctggctgacccacaggtagactgcagagaaagaaaaataaatggtctgttgcatttgttataggtcactgagtttggggtggtttgttactcagtgctttcatgacagcagctcactgatacacaccctcctgctgttcagtgaagctgtgtgggtgtggagcttgaagctacgcagccatctcccaaccacactggaaagccagcggaatcacagagaagtaaccacggagatgctaaactgacatccctagaggtcaggttccatctctgcagagtgacatctcaaatttgccaacacagagacggcctctttgcctcgtggaggaaatgttttcccctgtttctgtccacgggtgccactgccttcctatcaccaacctcctcgacatgtggcctctcatgaattctaaaagcctctttaaagtgtgcattcatttgtctgtcatttattcactgggtctttgctgaactgggcttttagagcaattaagcacagtctcttccctctaggggtgttcttttggggaacaatggtggttttgctgtggctgaagcaagtctctggcacggcctgagggaaggaggcatccagatgaggcagagctgtccctggagttaggctgtggagggccgggaaagtcaggcccaggggataaggccagagctgatgggcagtgagaggctgtcagaggctgagtcaaggggaagggtctctctagccatgaaagtggtttctgtatgtgaccaggactgagtgacagtgtgaagaaaatgtggctgggtggggtgagagagagagatcctaatattgcataatactgcatatttttctctgggtcacatagttatccagcaatataaataatccactatacccaacaaacaacaaaacacctcatccaacatgctttataaagctgcctctagaaactccataaatgtatgaggcagaactctgcagatagatgaaaaccacgccctgccagaagatgagtgagctgaacattcattgaacaaccctctcatgatgtcctagagaggtgagacaagtgtaaaagaacatccagcttcacagactcatgaccagatagaggaaatcaatatgctccctctgctatcatagaatcacagaatgctgtagactgaagggcagaaaccatagacatttagcccctacggttctgaaggctgcggggatggtggcgggggcagggagggagggagatatcttgcacctctttctctttttataaggccattagtcccatcatgacctaatctaaccctaatttcttccaaaggccccacctccaaatactattacacagaggtttagggcttcaacatgaattctgagggggcacattcagtccatagcatgaggcccaccagaaacagctgggacctgcccaaagccacaggaagctgttggctactcgaccatctcccagttcccaacgtggtggagtttgacatgtacttcaacacaaggtttctcaatctcagcgcgattgacttttgggccagatccttccatgccgtgcgggctgccctgtgcattttaggaggtacagcagcatccctggcctccatccatgagacactagtagcaccaccctcaccaccaagtcacgatgatcaaaaatgtcccctgacattgataaatgtttccagggggcaaaattaccctcagttgagaactactggactaacttctggattaaattcaaggaaaactcaattgaactgcttgatagcagttcaagactcaagccaaatgtggtctttttttctgtacagcttcccccaactctctttcccaggtcagagtagttgaccttatatcttacgacctcctctgaccttatgtccatcatagataggattgatcctgtcacatccttacaattctttagtgttttatgtgccacaataaactgtaggctctttgaggacaggattgtgattttttttttttttttgagatggagtctggctctgtcacctaggctggtgtacagtggtgcaatctctgctcactgcaacctctgcctcccaggttcaagcgattcttctgactcagcctcccaagtagctgggattacaggtgtgtgccaccacgcctggctaatttttgtacttttggtagagatgagatttcaccctgttggccaggctggtcttgaactcctgacctcaagtgatccacccgcctcggcttcccaaagtgctgggattacaggcatgaaccaccacacctagctgtgaattatttctttctttattttattttattttttttttggtatcataatatttattcttatatgtatcgaaactcatactgaacaatgtgctctgggttgcaaaacagggtttatttctcgaacttatctgtaagtctggttgtggattatttctctttggaatcctcagtgcatggaacagcacctggaacacgaggaaggtgtgagcgggtggattcattccacaccctcaagaccctcctagcctggacacagtatgttttcatttcatgccgcctgaccccatagtctcccaaaggcccgacccaccagccatccctgaaggcctaccattcaccaaatatgccttggccttgcccagtctacatcttgctagtaccttccttttcttgaaatttccttcatactcacttcaccctgtccaattcctaaaatcctcacattctccaaggcccatctccagtgcctcttctcctaggaagaattttccaaaccttctaattaaaaataatcaaccatccatgcctcccccattaccccagcccctgctctcaaagtgctttttaattctgttataaccatttccggatacattctgtgtcccttactagacagcgaactccccaaaggcaagaactgtcatgatctatttccatatcttccacggagcctagcagaggcctggcacacaacaaacatcactcaaatctaattcaggtctccgagagaggccaggccagcgggcgatggtaaacgtgtgcctgactgattcctccttcagtgccttcaagagaaagatagtcattactggaaaacatggttcataatactgtttgcaaaaggaaactgccctacaaaatcattattcttgatgaaaaaatgggtctgttttttttcttgagaatagatatcaatcctaagtgaaggatttagccagaaggtgagagggagtcctctgaggcctgttagaccaacactggggccacacaagactacatatgtccaaggagacacaatcttcagttcttaagaatttaaagtcaagtgttgcagtctcttctgacagcaagctcattccggccttctggaaaacaaatgctggcaatcacatccatcgttaataattcataattagaaatattattaattggggctgttatttcagtagctcttctaaaggagaaatgcctaagtgtctggattttgaggtaattattggtactgactattacactagactttagaaatgataaagcattcactacctagcaacttccctgactccctcttacagccatatgagacaggcagacagaatggggaggccctcaacaagtgcccagtgtcactcaatggctggctgagactctgccaccatccctgtgtgggtgagctgctcccagccctccctacgagggagggggaaagaggaggcctattcacaccacagccttgatggcagctgctggaaaggtgggctgagtactcggtgagaataagcccaggagggacaaagcctgcccttctttctttagacaaatgagctccagaaagtcctgaggctacaggaggaaagtcactggaaccaagagatcagcagcaagttttatggggcttggaggccactcatctccagcagggtgactggctgggcccggaaggaagcagccgttccagtagcagccgtggccagtctgcagggcctcaggagtctactgctcatgagtggggaagtggtgggggcgacagggagataacggggaccccagagccagatgcggcctggacacagctgcaggttggccttggacagctgagcaggttatgcactgaacaaggggccctggcagcatgggaaggggtaacccgagccttggtttctcactggcaaaaaaatgtgtaatgtgaaccagtggaggccctggcatgggtggggtagctgatgcacccacacagtgaggtgtcccgggttcctgccctcccacacgcacaaacaaacctctcccttagtgactcaggtgccaaaaatgataatttggccctctttttggagtaaggcatgaagccccttattaaaatgcaaaagccattgtcagtcattaccaccttatggattaaccagcgaagaacagagaagggtggctgggcaccggcagggctgtgaggagaaaggagtagtgggaaagccagctccagaaagaggatagaggtgaacgggcatcgctcatttgtgccactcctacaacccagaaggtacataacatacatccgctcttcattctcacagcaaccctcagggaaggctctgttacaccgtttgatggaagttcagaaagaccaaggtcgcccagcgaatacagggcagaatccacttcctactcagattgttcagatccaagctccatgacctctgcactgtgctgtttcccggcagggcctctgcgtcagaggcgatggggttgaaaggcacaaggctgataaccatgtttattagggtattcctggggcagcccataggtgacaaggactctggctggggatagcctgatgctgtagacaccattcagatccctgtttccccaggtgacagaacagaatttaagccacacacccaagatctccccagcacgcaggtggtggaatggggatttgaacccatggtgtgaatcaacaattatctcaacattgaaaagtttaattaaaaaataaacaaaggctgggtgcagtggctcacacctgtaatcccagcactttgggaagctgaggcgggcaggtcatgaggtcaggagatcaagaccatcctggctaacacggtgaaaccccatttctactaaaaatacaaaaaattagcctggcatggtggcacacacctgtagtcccagttatttgggaggctgaggcaggagaatcgtttgaacccaggaggcggaggttgcagtgagcgaagatcgcaccactgcactccagcctaggcgacagagtgagactccacctcaaaaaaaataaaataaaataaacaaagtacaactgcaccctttaaaatcaaggcctcactctgaccagcccccttgctaaatccataccccggaatgacagaagggacccaatgcacagtaatctgtgcagctcagattccatccttccttcactccacaaatactttttgagcatttcctgtgtgccaaggtattttctagtgaaacaaaatcctacaaatggcagatcagaaggctgggtgggagggaccgtttatgaattaaggacaatcagccctgggtgtaactggcagtctccaccacctaccaggggaagggcagagggcagctgggaagaagaggggctatgcagtcaagcaggcctgcggagagcatgtcagtgtggttccttacttcccgtgtgttctcttgtgcgtgttccttcatttcttcaagtctcagttccctcatctgcaaaacacggaccacagttctggcacacaaggtgttatggggatcccatcagatgcccgcctgtgtgtacatgggcgagtgggagtaggcacaaatgtaagatgtcatcactgttaggatcccacaggagaactccaactggggcccagggcagtctctggcaccccccaacacatcctcttcagaaggatgccaggtcaatgcttctgaaagaaacacctgacccttcagtggctgcccttccagactctttgcacaatgcctaaggcccttcaactgctcactattcccagatgcaccatactttctttgcacatctcagccttggctgtttctccaacagtctcttcttcagaaagccttttctcatcctgaatcttggttggggccaccccattctgtgcctccatacttcctgagtgtatcgtgttatgctgtcattgtaggtttcatctcttgtcccctggactctatatgggctccatgaggaaagcagccatatgctgtccattatttgtaccctcggggccaaaagttgtgctaggcagtgggagatgcaggtaagtccagtgaagagggcactttcattctctgttctgtacaacttttaaagcaacattgactttggtagttggtttatttttttttttagagttgggatcttgctctgtcacccagactggagtgcagtggcgtaatcatggctccctgaagcctctaattcctgggctcaagtgattctttcacctcagcctccagagtagctgggattccaggcccccaccattcccatggccagcctgtagttcttatgtcaacgtcataaaattgggggaacattttcaatgttccaatagcatctgtaaaatccacgatgaggtcctttctattccctgtatttcagcttcctgatttgtaatcacggtggcttcatctcaaagcctcctctagccagacattctgggattctgggatctcatgagaggccaaaactttggccttcaaagaagtcaaagtgttttgaaggccagggtggttgattgcgcgctctctgcctagaggagaactgagcagccccaccccctaccacatgccttgcagagccccttcgtgagtaatatccaccccacccacacccacatcaggcttggtcacatgacctgctttgccagtggaacatgagcagaagtgatgctatcacatctaacagaggttgcgagattcactgcctggtttggccatttctttgttttcccctctgccacaaaatcaagatcaggggctatactttcagcctcagaatgagaaagtactggatcagagcctcagctgacttgatgacctaaaaaacaataataaaaaaattgttttcattttgtatttatttatttattttacagacagggtctcacactgttacccaggctacattgcagtggcaaggtcagagctcactgcaacctcaaactcctgggcttaagtgatcctcttgccttaacctcccaaagaatagctgggactacaggcatgtagcatcatgcccagctagtgttttctcttattgtttgtagaggcaggggtctccttatgttccctaggctggtcttgaactcctggcttcaagagatctccctcctcagcctctcaaagctctcagatttcaggcatgagcccctgcaccctgcatttttttttatagtccactgacattttgatggtatttgttactaacgatagtctaacaaaagctgactgatacagctttaatttgcattgcttaaagaaaataccactggtactaaaatgaaatgtaatcatagtttgaacctttaggttcacgtcaaggttgggatataataatgactaagcaaatcctccaatcattccaaggctttgtgtcatgtgatgctcagcactgtggatacagatatgaaaagtctccctgccctctctcatgtgtctctcagtgtgagttatggctaatcatttgatcaatttattccataattttttttttgagatggagtttcgtttttgttgcccaggctggaatgcagtggcacaatctcagctcactgcaatctccacctcctgggttcaagtgattcttctgtgtcagcctcccaagtagctgggattacaggcacccaccaccacggcaggctaatttttgtatttttagtagagacggggtttcaccatattggtcaggctgatctcaaactcctgacctcaggtgatccacctgcctcagcctcccaaagttatgggattacaggcgtgagccaccgtgagtggcctattccataaatatttattgagcatatactacaggcttaacattgttttaggtgctagggctgcagcagtgaacaaggcgaagtgtctgccccattggaacttatgagttggggatgcttacactcaaggaggcatatttaggaggtcacgatcactaagtactgtctaaggtctaagccaaaaattattttccccccacttccctgaaggaaataaggaaacatctcaaaagttgataacattgttccagattgagattgcagctgcataccagctagagggaggttctctgcttcccttcgcaatccaggaggtctatcaacaacccctcccttatgtgctgcattgcagagtttactaattgcttttgccttcatcacgtcttttaattccttcaacactctgcaggtagacaagttaggatttttcatccccattctacagaataggaaattgaggctgagagagggaaaggaatagttcaagttgaaacagccaattagagctggtgccctaattctcagtacagtatccttttgcactatctttctgactgctcaaatattttcataagaatgtgatatgtgtttatgagcagttttcattgacatataaaggattttagaggaatttctaaagcaaattgttcttcatttttctgttccgtgtataataagtctctctagctacagtgtaataatcaacataagattgaggaagaaacctcgagtcaagccaaagtgagtttgggtccatttccccctgcatagaaactgaatcccaagctcaaggtgagagaattcatatctacccagaggcagtagaatgaacacaggcttttgccaggcatggtggctcatgcctgtaatctcagcacttcgggaggccgaggcaagtggatctcttgaggtcaggagttcgagaccagcctagccaacatggtgaaaccccgcctctacaaaagaatacaaaaattagccaggcatggtgtcatgcacctgtagtcccagctacttgggaggtggaggtgggagaatggcttgaacctgggaggcggaggttgcagtatgcagagatcacgccactgccctccagcctgggtgacagagtgaaaccctgtctcaaaaagaaaaaaaaaaaaagaatgggccaggcgtggtggctcatgtctgtaatcccagcattttgggaagcaaaggagggtggatcactgaggtcaggatttcgaggagttcaagaccagcctggccaacatagtgaaacgctgtctctactaaaaatacaaaaattagccaggcgtggtggtaggtgtctgtattcccaactacttgggaggctgaggcaggagaatcacttgaacccaggaagcagaggttgcagtgcacagagatcacaccactgcactccagcctgggtgacagagcgaaactccaactcaaaaacaaaaagaaagaaagaaagaaaaaagaatgaacacaggctatggagtaaaacaaacttgggctggaactgtagcttcattacttaatagctgtgagaccatgggcaagtcatcctccgccctgagcctcagttctctcctcctgtgaaatgggagtggcaatacctctccagcaagtggttatgagattttctgcgggaagtgctggtccatagctagccctcgctagatgctcagtgttaactttgattgcgtggctgctatattcaaggtatcatgtcagactttttgtacatactgtatcctcttccttatttttatgacactgaaataaagctattgtcattttacagataaatgatacattttaggggtaaagtgtcaagcctgcaacctaccttcaaatagttcagaaaaaaatgtatacatacagaaagcaccccccgccgacacacacacacacacaacgcatatagaggaaaagtaaaacaaatacaggaagatgttaataattgctggatctagataaagagtatacaagtggccaggtgcagtggctcacacctgtaatcccagcatttcgggaggccaaggtgggcaaatcacctgaggtcaggagttcaagaccagcctggccaacatagtgaaaccctgtctttactaaaaatacaaaaattagccaggtgtggtggcatgcgcctgtagtcccagctacttgggaggctaaggcaggagaattgcttgaacctgggaggtggaggttgcagtgagcagagatcacaccactgcactccagcctgagagacagagcgagactgtctaaaaaaaaccaaaaagcatacaagtactcatggtactattttttcaactcctatgtggtataacatttgtcaatctaaaaatttggtagaaaaaaactccaatttgaacaataaactatctggccaccctccccagctttctcgttccttctgagcactctgccctcacaccgccgttccctctgcctggaacacccttcccggccttgcttagctggggaactccagccatcaggactctgctgcaaagtcattactctggggagtccttcagacccggggcctgacttcctcaggtctcagagcccctctcccttgcttgaggttccccttgatcacactgtagcctgcggatagatcccgcacttctctttctggagactaacgtgctgagagtgggagctgcattatttctattcctcatccccagcccaggatgcaaagtcatccaaggttaaaagaaaaatctcacctaaaatcaaatatgtttttccaaagctttccaagcctgagaaatgccagtgaaacatatttttctgacctgtctccagcaggcactcagaagaggctggtgaacaagtgaatcaatgaactctacctctgatcccaacttcaaaaccttttctataagcaatggcatagattcagatgcttcatcccaatctcagttctggacaacaggaggtgagccagtggtgcctgcctgatagaacctggggtagagtgaaagaggccaggtccttgaactggcattggaactgtcagaggttcacatcctcattctaccaactactagtttaatgcaaactggtgcctgtcacttaacctttctgtagctcaggttttcccctcactgaaaagggagaagacacctggttttttttgttttgtttttgttttttttgagacagagtctctcactgttgcccaggctggagtgcaatggcacgatctcggctcactgcaacctccacctcccaggttcacgtgattctcctgcctcagcctcccaagtagctgggattataggtgtccaccaccacacccagctaattttttgtatttttagtagagatggggtttcactacgttggccagactggtctcgaactcctgacctcatgatccgccctcctcggcctcccaaagtgctgggattacaggcgtgagccaccgcccccggcctggcatctttttatgtcacataatattatgaacttaggtactgggcatataaagtggcactcagcactcagtggcttactccacagaagccactggaacactgtcctttgaccaagtcactgggctttcccaggggaacccacatggtcacgagaaaggagtaaagacagggcaaggtccatgcagccaagtatgtatgtatgtgtgcatgtgtgtgcatgcctgtgtaagactgtgtttgggaaggtgaggagagccactgtctgccctctgatgcactctgaaaggtcacctggatcaacccagcctgccctaaccacctgaaccaccagacaggaggcttgctggctcccaacaggattataaatcatttatttcattatgagtgtgaggagccgctgtgtgtttgaagtgggatttgaagcaaaagaaatgggcagattaatggagcttgaagaaagctaagtatcacttgccattcctgccagagcacacaggagctggcagctgagcaacatttgaaaaacatgtctctcaattaaaagcattttctcctgggtgcttcatgctggagctcacttgaattaattgcatggacatcagaatccacccaccaatgttctgtgttgcaaagtggttcatgaaggtccaggtctctcccagtacagagccaagtgctttgagtggcatcaaagtcccgcctctccatcctgcatctcctgtaacttccacccgccaccagtcaccaggagccacctgaacacacatgtccctcatctcctgtacatgctgctccttctgcctggggtgttctcatgccccttccctgccaggaaaatttctgctcatcctctgagaaacagttcagcaaatatctattctgtgaagcctgacaccccctgaagagataagtagatgctccctctctcgtggcacctgttatcagagcactcagccactctgttcaccaccctgtcaccacctaaatgctgagttctttgaaagcagagactatattatgtgtgtagcctgcaagtaactgctagtcaatcaatgtttgttgtctaagtgaataaataaagatttatggtctcaaggctgatgcgttaaaggaaaaatctcacctaaaaataaatgcttttttccaaagttttcaaagcctgaggaatactagtgaaacatatttctctgacctctctcccaaatcatttcatcttgaatttctgagcactgccctgctgctaaacacagagcactgtgacattgttctcacctccaccctccacattctgtcagaatcccagactgtcacaatgtcagccctcttctttccccaagaaggggaagattccttctctcccaactgaatcaggccagatccgggaaggaccaggaagccacacagagaatttcatacatgatcccaaggagagagagaatgttgggggcagggatccaaactaaggagatgaagaatcatttaaggaactgggagagggctggagaagaggagggctctgagccagcaagacaatggtcttcagatgtcagaagggctgatgtgtggacccaaagccagacaagcactcaggatgtggtgtgtaggttgcttccttgtgtccctgtttgcagggtacaggccccgtttctgcctgtccccgaaacataattattatgagtccctgttcactctcagcagtgtcctggtttaagcagtaatcacacagaccctttagttacagggacatcttttccagttcagtaaaggccgagttttctggcagacagagctgttcaaggccacaggtccccagcaggaggaactgtgatgcattcatccttatggcccagtactgagcacagggtctggacctcacatggggcctgtgcctgtttgtcaactgaatgaatgactgattgtcttcaaagggaagggattcctcatctctgggagtatgtccatgcaggaggccttgcaggagattcgagcatcacaagggaagtacgaccagaagatctctcagccctttcttttccacaggggttatatgtgagtcaagttcagggatcaagagcaaagcactgaggaagcagacagcttgggctggacccctggtccatcacccaccagatttacaagatctggtgaaattgtaagatcttgagcaagttacttaaactatctgtgcctcagtttcatgatcagtaaagtgggtgtaaaaatatctacctcaaagaatagtccagagaagtctttaaaaatgtcatatatgtaaaatacctggcccacagtgagcactttttaaactgttttctattatttctaggacattgaaggtgatggagctgatgctggactttgtcctttaaaccctggggcggtgactgccagtgttggatcagggactcacttcttcacagtggtggctgtggaaggttaatcacatggcgaacccagtaaccaagattaggagaaagaaaatccctccaaccgcctttgaatttcagttatgtgtaagtttgctttgaactggtgattcaactctttctcttggagagagaacaaagcaagtgatgtggaactcaaatctcatttacaacttaattttaaaactgaggagatttgcaacattggagggagcaggaaataaactttagagtaattgctcggttgccttttaaacataaggcattgcattgctatttttattgatggtattcaaatgagaggatgccacagctgcggaggaacctaggagatcattgacagtaactccttcactgagtgaggaagaaatcacaggccagagaccggaggggcggtctcctgtctcacagtaagttagaaacaagaccagaatcagatggtgcagatcctcgggctcctagacaggtctcggtagaagcccaagagtgaagtaatagcctcaaacagcaaccttactgcccatctgtaagagaagaggtggaaggatgatattctgagcactgtgtttacaaaaacacaaagacaccctcaagaagtaggctgatcaccttccccaaagagtttatgacagacagggaagcagcctttatgcatcacttcttaaagtttatgagcccaggaagccatatattgttttatgttcattatacaggcaagtaaattgaggcaggagggcaacttttgttttcaaccacagaaatccccagtcctaaagcccatgtttgcaggtgttggaacattagaataggagagctatgttgtcagaagcccaaaaccagcagcccagataaaacccctggttttgctacacctaagggtgctctaaagcactagtttttgtgtttgtttgtttgtttgttttgagacagggtctcactcagtggcccaggctggaatacagtggcatgatcatggctcactacagcctctacctcctgggctcaagcaatcctcccacctcagcctcccgagtagctgggactacaggcgagtgccgccatgcccggctaatttttttttttgtagaggtgggggtctcactatgttgcccagactggtcttgaactcctgggctcaagctaaagcattactttccaagctgtgctcctcatcaaaggtggagcacgagagaggttgccgttaccccacttttgtctcctatggaagcagccctgttcttatttggtttttatttgggaaagtcagtataagattttacagcaaagcgccctggtgttttaaaaaagcattgcctgagagcattcagatgatttatccacaacatctttcgttcctggcagtcaactgtgccacgtcacgttggcggatgtgcttctacggagtctggctgcggtgctaagctgtctttcatagggccacagggtcccttccctacagcccccagccaggtgctccagctgcatctgcacccaccagaggcagccaggggtccaggagcactgtagaaacagagaccaacatgcaggcccaggcgaggcccaccatgcttcctgatgttcaccctggctgggcccgatggaatatggtctgtccttggctggcggctcctgctcacccagcagcagccagggccatttcgattaacccttcacagccactccactttggacatgcatgtgctctgttctttttgctgatttaattaacgtaatataatggaaataaaataattgaaggggctgccacttcagaaaagatcatcgctgggctgctcgggaagcattgttgcacggtctccaggcaacgctgaggaggcccgagaggggctggcggtccccaaagcagccagctggccaggcctcatcccacagccccagcccagcctgcctaggcccagatacatgggccacgggcacagggatattccttcagacccttccttcttcaccactttgtgcctttgagtcctgaactgtaatttcccagtttgaaataactaagaaaaatcaaacagagcaaaataaacacatcggaaattcaatcatacacattgcaccccccaagacatttttagtaatactatttgtaaggccgggatcacaccgtgctttctggaagtgatccttgaaccaaaaattagtattacatggagattgctgtgagtggaccctctcaacatttattttcaagtgatagtttttgagctgaaggagatctgggttctccccaaggatctgtctctaattgtcaggagatctcacactggtctctttcctctctgggactcagtttcaccccctccatcactgccatgatgttcaacaggagtgatgagggagcgtggctgagactcaattgtggatttttttcagactatgatgagcaggcagctatgccaggttctgatcccctcctcatggagacctgcgtctggctgcaaccattctgcagatggagcaggatgcagagagaggcacctcttgaccggatgctccgtaagggcagctgatctgcaagggaaagttccttccctgttccccagggcaatgggaggccacaatggaaggcggcaggacagcagattgacaaagagtctggcaacctgcggggacacattcctggcccccctacaccgtcctgtagatcctccatgacaaatacctttcaaagtgatccagccccaaggaaaagacccttattttaggaattttccaggggaggagcattttcatgccagtgacaccaaattataggcatgctataaaataaaatactatatggttttatctgattttgccaggttacaaagcagaagcaaaaaacaaaccaaaacgctctgacctttcttcatgaaaaacagagttttcaggcacgttgttgttattggtggtgctgctggtggtggcttttcccccttagtgatagaaatgcaagggaatgagtactaattgttgaaggttttaaatgtgctgtaccttgttaatgtttctaacatattgattcctattaattaatctagtgtaatggaaaagtcaattacgccatattaacaccacttgttgtagaaaagactaaattactgaatgcagatggagagcagatgtgttatgataaacatttaatacattcctctgcccgtctccaaagttaatttggcttgaggtatccaaaacatggcccatctccctatggggaagaagaagccaattacaggttggagaggagtgtggagatcagatttttatttaaaaaaaaaaaaaagaaaaggaaaatgaagttgaaaaaataagttatctcactggcttgattcttctccttccacactgcatctgattctaaggaacaagcatggaaacaggaggagggagacttgggctctagttctgattttgacacaaactcacagcttatgtctcctcccagaactctccatcaaggtttatttatttatttatttatttattttgagacaagatctcattctgtcaccacccaggctacagtgcagtggcgggatcatgattcactgcagcctcaaactcctgggttcaggtgatcctcccacctcagcctccccagtagctgggactacaggcatgcaccaccacgcccagctaattttttttttttttttttagacagaattttgctcctgttgcccaggagtacaatagcgtgatttcggctcactgcaacctccacctcccaggttcaagcaattctcctgcctcagcctcccaagaagctgggattataggtgcccaccacctcacccagctaatttttatatttttagtagagacagggtttcactacattggccaggctggtcttgaactcctgacttcaggtgatctgcccacctcagcctcccaaagtgctgggactacaggcgtgagccactgctcccagcgctaatttttaactttattttttatagagacatggtgtccccatgttgcccaggctggtctcgaactcctgggctcaagcaatcctcctgcctcagcctcccaaagtgccgggattatgggcgcaagccactgcattggcctttggtgagatttaaatcaaaatatccattcattctttcaataaacactcttggctgcatataatgactgaggttcagatgttatccctaactctttctcaaacatctcagctgagaatttttgcaggcatgttcaatgcagtacagcatgccttccttctgagcctcccgaatcatctgaggctcccaccatctccccagtgtccaacacagaaacctgcaagtcatcttgggcttccttttccctccctacatccttggctccaccaacttgaggttgttaagttctattgagctaccatctagatatttatattataacatccataaaattaaaaagcaaataggaaactgaaaaaaaaagtcaacaactataaagggttagcatgttgaacatattatacaaagcctttttctaaataaataagaaaaattatccaataaaatttgggcaaaggaagagaaccatttgcagaagaaatacataataaggtaaataaatatctgaaaatgttttcacttcaaaaatcaaggaaagtctaattttaactaaatactttttttcccctctcaaaatatctacttctttataaaatcatcagtctcattgatcatgaggatacaatgagacaggcattatagtgtcctgccaagtagagaacatgaaatgtgtggaacattttgagaaagcaattcaacaacaggtattaacagctttaaaagtgtccatgtctctttatccaggaattttccttctaaaaatccattctaggaaaatagagatgcaaattaaagatatatgtatagggtatttattaccacattatttttactgctaaaatgtgaaaacaggttaggtacagtggctcactcctgcaaccccagcacttcgggaggctgaggcaggcagatcacttgaggtcaggagtttgagaccagcctaaccaacatggcaaaatcccatctaatacaaaaattagctgggcatgcctatagtcccaactactcaggaggctgaggcaggagaatcacttgaacccaggaggcagaggatgaagtgggccgagatcacaccactgaactccagcctggatgacagagtgagactccatctcaaaaaaaaaaaaaaaaagggaaaacaacttaaatatcaaaaactagaaaaacagtaaacactctttgacacatctgttttagagacaattacacagtcacagaaatgtgcatgaaggattttcagattgtgtgaaatgctcacaaggtcttggtgaatggaaaaaacagggctagaaagccaaatacagctagagcctcattttcctccccccgcctccaattgtattttacatgcaatattataacaggaaaaaacaaaacaaaacacaaaaaacatctttcagggctcctcactgatgtgaacttcagtgatcacacgagaccctttggggtccactcctggtacctctgcctcctgagtcctaaccacatctcccacctccccaccctcggatttcggctcccgcattcttggcgctccttcaccaggcttggctgctggctttatgcttttgccccatttctctgccagggagagccttgcttcccactctgcctccccagtgtgtcacttgctgctgacataaacatccaccttcaggactcagaggaccttcaggactcagcctgcacgtggcctactcaaaagcgccttccccggcgggatttgtcgttattccaccttgagaccccaccacatccgcagaccacggcgctgtcaggggatttcagcaggagaatggcacgttctgcaatttcagaagaggcctctggcaaccacatctgcagcaggcgtgatcctggtatgggagaactagacaggaagctctcagaggccagggaggactctgactgggacaagggggtggagcgctgggactctacccactcctggtcagaattgtcaacctgccctgtggctgtcctgggccccatctggatggtgcttctcttgctgcccaactgcccccagctttgttcccttcggtcccagccctccacaaaagagctcccatctctgctagccctgcctgagattctccttggcctgagttctaccctaccccagaccccaagagtactctcccttctcccttctctcagaccacaacatgagagagaagcctgaagcgtcctccgtcatcaggaatgccgacattcagaacacagaccgagtgtcttcagccagaccacgcctggcttcccggccatggcagctacgtgcgagaatcagggtcctgcagacgctgacacctgggaacaacctcagacaggctggagtccaaggcctgccactgatcaccaatagacagtgatccacagcaacagagtgcccggaaggccacctcaactggcaagttcctgagcacctctctatgccaggcactgggcagcatgcctgcagtgctcttggaaagatcagattagtggcagtgacaacaaataaaggaaaatgaacaggagtgtgtgcagctgggatgtggtgtgagcaggtttcctacactgtctggaagtctttgcagaattcttctggaaggcgggcctttgtccacgagtccttagaaagagaaggcaggggaggactttctgcaggaaaaacagagtatgtaaagcctaaaaacatccaagtaaggaaacatgtttcctgtgcctcagttcccatttggaaatcctgctgggagatcatggtgcaaactcacatcaaagaacccgagatccaggctcagacccaccactcgccaaccccatcactttgcacccatcgtgccttgttcagaattctccaaaatggcaccacggatgctaaaccaatcgtttggcagttattttggggtttagaccactatcatgctgaagagggccagaccatgttgaggacttaataaatgtttctagaccttcttgcttttccaacaagagagagaatcaagggcaaaagctgtgccttatatctccttgtaccttggttaggaccaaggacctcttcacacccagcaaggccctgctgatggattcatttgctggggctgtcttgtctttcttatctcatcctccaccagagtgaactctttgacagctttagtagcaattttcaaatttcaaaggcccctgcagggctgaagaaggtaccctaggtaacaaggtggaagagcctgacttatcatcaggcaggcaggaatcatttgtctggaaaattcacttggagatcacagaagcagctgtctactgtgtctcaagccccttgcagaaggctggctcccaggcaggaggagcaattgcttccccacagcctggaaagtctgcccgagacaagctcctacaggaacagcaaacacatttgcccttcgctgcctcccctgcccccacctcacttcctctcctgccttgctcagaccccctcccacacctctccctggagtccggaatgagatcagcacctccggacgggtgtgtgccaagtgacctgcttaaactcatttgctcctgggacataattcccaaggaagtacattttaattaaactttccggtaaacacgtcttttgctctataataactccattaaaaagagatcactgtaaagaagctgttctatcccataaacattgaaaacagacaaacaggctcctgagccaggctggcagcactggagcttctccactccacagcctcagcctccctgcaggtgcctgcctgggtcctcctgcttccagactttttctccaggggtttctccccacctggaatgctcagagagcctctctgccctcctccaggaaccttccctgatcagccttcacccatctgaagttttctcatagccccagctacccacccacgtgccataaaacaaccttgcttgtcactatctgctctcaccaagcaggtcatgagtgaggacaaggagcaggccacatgcttcttggtcttccccaaagaccccttacagagagctttgtgcagggtagaaacacagggccacctaaaatgtccaactgctgacaaatagtacctgacaaaaaaaggatgtcttataagtcattcagctatctagaagaagttttgtctgattaccatctagaaaaaagaaggtatgtggttgttgattggttctcctaaattattttaagaaatgtgcctggctctccaaaatacaagccgacaattcctcacgtacaatttgaagtccaaaaagccctttaaaaaagcaggaggccgggcgaggtggctcatgcctgtaatcccagcactttgggggcctgagaagggcgggtcacttgaagtcagcatttcaagaccagcctggccaacatggtgaaaccctgtctctactaaaaatacaaaaattagctgggcgtggtggtacatgcttgtaatcccagctactcgggaggctgaggcaggagaatcacttgaacctgggaggcagaggttgcagtgagctgacatcatgccactgcactccagcctgggcaacagagcaagactctgtcaaaataaataaataaataaataaataaataaataaataaataaatagtaaaaagctggagaccttgtaatcccagtactttgggaggtggaagcatgcatatcgcttgagcccaagagcttgagatcagcctgcgcaacatgatgaaaacccgtttctagtccaaactactggggaggctgaggtgggaggatcagttgagcccacgaggtcaagtctgcagggagccttgatcatgccactgcattccagcctgagtgacagagcgagaccttgtctcaaaaaaaaaaaaaaaaaaaaaagaggagaatgtaaccccagcattttggaaggccaaggcaggaggatcccttgggcccaggagttcaagaccagcttagacaagatagtgagacaaacccctcccaccaccaccaatctccaccaaaacaaaaaattagccaggcgtggtggcacatgcctgtggtcccagttacacaggagcatgagggagcagggtctctttagcccagtaggtcaaggctgcaatgagccatgctcgcaccactgtactccagcctcgcaccactgtactccagcctaggcaacaggtgaggctctgtccaaaaaaaaaaaaaaaaatcaggggaagaagaattttttttgttgctttttaagcttatttggcagcaagatctgacttgatctaaatgtacttttacaattttagcagcaaaattttacttagtagagagttgtctgttttactgcaaaaaataataatgtattaattacaagatactggcctggatcccgctgggagtgttatacggtatattatacgtatggactatatttctcttctaaaaataaaaaaaaaaaattgaactacgaagccatctgaccccagcagtttcagaaaatggattatagagctagatgtgcaatgttcaaaagttccctgtagatatttgtactctgaattctagttttctgatccatgttttataatttctagggcatctatagtagattttattattgttcccaaatatctgtttctctctcccctgtaagagatgtttcattcttgccattgcctgggggggtttcaataattcccttagggaggagaatagccaatgcctcattgacctcagactttgccagtgcagtgagagcagatacactatataccacctctgagtgaagttttaaagtcattgtatgtgtcagttttttgtctttttcctctgtcatgagaatggcatgtcccagatagaagatgcccctttcacttggatcctgaactaaagaagataaatgacttcataccacataggaaaattaaacttaataaatcaattaagtttagctaaatatcagggctaaaacaataaaactcttagaaggaaacataggggtaaatctttatcaccttgaatttggcaatagattcctacataggacacaaaatgaatgaacaacaaaagaaaataataggtaaattgaacttcatcaaacttaaaaacttttgtgtatcaaaggacattatcaaaaaatacacaaaggacattatcaagaaagtgaaaagaaaatcttcaaaatgagagaaaatatttacaaattgtatatctgttacgggcctagtatccagcacatataaagaaactttgggccgggcatggcggcttatgcctgcaatcccagcactttgagaggcagagacaggtagatcacttaaggttaggagttccagaccagcccggccaacatggtaaaaccccgtgtctactaaaaatacaaaaaccagccaggcatggtggtgggcatctgtaaacccagctacttggaaggctgaggcaggagaacttcttgatgccaggaggtggggattgcagtcagccgagatcatgcctctgcactccagcctaggcgacagcgagactccgtctcaaaagaaaaacccacatctttacaactaaacaacaaaaagacatgcaatccactttaaaaatgggcaaaggacatgaattggtatttctccaaaaaggatatacaaacagccaacaagcacatgaaacattgttcattgtcatagaaaaatgcaaatcaaaacctcagtgagatactacttcacattcactaggatggctgtaattaaaaaatagaaaataaagcctgggagtggtggctcatgcttgtaatcccagcactttgggaggctgaggtgggcagatcacctgaggtcaggagttcgagaccagcctgtccaacatggtgacacctcgtctctattaaaaatacaaaaaaaattagccaggtgtggtggtgcagcctgtaatcccagctactggggagagtgaagcaggagaatcgtttgaacctgggaggcggaggttgcagtgagctgagatcgcgccattgcactccaacttgggcaacaagagtgaaattcc

SEQ ID NO: 5631 - DNA, 184107 bp, Homo sapiens
  LOC388927 gene - 19206044 - 19350150 of chr2; NCBI Entrez Gene ID: 388927; Build 35; sequence includes 20,000 bases upstream of initiation codon and 20,000 bases downstream of termination codon of the gene
ggcagacctctgagggccttctgcctgtcaggaggtggctgaaataccctgacagctcagaactgtttgcttgaagtaacttcactgtacgaaaataagaacatttgagaaagtatttgatgagtattccaaactcagtaggggagtagaagcagtgaagtaatgggagcaaattatgtatacatgtgttaaaacattacattatatcccataaataggtgccgttgttatgtgtcaattattaaaagaaaaaaaaaaaaccaaagactttttttttaaaaaaaaaaaaaaaagggagaaaatcaatgtgaataaatactttacctgaagtaatttatggaaaaattaaaaataacttttgaaacagcaaatggctgacttgacactgtggaaaacaatgaatgaagaaacaggaatttgacaacagaactctaaggaaaaaggaaaaggaaagagatcagggaatgatagcgatatagaaactagatcttggagaccaaagtatgcacagtacaaattccaaaaagagaagacagtaaagatttggcaaggataaacataaataaatgacagaagaaaactgctgggtgataaaaatggcaaggaaatagtaaaaaatgacagaaagaaagacacatataacagacttatactacaaggaaaagtatcactcagattagtttaaattaaattgaatgttaataagagacctagtcaaggcaaaataacaaaaggattaaaaataaaataatggccagcaatatatcagaaaacaaaacagcgaaagaaatcagttagctgacctagatctcagacaaagtagaaaataagacaaaacactttctcccctcatctctgctcacccccagataaaaagctttcaaggggcccattccaaagggtcaaagaattcattcatattgaaaatacgggatcatgaatttgtatgttgtgaatagcataatatccaataggtactgctctaacttagaaatcggaggacaaattaacaacaaagctgtgctagatttaaatatagcactatcaatttattacagtttaagtaggcaataataaatgaaataggaaaacaggagtaagtaccaagggaactagggtaaagaatgagttgaatttttatgttaatgatccactttacgtgcctacagatagggtaccttcaagtgtcctcagaatactcataaacatcgaattactcctattttatgccataaagaacatctcaataagaaacaccaacgaccgaacagaaagtgtactgattacagtgtctaacccaaaagctttaatgaaaaataactcataaaacattgagttattagacagggccctaggtgaactcctagcctctgtttagattgtcatggccttgacttagaggacaggcattttgtactctgcgctgttgtaattttcacaacaaaggaaacaatatgaaataatataccccagcaggggagcatagaaatttactgcaggcaacttcatgttagctttcagaaagaaggaaatatatcaaatgattaaaaaaaatagaactatggagttagaaaggatgttaagtcatcattctgtctgactctcattttacagaggagggaatagagacccagagatggtgaggatgtgtgtcccaggtcgggcaaataaaacttggctagtgcccgagtcttctggtgggttctatattctgttcctttccttgctttaggagtttgttatgaagcgaggatgggcagtacaatgcaggtttggatcacatgattggttccagatttgagtgactgtggtgtgctcatttgccccgcagagctgagactggctgtccccagagcacttcttggatccggagcctctgcccctgttgtgaggggagtcagagcaatgtggttgttattaccagaatcacaggctttccacctctgccaggtaacctgcgaaacaacctctgacatcattaaacgctgaaatcactgaactgtaaacgtgtgttagcggatgttttctggaacgctctcatgacctctttttgttgaggctcattttgtttttattcttccccaggatctgactggcctctcccctttctgtcctccatcaccagcacccgggattctgcctcctgtctttgcatggtgttgggtcgagctctgtctgtttctaagtcacaccgggtgggcaactgcttttccacatcaccgggccaagttatgttttcttaattgtccggctggactgcagtcgcttaccaggccttattaacagagcagagaaagcagagaaataaaagtcacactcgcttttcgagactcagctgaactaactgcttcggggggaccttgtttccagccatgaacttatgaactgaggattttatgaaatccaatcctcattgttattatagcataatcctcttgcagttatccacccaatttttctgtaacagtcacttcttccttccttttcctctcagggggctctgggcatttaggccaggaacatccatctgctgttcccctctttctggtaagatgccaggggccaaagctcatggaagcccacccagcctctcaactctcagtcatgaatggggtgtgatacctgcagagcccctctggggtggaggtaggaggatgcctattgaataaggtctcttcaacttactgcattttagttttggcattttcaaatgggtactttgtgttgagaaataaaagcaaagggggctggatgtggtggctcacgcctgtaatcccaacattttgggagaccgaggtgggtggatcacctgaggtcaggagttcaggaccagcctggccaacatggtgaaacgtcatctctacaaaaacacaaaaatttgcctggcatggcggcacacacctgtagacccagttacttgggagactgaggcaggagaattgctagaacccagcggggggaggttgcagtgagcagagatcgtaccactgcactccagcctgggcgatagagtaagactctgtctggaaaaaaaaaaaaaaaaagcaaagggcactatgagaagaagaggttgtagagatcataccctccagactccaatccttgtttcagtttgctatttctacatagcaaattacgtcaaaacataatggctaaatagtcaccatttattggttctcgattctgatttgggcagggcttaatggagctgtctctttctgtgtcaggtgggtttaatgggagcgttggttttcctccatgcatcctctctctctctctctctctgtgtgtgtgtgtgtgtgtgtgtgtgtgtgtgtgtgtgtgtgtgtgtgtggttgcccaccatttgcttgtctaacctgagtatcttcttcatgcggaaagtggcttctgagaggcagaagctctgccacattctgtgggtagaagccagtcacaaggtcagcccatcttttagggaagggcaagtagccttcatctcttggtgggagaaatggtttgaacttgcaggaatgggagggatgcttgacaccctcttcattgacaatctactgcactctgttttgaagagagatgcagttgaacccccataacactgagtgactcggcgtattcgtagcatagttgactctcctgagtaccagcagaaaaaaagctcacttttcctactttgaggaaagaattgaaattccctctcagactaatctgaaaatattagggagtgagagggtagtagtgatggtgaaagacaggagtgagatggaaaagagacatgtagttggaggagctctgccagcccatgactcagatccattagctaaatccagttcatgtttccatgtggacttttcataaaccccccagggcttatgtttttatgtttgttgagtgactattgataacaccacttcactaatactgtttttaatctagaaatgtgttgagtaagcaccagaaaagtgaagcattgaggcttctcagtcttatacccgaagtcaaaaatatgaccatgatactttaactgcaaaaagtggtggtgagatgaggaggcaatatcgtgctaaaacaggcttgtgcaacatggacagtcgctgccgtgaaccctgagctcagtcacagcagccttctgagactcccggaggaggtgctagagtctggctgtttctcttttttcttttttcattgagacgtggtttagtagaaagttgagggagttggtttgagaatggtattttgtgatatgtattgtgttttacatacttttacaagctgcttgcttctagtccagaaaagtaaaggtgtctatcagcatggacttagcttggagtaaggaggtgtgaggctggtgcactgctactgggtggtggctcagggttggggtcttcctatttgtccagtctgaagtagcagggaatccctatcttatgcctacttttcagtgttcttgggtggtagcaatgcacagttttggaagtataacaagtagttctcctattttggataaaacttagttcaggccattacaccaattatataataattgattctaaagaccttgaagtcaatagctagatagacttctttggtataaatatttctctgtacagtactttgagtaattatttaagttggagcattattaaaaacatgaaagtataaggatttattcagtttgtgttaaatatttaacaaaggccctgtagttactatttatcacttgattctctgaatctttgagtacgtgagcatctgctgtgagacaatacctgcccagctcttcaggtgtacgcccacactaaaaagttacataatgttttcccagttgaaaaattgggaaggtggtgatggtaaatgtgatagatgaagtaataatgactggtgctgacctcatactggtgattttactctttggattagtttcccatggctgctgtaacaaattaccactaacttagtggcttaaaactgcacacatttattctctgacagttctggaggtcagaagtctaaaatggatcagcagggctatgcttctctggaggccatggagcaagatccatttctctgccttttccagcttctagagggtatccatattccttgttttgcatccccacgtcactccagtagcttcttctaaaactccagcactcctcctgtctccctcttgtgaagacccttgtgattacattgggcccacctaaatacccaattttatgattcctaacttaatcatatcttcaaaatccctttggctgtttaaggcagcagagtcacagattttggggattagggtgtggatatctttggggagggagacattattctgtctaccccactattgatgtttgaaacattcagattccattagttgcaaacatctacacagtcttttctaccacaatgtgggtttatttccatatgaaaaattgtgtcaatataatggtaatttttaactcaacattttggtgttaatatgctggactgaagtaatcatttcacaatgtatatgtctatcaaaatataatattgtacaccttcagtatataagatattaacacaaaataaaagtaaaacatacctattgagtaccaacccctcataaaaaaaataaaacagcaatgagaaacaaaacaaggtggagcaagcttgaagcttgttatcagttaaagagaaacactttgcaatatatgaaaaccttaagaaaaaagctagaaatcctgtataatgctttattttggggcaaatatggaatgatatggtagctataataacattgtactttcttctattttaagctatttagggaagctataactgcaaatgaggaagctgtgaatacactttccttagtgttaaaaattaactgataaagggggtttaaaacttgaatcatggagttcattttgattgaactgatctctattaaatgtaaatgctcttcaggacctatgcctcaaaggaataaatttaagaaattaaactaagttaaatatgaaaatacataaatcagagatgcaaaggatggagtaattgtgatcctagctgcaagtaccagtggcgatttacctcctctgttattgtatttttgattgttattattttttttcgtgccctggttgaaatttcattttttgagtggtctgcccttgaccttatttctccaaatccctgctgcttttgatgtgagcttttacaaaatgtgaggtatattgggaacatatatatgacattacaactgataattcttaatttgaatttcaagttctagtcagttcccctcacagtaacagatgccatccaagcaacaattgctaactttgtttctcccgaaaacctccatcaaatggggacacttgcctccaggagaatgggagagcatgtgcaaaattggggaggacttagaaaagttttgtataggtaatgtttgagctaattaaaaaaatgaataggcattattttggtaagaaaagatgggaggaagatttagaaaggagactaaatctcaatgaacatctgttggattcgttcataaatttcttagaaagcatgcaagtttgatggtttatatgtaacaaaatggttttgttgttaaacttgtttattgtattctgcttagcatcttgttgagatggacattagagatctctaggatcacagaaatttcatttccttgggaaaagtgtgcaccaggatcctgattaggcctgtgttttcccatcccaacctggctgtctggcactcacctgctaagagatcaggattgatttagaaaaagccatcactcataggtgggaattgaacaatgagaacacgtggacacaggaagggggaacatcacacactggggcctgttgtggggtcgggggaggggcgaagggatagcattaggagatatacttaatgttaaatgatgagttaatgggtgcagcacaccaacatggcacatgtatacatatgtaacaaacctacatgttgtgcacatgtaccctaaaacttaaagtataataaaaaagaaaaagaaaaaggaaaagccaccttcagcacaaatgaagcaaatctgtggggttgtctgcatggccacaggccctggctaggaatttaggctctttccatttgtacaagagcagtttccttttaagttcataattgtttattcataaaccttgagagagagtgaaagaaagagagaacagactcagactctgcctgtagtcttctctttatcctgagatttctttggggtaagattagcatgaaggccattttttgctatggaggccaagtagactcgggaatgggaagtgatgctgggcacagagacccctgcccctcaaggttgggggaggccttgacacagcccctcctgtctgccttagtttggagaagaggcggtacaagggtgagaggaggtgaacttttgctatgcagagagacaagtcagacaatatgagttttaattgaaatcatatccccagcattttacttttcaaaagttgttagcatgatcgaggttgcattttcttgtgacgactattattactgtcatactgactgctctgggcaggggctgaaggttacatgtgggctaagaacgctgggctgcgtgggaggggctggcagacccagcctctccatcccccaatgctcctctggagccaggttccaaaaacctcgcctctggctgtggctctctctctggacactgtgaatccttctctcaggcttatggacctcttgaatcatcagtgtcttcctccatcctgggtggctggattgagttctatggctctttgatccaggagcagacttttctgtgagagtttctctgcctgagagcatattctttgagctctccaagggtgccattctgagaggggcaggctgtagcttaactaggccccccaacatttactatgtatttgaatctcttggggatcttgcttaaatgtaggtactgattcattgggtttagtatagggcttaagattgtgcatttttaataagctcctaggtggatgccaatgtggctggtccgaggaccacactttgactagcgaagacttagtgtatagctgaaaaccgagttggatgaggctgctcggatgtgtatattttttagaaacgaaatccaaggagagagaactcaggggctctctgtatttgtggagtgcctggacctttggtgctatgtggggtgaaacctatgagaggtgagaaacataaccctgctccctgccctcagagagtgaaagccctagttaggaagacaaggctggcacacatgcaacaatcaatcacctgtcatattttattgctgctgaagtgccaaaagcggagtacagactcccgtgctctgatgttgaaagtagcaggcagtcagagggaggaggggaatcgtggttcaaagtggggtttgctcagatgtgagggtggttaactcaaagcagtcagtggaaagggtgatgccatgccaggcgcggtggctcatggcaataatcccagcactttgggaggctgaggcaggcagatcacttgaggctagaagttccagaccagcctggccaacatggtgaaaacccatctctattaaaaatacaaaaattagccaggcatggtggtagtatgcctgtagtcccagctacttgggaggctgaggcaggagaatcgcttgaacctgggaggtggtggttgtagtaagctgagattggaaattgcaccactgcactccaacttggctgacagagagagaccctatcttaaaaaaaaaaaaaaaaaaaaaaaaaaaaaggtaatgcccttttcaccttgttcgccaggacattactactcttatttcctggtcctgggtgtctccagtggtttctttatgcagactaagtgaccaggaggagggaaaggacgtctttacattgccttggcctgtgctcagccctgtggggtacaacgagggaaatgtccttttacccaggaatccattcagctaacatctcccgagggccccctatattctaggcaaagcctctacaaggtcatagctgtgtagaaatgagtagacactgtccccaacctttgggaactcaggttggtggaaattaaataacatggcagatctggttatagagaaatttgtttcctgtgaaaaacatggaactaaggaattccttactatataagcagtgatagaatttcttcaaaatcagttcaggaaaaaaggattaatcattctcagtcaagacatgtttctgattgttctgacagactctctaaaaaagagctctccagagtcctctctcgcttctttggaggtggctgtgtttggagtaaagtatcagcgtggctctccaagcccccctgattttaggatccttaggaaaaccaagtgtcatcagtttgtgcatacctaaacaatttagtggctttgcagtgaggttgtgtaagttggtgggatgaggttattttccaggttcaggtgtccttgtggccatgggccatcctgtagcttctctggtaagaagccacctctgacataatctgaagcacaggagacaagcatgagccatcgtgctcactaaattagtttttgagaggggatgttgccttaaccatccttggaagaaaaatactgtttcgtcatacttttctttaaaacgttttagtactgaaatgactttgaatacaattactaagaagttcaaaatgtttaatggggtccgtggctgtcaaactcaaatgcctgtcacgttgtctttctaatgtgtaccgaacattcctgcctggagtgagaaccatgagtgttatttttttggcttggatcttggcaggtgtgtaatgtgactcctgatagcaggacagcagattacattctgctataaaaccatttctaaggcttttggcacccaaactgttattgcatgtctgcaggtgtttagtaattggattaatgcagagccggaggaatgtctgctccccggctctgagaaacattgaggaaagacaaattcatttcggagagtgacctggaatgcatgatgacaggcctgcgctcacacatgaagtcagatctaagcctgcacatttcaaatgaactgctgtgagcagtcaccttccataggaaagtttatccaaagctaaatacaataacaatggccttgtgagtcaggcgggaaggggcttcagcatgggtttgatcctcttccaaaagcaactcagacaactggagcttaagccttcctatcatgcaactcatgaaccctacaatcctaggtgtttaataataataatttcttaaaggccttggtaaacagaggaggatgctaagcctctcagtggaagtgcagagaccacactagtatcctggatcatcgtgccctcaccccttaattcccaccttgactgtaaagttacagatttcactgtgacaagacccccgaaaacaggcttggtaaaatggcaagcagtgttcacacctcaaggcaaccaggtccagcgccaagaagaagtggctgctctcagggtaattttgtcattctggctaattgaagcttatgctctcttctgagagcaagaagctgaactctcagaggctcccatctgagtagataaaacctaatggtttggccttacaaaccaaacctctttctcagctttacaactcagaagggaggtggaccatttggagagagtccaagtagaaggaagataatagtaaaaaggcaagttttgtgaagaaaggcaaaagaatcagcactgcttagctcaaatcctagaggggtaacttgtagttcacaaatattattacagtaggtagtgagagcagaatggggacagatgggggaggatgaaaaaccagtcatggcatgcagagaaagagtttgaagctgagggcttataagacagagaaaatgagaagttggaggaatttgtgtgtggaggcaggagcgtggcccaaatggctactcattgagtcattataacttactggtcacaactacatgccggtccctgaatgtgtggggtgtgcaaagtgacccagatatatttttgaagcaggggcctgtcactgtgatgtcctggaagagatgaccagatggctctgaggtcccatggagtgttcccatggcctggggcagggaagagggcagtgtgtctgggaaggggctcctcccctttggaaaacataaggctccttggctgggttgacaggttctagctgacactccagttggctttccagctgtcagccagaaaaacatctgggtgagcccaagggccatgttggggaagaaagggtcaggtaggtggtgtgtatgaagagggaaggaaaggtggcctatgaataacaatcaaacaaacaaaaccaaacagtaacaacaaaactttcaaatgaaccagtggtgtcttgtggggcttgggcatcaaggctgtgtaggaggcagtgaggtgtctttgccactcagccagtgcctggggtgtttggggctgataagggcaatcctagggcaggtcaggagaagagaaaggggctgagggcttgagtgggatgaggccgtcatctcagggcccaggagaaggaagttcagtgtggatcactggaaagcgttgcagggcaggaaggatcagggggagcagctcttagtagatcacagcataactcctagaacaggagtttacattttctcagtggcagaaaagagcttggataatcaaggtggtaacaagagaccataaggactaatgagactccaaaagcttgatcttaaatcctcattcaaaatttgaaaatgaaattatgagactgctgtctgaggaactcactgaatgatctttgaaaagtccagagctgcataaacccatagggttaaactagaaaagactcttagaggctggaagcccaaccccatttgtttgcagctgaggaaacagagagaatggggtttatccctaatccccccattagctgggctgacctgggactacccaggactcctgaaaggctgtgggatggaggatgtaagtggcgatgagagggaagcataactgctgtgtgcttatttgtacactgaaatgatcccatcaaccagaatatcttaactaagcacatgccaactaagtgcaaggcattgagaaaggtagtgaggtgttcgattaagagcttccaattcttttgggagtaacaagacatctctggtggagagaataatactccacaccacattaagccagaatggtactttttgtttgcatacacaatcttacaaattaggaggcttactagccctcgtatcttccattcttatccgagcaattattcacgaacttcatttatgaaacctaaaggctcaaggtggattaaacagtaaaccaagagcagaatgcttgattgaataaggccaggaagcatgcacacactgcccctcagcctcctcaaatattattctagaatatggattgcttgataattcattgggtggagagaccactttagtgggcatggtcctggatgattttgaagaggagctcagataatacgtacgtgtgtgtgtgtgtgtgtgtgtgtgtgtgtgtgtgtgtgtgtatgtgtgtgtatgtatgtgggtagccacaagagaagagggagaaagtgagagagatgagagaagaggagactccacaaggcattcataggctagttatttggtaaatcatggtgtagctcctacttatgatgcataaaaatgcatgattgatattggtggtatatgctgatgttttcttcacaaacacctggggccaggccatgaaaagcagaggggaattacgtaaattccttcagctgagtgtcagaaaacctgagttctctcaccttcccagttttgctagctttctgttgccctcatccatgaataggggtgtcttaatagacagataatttaaacttacagccaatagtaatgctgtggccagggagcatctggataccttctcagctctgagtccagacttgtttagtgaggggagtcagggtgcccacgaatggctggcaggactccctgggcaggaaggaagagtgccctcatcagactcctgttctttgtcaacattttccttcagcaccaccctaccctggaagctcctgaaagaaaagagtcactctacactcaaaatctctccttgtttacaagatatttggggcacggatggaattattgcatcacaggccaatttcttcacctcttttaaaaattttatcacgtgaagcagcatgctgaaagatctcaatgctactgaagattgcaaaaccaagtggagattcatctgttttggaactctgtcaaaagacttttccatatacattccattcccttccacagctcacagtgtacctaccctgtactttcagagcagtgaggcagcttcttcacctttctcaagccagggcaggtcctgacaaattactctgtgtcaggatctttccaggagacattttccctggtaaaatgctcatgaaacttcactgatgtggacaatctctggtaacaaatctgaattgtcaaagataacaaaagccaagaaagccagttgtatacccaaactagactaataaatgcttcctgattaatagagggttttatgaaatatgtttaaataagcagattgaattggatcataattaacattacttatataattcataaaaatagttatttcattaaatcagaaagaaatttctactttgttatcctgtttgttttgctgatatttttaaatcaaaaccctttttattcaaagatgtggcacaggtaaattttcagccagacactcaattatccaaataactgacatctttctgctctcagaaaaatgctctaggaacacaggctgcttgtttctctcctaccttggccagcagagcatggcagtgtaaaacacagaaaattggcaaaactccattttcaatctgtgttagaaactgggatcaatcttgcttctctttctcccttaaatagaaataagaaataaaagaaaccctttatgtaaaattggatcttgacattctccaaagggtggcagctcctacattgcagatgaaaagggctcagttttcccagagaatactctgagaaaggaaagtcaaggtgaatgaatggccttctcctgtgagtgcaagaacttctcctcagccacctccaagaggacagaggggaggcatctgaaggttagggaactgagtcagcaagggccaaagggacatgacaaccagagaggttgggagtgggagcttttgctgaagtttctttcgcttgtgtcctccctggcaaggggcttggcaaggcttcctgctcttccttcccccttctccaagcactgagaacaagtcgaaagaggaagcatcaggggaagaagatactgaataactccaaactcaagcactgtttgttggattcattgatttactcattcattattcaaaaagtatcaggcatcctctgagtgtcaggtccaaggcctaggctggaagtacagagataaatgattcacaatcactgtctccaatatcctcccagtctatgggcccaaggagaagcttcatcttgtcaaccatcttggcgttctggctgcatttgtatttgggcttcctcactcattgttgacttacagaatcaatcttttccagtggattaggaccattaatatcttataagttgaatagaaaccaatgtaacctgcataaacaagagaacttagctttggttctgcctcagggcaggcctagggtaaggcaagtgggaggtattttgtacacaaaatttaaggaggctctcactatcaaggtactgtgagtacagggtctgcctggatatggcaggttgacactttctgtaccagtcatttaaatgctctgagtctcagttttctgtctgtaaaactgggacaatacccatatcatagagttgtggaaaatttagtaatataatgtttatgcaagtacattacaaactataaacaatacatatatacattggttttatcaatagtaataattttccttaatcatgacattgataataaccataaccaaaacatcctttgcagtgaatgtagcagattacatgggaaagtggaagacagaaatggaagaatctggtccttcaccttataagaggcaaaagttaaatataacacagtagttaagtatagtaagattttgagctatagagtcagagagacttggatgttaatcccacctctgtcatttacaaatgtttaaaccaacctctaaaattcactttcctcatgtgtgaaaagagaataataataactcagttgtagggttgttattgaggattaaatgagatgatgtgtgtaacactctcaccatatcgcttgatatttagagagcactccacaaatgtgaactattattgttacatggaactgtaacgaaccaggtcctggtgcagactagaatgtctcttgactttgctttttacattttccatagctgaaagcatattacagaattctaaattataaggatattttccctgcaggcttgattttaggaagaattatgctaaatattgttctgctttttcaaagtttatccagaatgacagttgtggtgtataatacctgaaactagagattggaactttttcttaaaaataggaacaggaggtcgggtgtggtgcctcatgactgtaatcccagcactttgggaagctgaggcgggcagatcacttcaggtcaggagttcgagaccagcctgatcaacatggtgaaaccccatctctagtaaaaatacaaaattagccaggtgtggtggtgcatgcctgtaatcccagctattcaggagggcaaggcaggagaatcgcttgaatccgggaggcagaggttgcagtgagccgagatcacaccattgcactccagcctgggcaacaagagtgaaattctcaaaagaaaaaaaaaaaaaaagaactggaaactacattaatgaaatcaggttttaatattcttattaatttaataatttcaatatttaccttaaatattattttaaaatgggaatttcatttgaaaaaaaatttttagacaatgtcttgctatgttgcccaggctggactttaactcctgggcttaagcaatcctcatgtctcagcctcctgagtagctagctgggactacaaggaatttcaatatttattttaaaaaacatgaagagtctgtcattgtcatgacctgactcctgattgccacaggcccactctctgcttcatccagtgagaggaagaatgacctttgtaactcttctgtgaagctaaaagtgaaaaggaaagataagctttggtaacattctcttacttttgagaaaccatgagcagaagtcagaggcatgagcagcgctggtctgggtcccttgctgcaggacttggctggtgcctagtgacagggaggccacatggagtactgagaatcaggaatggaagagaagcattgtctcagccccactagaaggaacaggcttggaactaagcaaggcccattccagccctggaagaggtcaaacagaacatccataggcttagggaaagacctgactattcaagaaaggatgagaagccttctctaagcaagtatttactgagcacccagtgacaccatcaggacttcaggtatcatagacacgatggccagacctttaaggagcttctggctggtatgaagccaagagttccgcacagtacgcggaaactcacttctataacgtagacttgctgctagtcgtatgaggattcacaggtaaacatgatcacatctcaccaatttgcctctttctgaccatatcttattcactcatctgttgtctatcaattcctgttgcagatgcctaatccaacttctggcatagagaaggcccttagagaaaaacattgtgaatgaatgaatgaatgaatgaatgaatgaatgggtgagtgtgctgggtgttgaatcaggtcctagccttgatgtcctaggaaagggattcttgatgatgagttacaggattctcttttaccagggagaagggatcttggacactaggaatctttacttatccttgaatgctagttaattaggtcattagagggatgttctttatttcatagggtgcatttcaatgcacaaagaggatcaaagttgaagactttggattgtgtgctattaaaatatatgtgataatttttttcccttgaatttaagtttagaaataaatgtgtctccaaagatggatttaaatgttttggatttataggtattaaaccaatgtactttcccttttttgttgttcagagtgcttaaaacttaaatcagagcccagctgttgtgctaaacctgtctcagtgcctaattccattgtcattcttactttacattgcgtttttatcttgggatcataggatgggttttcatgaagcccccatatatttgcaacaatttctgggaagagaggacatagatatcaacatttccttggaaggatttgtgattgttcacaaagtccaagaaccacaggtttaactgattttcattttcaatggtgattcccaggacacacaagcctatagtgactggtgaagctgaagcaatagatactcaagagtaactctctagcttatatcccccattttgttactgtgaccccaatatccttacccaacccctgtcttactttgaaggcagggtccacaaaataccagttgtaccaatggcagagctcagctgcctctctcttgcccaggggtgagattcactctctcccactatttcccgtaagacctttgcaagtcaaataccttacatcttttcatgctataagctgtgtgggaaatgtgatgtactttctgctgctctcattgcttctgagagctgtataatactgtagggaggcagtcagaaaaaagctggagttcaagaacttctaatggaaacttggaaacagtgccaaaatccagttttcctcccttgcttttcctatttgcaaaacagcgtaggagattggggctagttgatttctaagataatgatgatttttcccttgactcttgactttttttttttttttttttttttgagacagtctcactctgttgcccaggctggagtgcagtggcatgacctcagctcactccaacctccatctcccggctttgagcaattctcctgcctcagcctctcaagtagctgggattacaggtgcttgccaccatgcctgactaatttttgtgttttgagtagtgacagagtttcaccatgttggccaggctggtctcgaatttctggcctcaagtgatctacccgcctcggcctcccaaaatgctgggattgcaggtgtgagccaccacacctggccttgagtcctacttgctgtttcattacttgctacccagaaaattatcaatttttctcatacctcttatctcaagtctaaaataagaatgtcattgtaaactatcaatccagggcaggggtgaagatggctggtgagtgagtagttagcaataataataacagtggaaaatgaaagagattaagtaatttgcccagtgtcacaaaataatgagaagcagagacccaaacccaggcctagctgacccccaaatccatgccctgaaacactttgcaatactaccaagtgcagaggggcatttgcgaagatcaatcatgggatacaggtttgccctgagtgatgacatcgcacattaatcaaacttcacttgggggcaggaactggattctaaaagcaacctgaaggctgccagaactcggaagacagagtcaccttcaatctttatgaagccaagggcaccaactgagcaatctggaaaggacttttctagttatttcaaagcttaaatatgtaataaaattcttgaaaataggaaatgccaaccctttgttcatatagctgtattttaaaaaattatcctaaggatagattgagaggtgtacacaaagtgaaacatacccatggtcacttcagtgaacatttatagtatcaagaaagatgaaatgaagccagtgatcaacaagaagtttgcacaaatacatacacatatacacagtgggacgttaagcagacactaagcccgtatgtggaagagtacgtacagacggaggaaagttttcttgtgatattgctaaggaaaaaggcaggctacaaaacagtatttatttttatttcttaaaaaatatattcacagcttaaaaaatggacttgggcaaatgtaatattcacttgcccggagtggtaagactccaggtgacttttgttttcccctttgtgatttcccactgtctctaatctttctgtaatgagcatgtattacgtttgtagtcagaaaaaatgtctaataaacatcatgtattaaagaagccaaatcctgtccctgtagcactcagctcaggagttatgctgctttgtggcctcagtgtcatacaggatctctagccttacaggatttcagagacttaccctctaagcttctgtcctgagggctctggcactggccctgagcaagtgcattgggttggaagataagctgagtgtcacctctcctggatacaggtagttacccttctctgcaaagccaggtgacggatctgatctcatgtaccagacccatttcccctgaagaaacttcttccccaacccagtggactgccttgtaaagggtgtcccttgtctccactgggtgggcgtctttgtgctacgggatgtggtgattgtcagcctttccagggacttcctcaggtcttcaggcaggaggcactaggcaggctaggacaagcttgtgcttgcctgaatttgccctggcaacactcagggctcggctttgctccattgtcatgcataaatagcagataatcctttcagaagtaggcaggatttaagtcttatagtcacctacccagagggagccattggcagtgctcagccctctctgtgctgtcttgcttaggatgtgagggtgttggttagataggctcagtgttgtaaccagcagtccatggactcagtgattctgaagggcagctgcctgtcaacctttaaaaacatggtcatcccactctgagatgacaagagccactcctctaggtgagtcccttctatttgtcgacaccatctggttggtgcctgaccccaggggcactggccaaaatgtggggctagtttgtgctcactctaggagctgaggagaaaggtgggcaccctgagctggagaaaggctgctttcacagtactatgcctgggaggacaaaaccctggacagattcaagtgcaactgcttttgctcctctgaccttgtgacctgaatggggaaaagtgcctctgtgagcattgtcggcgggtggtgcagggagagggcaacattcaaagctctgctgtgcatgtgttcccttggttttcttgcctttctttctccccctttgaaatgaaaaataaagccacctgtcaaagctggtgatatgttcagacctgtaacccacacagattcaggaagacttcaaagtggaaactcctcggatctgattacatttcatcacagatggtaaatttatgccctgagcccccacctctgctctgacttctgtactttaagctggtgaatagaatatacagtggtgttgtttgcagactaatgagttaaatgccatttattctcttaaactttagagactatctggatttcaacagagatgaaaatgagacttagctttttttgtagattccgggctctgaaagacatttgcctattagaagataaaacattccctatcagggtgtctgccaacttgatagcactttaacttgtaaaaatggaaataaaaatagtgcataagtcacagggctgttatgagcaatcattaagttattatgtgcaaagcactaggaataccgcctgagacaaattaagtgtggtatatgagtgaggtattgttttcctgaggcatcagatacagatgaggctggaaaaaggaaggtgagtctgtgtgctgacgatgtatctgtaactgtgtatgccccctgtctagtaaactccactggcagccactccaggcacaccatgacctgactccaacttagcaaaaggagaaagccctatgtcacatggcttgcttctgcagcaattttactccagaaaacactgtcatgtcgcctcctcagagaagacctacccaacttttgctgtctgttatctctgaacttatataacacacatattcagggccatggaatttggtcttgggattggactgactaaaaaagtgctgttatttgacttatcctatgaggctctttttactgcttctatgagaggagcccatggggcttctctgttgttgcacagatctgtcaacttctgattgttgttcaaggctcagataaaaagcatttattaagaaaagagtaggaatgacttggaagagatgttgggctcattttagaacgtctccccccaaggttaagctgagtagcgcagacctggggagcacttccccatcctggcaagggagagtctgttacctcatgtgcacagagcactcatttgttttccaaatgggtacagctagcccagcaggagagaacatttccctctggttcagggatgttcctttgtttcctgctctgtcagctgtaaggttcaggcagcatcacgcccccacagcctctcagggtacaaggtgggagctctgggtacatgcctctagctcatgagttgttcctgcctggctcttcctcgggctgagaaaggatccaaatgcagtctggtttggtattgagtagctcctcatggccacttgactaccggctaaaaagcatccctagagagagcatttctaggctgtgctcttagagtaactaaagctgtgttaggggaatgttttcacatcagggtcctaagttggctttagactcccattgctctctcctccttttcctttctttgtggcactttctacacagattagaatcctgtaaacatactcttttagacaattgctattcccactggctcttcagccaagaatagagcattcaacagacatctcctgactgcagactctgcccatgatctcgaagaaacaaaataattgccgtcatcttggagctaacagtctcgtggtgcagacagatatgtaaagagggcagagtccgtggcagtggaggtgtgtgcgggatggggagctggaaggaccatgctctccacaggctgccttctccagcctcctccaggggtggcttccttgtctaatgggaaaccgccacagcagggaccacctcagaaggtgccttggggacacatagattcaccagatgtagacatcttcttttttgggattgatactggtattaactatggccttctctcagctttgaggctttcagagaggccctgtatctctacactgaaacttagcctggttcttaatttatcggtcttcttctgtgcacctggtcttacttctctctgattaccaggttaatttaaacatcaaatgctcttaagttttttttttttttctagactcctcaccttcttacacccatcccagcccaacttgcatgcagtcttcatagcttactcatccatcctcagcctttgcttgacttttgggaggcactgtctatacccttcctatagaaacagccactcccatcccaggcctgcctctggtgttgtggtatcataatgccttcagtttaaaatcctgctgaaatgctcagcacttgtaagagagctctcttagattatgaataatttggaacacagattgcttcccatatattttggtgcccctttcaaagtctagaacagtggattacgtgtggtagttattcaatatgtttctgtttctgattgctaataattttacacaccttatttctaaatctgtcaataaatactgcttgaccatattactctttcaaaattaaaacaaactcctcacacacttgtacacacaagaattacaatagttcctgtttattgaatactatgtgccaggctgtagatgacttacatgcatcattttattttaacccttgtgataactcagcaaagtaaatattatctttatagtacagataaagaaactctggttgttgcaagagcctggatgaacgaaaatctgtatgcccactgttcattcaatgatgatctatgccaattgcctagtgtaaatgcctctgcctgggggcagtgggatttggaagggatttcatggtgtatgagaggacaagggattttaggacccatgagtccccctgaattgcagaattttctttttctcttttgcagtattaagctttaagcaaaagttactttaaataaagtgatgacaataagagggtcatttgggtatttttactcatcatgtgactcaatatggattactcaatatggatttagcacagctgtattttaataatctaagccagattaaatggatccatgtttgaaatgtgtattttatttaacaatgtgttacttgcagtactttagatacaagtgggcttctaagttcctgttgaggaagctgtgtggatgttcaatgagctacagttttcacaagatttgtctcttccaaatcttataaaaaaataagcttcagtagctcatgtgtttctcaaataaatgaacactaatcaagtcacacagttcagttcatttagtttttaaaatagctccatgctattttactttaaaaatcttaagagatttcctgaagagatcattaccaccaagttggtactgacttgtggaggcaataaaacaaataaagtcattaaaaataatttgaacaaaaggagtaacttgatatcatgccgtctaccttcggttaaaatgacattttaaagttctctttcatcttactcaacagatctctaaaagaaaaagatgtgattaataaattatcctccataaatcttatgataactattatagtctttggagaattatgaatccacatctggaaaaagtattttatatgctactgcctgtaaagcagcatgccatgcattttacaagtgcacattagtaagtaaaaatacggtatgttttttgtgttcatcattttcccctccaaaagaagtgtaagcctagtttatttcataataaagagtgctaataaagtttatgtgaagcttgttttctgcccttactttggtgctgatgcagttttggtaggttatttggaatgggctctctatgagaactcaaggaagccttcactataagctgacttggttggtgcccttagaacccctgtgtgggcagaggccagctggtccagaaacatcacaggagtaagcagaacacataagaaccacacacttcacttttctcatgtgcttttgaatttgatcccttttatactattttaaatgcacaagtctcaggagctagtgattcaaaatgcaaggttggctcattttttgaattaggaatttgattaaacttaaacattggttaaataaaacgagcaaagtactttgagagccaacaatgatcccttggaaatagaaaatgttttttcgtttccaagcagctgtttgcaataagaaatggctggtgaaagagaaggacgcagttaagtgaaggtaacccctccagggttttatggtgctctgtagtcatgtgagcacagtcagtgataaatatcgcaatagaggtttcaatgtgcctggttttattttcacgtggatgcttgaatacatttcaactcaagtcacagaatgcatttaatgactgtggaaaagcacgatcataacatacacaaaagcaaccttagaaaaaagagatgtatgagtctcatttctataagaataacctacaacaacccataacaaaaacacctgtaaaccaaattttcttttgtttggattttggaaaagcagcaggctatctactaagtaaataccaggcctttgggctctagaaacttttaatgcatttatcttttgggccttgtttccaaacatttagaattaccagataaagggcttgtgatgctgttgcatagtgaggaccttaaaggtcactgagtccagccccattacttcacagatgaggaagctgaggagcagagtgagaaccaatgactcacgaagacaggattaggaccagtgtttcctaaatttaggcctcccaactcctaatcactccagtagattgaaaatacttctaatttaaaatgggggcagcatgtcatgtgaggagtggggtctgcattcctttaagagaatcatcaaaatacattttctagaatccagtgacatttattgacaaaggcaattgatagttccattcaaagtgtcacgaaaacatcacctgattactatgagataggtaaatgtaggtatctttgcttcactcagggaacactgggaaatagttttattgttctaaatttctagaattatttctaccaataactagatgtgtgagctggcataattctcacaaaagctatgcccctaaatttcttcaattttaaaataaaaacagtaaagatgattgtaaagctaccttttaaataaaaatatatgttttaaaaagttccagtaggggtcttctaatgtccgtttccatttctaaccagcgcctatggatgtgatgatatcaggcattgctgtttaacaaaccactccagaacttagaggcttaaactagcaatcatttattgagctcttggttctgtgggttgctgatttggtctgggctcactcatgtatcctgatgaatgtacttctgagggtgaatgggttattggctattggggtgctcatctgggcacatggcttcttttcttatataagctagcctgggcttcttcacatcttggttgcaagttctaagagatggagtagagttaatcaagccctcttgaggcctacacttcaaactggcacaccattatttttatgtcattatattgccaagtcacaagaccaggcaaattcaaatagaaggagaaaaagactcttcctattgttgaaaagtcacagttcaaagtcaaactgacataaatacaaagacaaatggagacttgtaattatttttgcaatctacaatagtggctattattattgagaatactatgtgttccatgaatcactggtaacaaaaaccttggatttcatgaatcagtataaaaacaaaatatcatagtgtgagaaatacacacaagtattcaaatattagaaatttttggttagaataaattagaacatttaaaaccaaataccaatcactctctatccccattattctatatataattttgatttactaccaaaacaatgtaggaggagtataatctcagacaaaagaaatggcagtctctcactagtattttatatgcctagtttattgtccttattttccttactggtctgccaactggtgaaaacttcattaagagtggcagtgtttcatgctgtgaaatttgaggaccactgactgccctagagagtatttgtgccaatggtcaggtggtgagcagctcctcatgtatggctttatataagccttcactgtgaatctgagttccagacacatctcacctacagattggtttgagtaacacggtgaaggatgattccaaagacctggccccattgggaccagatttaatttgttaaaatatcaaagaacacatgtatctctcagtctagtggcttaacagtaaagctcagtgctttggctctattcttacctggacagctggtgggagaaataggccctcagagagcctggttcttacaagggtgctgcattcccaaactgagaattctccattaaatatttacttggtcaaacttgagtttttctatctgtaaaatgggataatagataacactattttcattgtatttttgtcagtattaattaaaataacacatgtaaagtgcttgaaactatgcaaggctcatcgtaggtgctcaacagagcattggttggttggctgggttttaaaaaatgttaatttttgcacaacatgccttcgtaccacaaagttgagtatgatatgccaaagactttttttttgctttaactaaaatagattgtgttaggaaaaacattctagcaaaataaatatgaaatcataggcatattttataaaaatgagaacaagtacttataactggagatctttctcacaaatatttaaataacatcagtatctacataaattaatcctggttctttaaatagcacttacctaccatggatgctttatcatggggaaggtgggttccttgggcttctaagatagcctagacacttttgtggaaattaatttgctactttttttttttttttttttgctactagcttttgtgaccactactccaaccccctccttgccaacaactaatatataaggaaccacttacaacttctcaatcaatgactccaatttatctttttttagtatgcacatcttattcttatagttctctagggatatcaagacaaggaaataaaacagaataatgtgatgacctagtttgtatgaagccactattgatgggtatggtctaaagtttggttttgtttcatccctactaccagcttttcttacagctatagctttctttattcttaattgacattaaacagtctgttaccaactattgttaagacaagttaatatgcagaactgcttcttggttgcacgttggagttgtaaaattttcaatgatgctagaactaacaagactttaaaaccaagacacagtgatttttcaacaagtctatttacatcatagtctgtgaccaaatttttcctattgcttttcttattaagttggcttcctttttctaaataagtgacttctgagaccaacacacacgaacacacagacacacacacacacacacacacacacacagagagagtctctgaacaacgaaagtccctgctacaggtggccatcacagggcctcacttacactagtaacttaacacaatgactctctccacattgattggtggtgattgagaaaccaggactggtttctcacctctgtggttcccctgtgctcccaattctgtgatacgctatattagcccaccactctggaaggcttccagagcaatcgttaattctatctgttatagatagagttaattctatctgtggctactttaatgtccttttagcatccccggagtcgtaattcttgccaagaaaaattgatcccaaattttgctggagccaaagaaaccacctcagtggctttcttaatgctgttggtgtcaatgaatctccctccccacttcatacacacctttctacatccatgttaaaaagccacctgtgaatgtatgtgcatgtgcgcatgtgtgccatttccttattttttttcatttggaatattatgtttaaacttgtcatttaaagcttttgctaaagctatttattgtacccactatccatctggaaaaatgaagttacagtagaccaattgataaacctgagaaaaatagagagaggaggatgttgtgaataatagtaataacattaacaggaccataataaactgttaatttcctgagctaattttaaaagcctatgattatgagtatgaaaactcacttctctctctattgaattgagaaaagtctgtggattatggcaatcatatatgtctgacccttcatttgtatttttaagctttgtttggcaagcatctcttagtatcattttattttttttactttacttagcaaaataaataccttcatgatgaggtggcatgaaaatcccttactataaagaaaaccaaccttaaatactatcctttttgaaatggaactgacctccatggaatagaaagaaggaaggcaataagaaaacagaaatgcctccctgaaacagaacccagaatctaaaaccagtcattctcttgagggttgaaaatgttttccttcaaattaagttagacttgtgtttctaccactatagtttcagcaatggaaatttgataaggatggccgttgctctgttcccagatggtccagaagatctacaagcctcccaaacaaactgttcacgttcctgagcatcaattctctaataaaattaggtgcatttccaatagtaacactaacgattgcttgttcaaacttaatctacaaatctcctgaagttaaatagcacaactctgaatatatatatgtatttttttctaaaaatcaaagtgttctatatgtgagataacttgcattttttttgaaatatatattgatagttgtgggtaggattttcaggaagaagaaacaaggaagagcccagcctagcaaaggttggatgggtagagtgaacagcttctgacatggctcacagtgatctctttctcctggtattattgcccttggcaatctcctctccttgaagataagcttgacttggtaacttatttctaacaaatagaatatggaaaaagtgacgtgatgtcactttcaggattaggttattatgaaagaatgtgactttctacctgctaaccctgtctcttcacctcttcttgtgagcttgctctgatgaagcaagccgccatgtcatgaccttccctgtggaaaggaccatgtggctaagaacagaaggtggtctctggccaccagccagagaataattgagtgcctcatcataacagtgcacaagcaactgaattttactgacatcaatgtaatgagcttcgaagcagattcttcctcacacaagctttcaggtgataccacaggcatggcagacaccttaattgcagcctgtgagagactgaagcagagggccccgatacactgcacccatacttatgatccacagaaattgtgagataatgaatatgggttgttttaagtctttgagttttggtgtaacttgttatgcagcaatggatattgtattagggttctccagagaaacagaaccaagaggatgtgattacatacacacacacacacacacacacacacacacacacacacgaatatgatttgttataaggaattggttcatgcaattatggaggctggtgagtacaaagtcttcagtgtgggccagcaggctacagatctagcattgctgatagtggagttccagtctgaaagccagcaggcagagacctgacagatgaagacggtgcagatgaaggtggatacacagatggagtccaaagacaggctgctggagaattccctcttgcttaggaagacccacttttttgttccattcaggatttcaatcaattgaatgaggactgcccacatgatggaggaaatttgcttactcacagttcacttatttaaatgataatctcatccagaaacactctccaagttgacgcataaaattagccatcacagatgtgaagctagatcttataggtgtcttttagtgaagctgggacacaacgccctgggcaagagagagagcacatttcagttctacagcaggctgtagttttaaagaaccagtgttccaggaaggagggtctgacagtgttgtgtgaagttcagaaacacaagcctctgaccccagcaaaagatgagctaaaaagtctagtgaccactctaagaagaacctccttaccatgttgcaaactatctgaggagcaacaagattcaggtcatccagttttcttcttagttataaaattagttatagctcagctctcaggtcatggcagatgatttcaacaaattgttaagagagcatatatacatggaatgcccacttagatatgaaagagcatattactagcattactagccttccagaaatccattgtatatccttacctggtcataactttctatcttccatgagtttttattagatatttcataaccaataaaatttggagagtattcattaaacttcatgactatgaatgtcagtggaacacagaatgtgtattgattattctagctgttttaagatgttccttcttagctagattcattttttaggagtaaggctcttgtttcattctctttgggggaacccatagccttaagcacaggaacgatcatctcatatgtgccctgacggtacccacaggtggctgtgtgacaagtgggtaatgagagcagtgtccaagctcagatggagattttcaggaggtaggatgttttggtgagagaatacatatacagctgggcccaaagatccctcagggtcttaggtctttagggaaaattgtctagcagtaaagaaagaactgtgagcagccagcctaaagctgtatcttgtatagacagaattggaatcattggaactcagactttcataactgtttaaagataacagctggttttaagtgctaaaatgttcagcagctaggtttgtggctatattatgaaagttaacaggcatctgtaccagagtttgctttaattggagctgtgtgtacatgcaaagagagagacagagagagagagagagattgatttaaacataagaggcagttctgaaggtcacataagtgtagtgggagcctactgtcctgactgcagtattttaccaggcgatgaaattctaggcttcatggaaaatagaatctgaatttcttctataaattgtaagtgtttgtttcattgtggcctgctggcactaggatttggtctgtcaagggtataataaaaatgaacacaatgccaagaaaaacaaatgctaaacaggagcctgagcaggctaaaatatgcaaacaagccaagggatcccatcccagcagcagggtagggagcttggggtgttcaggagagaggagctcattggagtggagtcagtggtatgattgcagcttgcatggtgaggaaacttgcacatcagtcagtgaggctcttggtgcatgtgtccacctgcaggattagttgagattaatgtgcattgaagtccagtttcatcctaaagtttccaagtggaatcagattccgatgccaagttgcctcaaaacagatgggcaagacttttccatggagaaagagcaccaaggtgaaatgccacatgtcaggagaaggtatttcaaacttaattcacaacaggcagaaacaatatagaagaataaactggcctgcagaaatttctggtgtgaatattgagaaggaacccaaagttctgttcttagagagatgatgctctctgtctgctctctcaggtttccaaagttcacctgttgtgaaatgctagcatttgttgctggaaattgacaccgaagaatgttttcaccctctgcaaaaaaaccactgtttttatgaattcagtgtgagaccaaatatgtcatcgcttttactcaatgttacaaaaaggagaattttttcagctgtctttattggaacagagtgtgttttcacactactttgtgtcagtgtctcccattttaagctcttgtttttattggatacttcaaaattttcagcccaaactgcacatatcccaaacccactagcttataggccagatgactgggccagggaatagccacttattcccagatttacgtcaaaactgatcgaagtgaagatctaaacacaccacctgcatagtcttcagtcttagtttgctgggacccagttcattcccaagtgtggttataactataggctccattttcattaaattccaatacgtgttatttagaacctaaaaaaagacttttcatccctctgaatccctaatacgtgtggtttagcatcaccaactctgcaaatctgtcctgtgaccacaaatggaagaaggaacaggtagtgttcacatgtgtggaggaggagatgcagaagagatggtggcatggacagtattttgacatagatgttcaaagaaaaagagtgttagaaatgttgctaaacgccgggcacagtggctcatgcctgtaatcccagcacttttagaggcggaggcgggcagatcacctgaggtcgggagttcgagaccagcccggccaacatggtgaaaccacatctctactaaaaatacaaaaattagctgggcgtggtggtggcacctgtaatatagctacttgggaggctgaggcaggagaatcgcttgaacctggaagacagaggttgcagtgagccgaggctgtgccattgcacgccagcctgggtgacaagagcaaaactctgtctcaaaaaataaataaataaataaataaataaaaataaaaaaggaatgttgctaggacaagtgaatgactggcagaatgccaaatggaaattactacaaaatttcatatgtactctaaactctaaaataattacagatagattaataaatgtaatatataaaaccatagacatcttccctgccctggaattcataatttataactattatgcataattactaattcttaaaaactatacacttgttaaaggcaagtatggtacaatgaaaactggtcttagctttagaaaatgtggattctaatctaactttattatttgttagctgtgaaacttcaggtaagtgacttcacttctctgtgttttagtttcctcagtagtaaaacggagatagcagtagtcaccttgtagccattgatatgatgactcaatgatataacctgtgagaaagcatttagcactgtgccaggcacatataaggcatttaataaatgttataaaaatgaacgaaagtatgaagttggcacttatacgtgaggttaatatgggataaatatgtatgaatgggaaaagaacatatttgaaagtggaatattatggctgggaatgtgggcacagtgatggctgaaagtaaacagagcacgtggcttttcagaatgactgtgccttttgagggtggagattattcaccatgctgtgtttcctttcgttcctgggggctgttccttcatctcaatccacagtgtgataaacagatgaatctctttgaatggagtaagccaagacataactgaacccaagcaaaatgactcttcagcagggttggattcctctgttttaaaaacattccaatggcagtatctggaataggcaaagggaagatagaaaggtggtctcaaagtgatggccagccctggtcactcctgtttacctcccattaatgatctttctggcctgctgcaaacagcagagcactaagacgtctttcatcatggaagactgaggtcagaggttcaaggagagtagcagctattcagtattatatcgtgtaagggaggccaatatttaagggagggacctctgcctactatacatttgttttcaccatcagtaacttaccaagctctgtcctacccacttgttcagtttggagattcaacatttatttctttggccttgggttgctagattttacttgatagatatcttcagtgtgcaagacccactgttataactgagagaaactaattagcaattcatttctggcctcaatttgcacacacactgctcctttcactggagttttgccactttctttaaaggtaaattaaacttagcaaactttatcacgcgccagcttgtggagggctctgctgtacacatggtaggcgatgacgaggcacagagcttgacctcgattctctccttagagtatgcagtctcatgagagatgtttggtttctttcacgaggcagcttggtggaaaagctttccatgaagtggtataagggctgcagtctaccaatgaggaaactgaggcagaacaaaagaggaggcaaagtcattgccagagaaaagatgctgaacattatttcagacctgtaagtaagactgagagtggagggaggggcaacttacaaagctcaggagtcagaaggcaaaagtgacaggagctagaattcccttttatgcaacccttgtatgtgttccagggagatgttaggtggctgaatgaggaatacaacatattttacctgtgaaatgttaaataactttattttaggacaataatagatcagttgttcagaagttatatttttatattggtaattcctagatgatttgtacagaccaacattccttcggaaactttagaaagggacagattccttggagttttagagatgagggaaggctttctggaggagattgaatttgaacttggtcttgaactgagtctgaaagaggagtgaaattggagaattaaaaagaggtgacggaaattgactgcagggctctgtattctgtcttctgacaatttccttatttgccttgttttccctaaacactgcagcattgagtttctgttgacaactcctctgctgaaaaaccacccctggccgggtctatgcccaccttctctccccctggctgcttgccccattccagcccatcagtccacttgaactcagtattttaggtctttctttacctacctctccaggaaactcctttcatcagcaccacagagacaaccactaagtaccttccggagcccagagatctgcttttttcatcactttgggtcttccaggtctttcacaacaggtaacacccaaatcctttcctatatcccagatctgtctcctgcagctcaaacacatactttttgctttccatggactttatccccccagatagcctgccaaatcataaacctcacctgatcagcctcttcccttctgagcccgcagttcctaatctttcactcagaaagcacaggtgcaatttagtccataggcttttattgagcaccaagtgtttgcctaggcctgcagcagaggtgcattaaaaactcagagagaggtgcatgaatatgaaagccatgtgcttgcatctgatccccgtagcagcacctggatgctaataggcagggccagtgttacgaaggacattttagaaaagggaggaatgagttgcaagaaggttaagtgactcccacaagtcacagagcttatccttggcaaagccaggacagtgcaccaagtcttctgactcatggttccatagtccttctctggcatgttttccccccaccatcatgcttctgaacaacaaaccttacctatgggatagatcctgatattgtacttatattctagacatattgagggttagaaaacttcagtaatttgaccaaagttaggtgataagtggctgtattaggccattcttgcattgctataaagaaatacctgagactgggtaatttataaagaaaagaggtttactctgatggtagtttcttttgctgtgcagaagctccttagtttaattagattccatttgtcaattttggcttttgttgccattgcttttggtgttttagacatgaagtccttgcccatgcctatgtcctgaatggtattgcctaggttttctcctagggtttttgtggtttttaggtctaacatttaagtctttaatccatcttgaattaatttttgtataaggtgtaaggaagggatccagcttcagctttctacatatgactagccagttttcccagcaccattaaatagggaatcatttccccatttcttgtttttgtcaggtttgtcaaagatcagatacttgtagatgtatagtattatttctgagggctctgttctgttccattgatctatatctctgttttggtaccagtaccatgctgttttggttactgtagccttgtagtatagtttgaagtcaggtagcgtgatgtctccagctttgttcttttggcttaggattgtcttggaaatgtgggctcttttttggttccatatgaactttaagcagttttttccaattctgtgaagaaagtcattggtagcttgatggggatggcattgaatctataaattaccttgggcagtatggccattttcatgataatgattcttcctatccatgagcatggaatgttcttccatttgtttgtatcctcttttatttcattgagcagtggtttgtagttctccttgaagaggtccttcacatcccttgtaagttggattcctaggtattttattctctttgaagcaattgtgaatgggaatccactcatgatttggctctctgtttgtctgttattggtgtataagaatgcttgtgatttttgcacattgattttgtatcctgagactttgctgaagttgcctaccagcttaaggagattttgggctgagatgatggggttttctagatatacaatcatgtcatctgcaaacagggacaatttgacttcctcttttcctaattgaataccctttatttctttctcctgtctgactgccatggccagaacttccaacactatgttgaatagaagtggtgagagagggcatccctgtcttgtgcctgttttcaaagagaatgcttccagtttttgcccattcagtatgatattggctgtgggtttgtcataaatagctcttattattttgagatacgtcccatcaatacctaatttattgagattttttagcatgaagcactgttgaattttgtcgaaggccttttgtgcatctattgagataatcacgtggtttttatctttcattctgtttatatgctggattacatttacagatttacacaggcaacctacagaataggagaaaatttttgcaatctactcatctgacaaagggctaatatccagtatccagaatctacaaagaactcaaacaaatttacaagaaaaaaacaaccccatcaacaagtgggtgaaggatatgaacagacacttctcaaaagaagacatttatgcagccaacagacacatgaaaaaatgctcatcatcactggccatcagagaaatgcaaatcaaaaccacaatgagataccatctcacaccagttagaatggtgatcattaaaaagtcaggaaaccacaggtgctggagaggatgtggaggaataggaacacttttacactgttggtgggactgtaaactagttcaaccattgtggaagtcagtgtggcgattcctcagggatctagaactagaaataccatttgacccagccatcccattactgggtatatacccaaaggattataaatcatgctgctataaaggcacatgcacacgtatgtttattggggcactattcacaatagcaaagacttggaaccaacccaaatgtccatcaatgatagactggattaagaaaatgtggcacatatacaccatggaatactatgcagccataaaaaaggatgagtttatgtcctctgtagggacatagatgaagctggaaaccatcattctcagcaaactatcgcaaggacaaaaaaccaaacaccgcatgttctcactcataggtgtgaattgaacaatgagaacacttggacacaggaaggggaacatcacatactggggcctgttgtggggtgggggaagggggaagggaaagcattagggagatatacctaatgtaaatgactagttaatgggtgcagcacaccaacatggcacatgtatacatatgtaacaaacctgcacgttgtgcacatgtatcctagaacttaaaatgtaataaaaaaaaaaaaagaaaggaggtttaattggctcacagttctgtaggctgcacagaaagcatggtgccaacattaactcagcttcttgggaggccacagggagctacaatcatggtggaagacaaaggggaagtaggcacttcacatggcctacttcccctttgggaataagagagagacagagacagagcgcgtcagcagggaggtatcacatacttttaaacaaccagatcttctaagaactgactatcacaaagacagccccaagccatgagggatccacacctcccaccaggccctacctccagcattggggattacaattcaacatgagatttgggcagggacaaaaatccaaactatataagtggtggaggtgggacttgaacccagaacagaatgagtgtaaaactcatactcataatcatcatgtaatccagctatggttacaggaagggattttttccctgtgactttgaggcagaatctatactcatcaatagaagacggagagtcttgcacttggtttcatcataaagaggaacttggtcacagaggagcatcgaataagaaaatgggcaacattgtgggacaatgagtgccctattaatggggggcctgtttgttggacatgctacagagtcctgtattgtgtgcgatgttggaataagcagcttctgaggtttcttgcagtcttggcattcgaaatgttcacaaagtcagcacctatcatggaatttgccataaataaaaaaagctatgtttagaagctcaactcaagtattctggaactgggagatagaaaagtgatcttcactttcaggacagttccttgaaggtttaaggatttgtgacgagtcacttagcttacaaatgcccatgggtcccaccgataatacaaaatatattctctactctatgtctgtctccctctttcttatccccttagggctgcatttaagaatcatccaaagtgcacattttctttcctctttctcataataaccttgtaaaaacttcttcagaaaagaaaagaagctaatttcactctattgtgtctttagggctgggctacctgagctactgctcattttcctgtttgttttagggtctgatgcaagatgatttttaaattctgtattgtaggaatttagttcttaatatgtcagctccatcccactgagtgttccatcaacacacaacccagttatctgcagggaccttgaccccagacgggtagtcccagatggaagccaggacattgcttcaggaagaactatgaaaaatgcacataagatacaaaaatgtggattatgtgtgaaacaaacaaaagcaccaggcaatgtggaatttatgtcaacaaaagcttggtgcaagctgttgcttgcttctaagatggaaacagactctggtgcctggggaacagtagcagagaaggactttctgcacaaaagttgcaaaaacaaaagggatgacctgttttgacgataattgctttcaggtcttaagcgctcctcttttctgcatttacctctcccagcatttatagtgtagctggagacgtcactgattactgagccagtctaagccatgaggatggaaattgctgacatttgtaatgttttgacatattcaagagaagagaaaaatagtccaaagagtggggctgccaatcttgttgattataaaccaaccttatgactgaatgaggcatggcaaggttctcagaaagattcatgcactggaatctcaggaactgacatacatcatgctccagttacaggtcaattacaatagtatgacaatttttgttataaaattatatatttaatattcaacagaatatacaaacacatacagatgctaatttgtatgtacaataaaatatacaattaaatatgcaaacatgcaagtactatgttgatgtatagtattacatatattataattaatacatagttatatgatgtataattatgttaacatatatttactatgaacattcaatatacaaatattatgcaattatacaattaaaatatagtatatttaatatataattgtttgaattaccgtgttggaccccacattccaattacagtattaaatctggtgatattaaactgcacagactttaggtgttaccagccaaaaatattataagttctgatttccaagttagctatagaaatccaaaattattcccccactgagggatatttctaggtaggagacaaccaatatatacagttttttaaagcaaattattttcagtgacttaacacaatttccttgttcctctatggattgctgctggagcccctggcacctaagtgccgcaagccactgggtcagatatacagatgtatttgacaactctccacttgtgtgctgggctgggttggctctcagccactctgctaccacagaactgccttcctgaggtgttctggggagaaagagccccatgcagtccaactggcaagtcttttgcataaatatatctccctttacaaggctgatgaaattttgtggcccactggccacagcctcaacccaaatccatgaccgccacacactctccttcatgtgggaggtaccgctcctgttcttgcttctttagacggctcccaaggcacagtgcagcctcgtaaagggagattgcgggtggcaatctgccaggtctggcgaaatgaagcaccagaaaatagagttcgcctttgtggagaatactccgtttaattccatttcatttaatccaattcatatttagtgagtgacaactgtatgccagattctgtggaactgcctgtagcctggacttattttaattttttcccatttctaagtcttgatttcttcatttatcagggtgttattgatagtaatatgcctccctcaggattccagtgaggttcaatgagaatgcatatgtagggtatccaccccattgcctggcacatggtgggcacatagtaaacagcaagatctcagaggtatccctccattgacccctaagaatcattccaggcatggacagaagatctgtagggagagtctctgtagggagcgatgtagatcgctcctcaggaccacattcccgcattgatgcagctgggttatactgcaaacttcatagtgctatggagaaattacatgagaggatgcctgcaaaatgcttaactcatacttaatgcccagtacatttcatgtggtgttattactattacctatttatcagactatctagctatacatctatctacaaatttactttgttattactgataatttttttctttttttttttttctcaagacagaatctcattctatcacccaggctggagtgcagtggtgcaattatagctcactgaagccctgacctcccagactcaagcaatcttcctgcctaagcctccaagtagctgggactacaagtgtgtgccaccatgcccagctaatttttgtattttttgtagagttcagggtcccacaatgttgcccatgctggtcttgaactcctgggctcaggtgatcctcctgcctcaacctcccaaagtgctgggattacaggcatattttcttggctggaagcctcttgcattctggaggtccaatagtgcttctacacctctgttggaacttcctggctcctgaaagagtttggtcattccttcctcccttccacaaacatttactgagcacctgctaacttccagatactttgttaagctcttaggtcccgaagaaagattgggccacctgaactggtcacatggcagcacccctgacttctaaaaggttatggtttgcttgggaagacagagaagttaacacataatttcagccccatgtaataaatgcaggggcagaggtcaccatggggtgatgtgagaggacagagcagggacatgcactttgctatgggtctgctggaaggggtggccagggacaattcctggcagggagggctcagcaattgcatattgaagacaatatttctcaattcttgagacctaagaatcactattcatgcttctgttctagaagccccaaaggccgtggctaatgaccaaaaatgtttgtattttgccagccaaatatgcttggaaggcagaaaagtaggctgggctttctgagtgagtttcatccccatgggcagaaacatatcctggcgttccccatggtcttcagagtagcactcaggtctgtccacggagggacaagcctgcaagtctgatgccacagtggccagggcaaggaagttcacgaagccctaggcaggaagtgataaccaaagatatagaaagccaattggccctccatttctgttatctggtgtagaaagtaatgctctggataccaaggttggcttcttagttaatgctttgaccaaaggccagtaaatcttcctcatgattgcagcaacattttcaagaaccccgacttagaagcctgtggtgccatccaggcctatgcctgagatggaatctggatgtgccctgtaccacatttctcctgtccatttcttgttactgtattttcctctggtccttaatatctgtgctaattttctgttccattttgttctccctcaggaagccctgaaagtaacttcaaatctcatgaaaagccaaacagctagctcagctttgggggttcacaaagaagcaaatattagctttccaaaatgaggcacacattcacttcttaaactttcatgcatataatgttagaccccaagaaggtggtctctgcccactttgagggttcagagacccttgagaatatatgagcactgagatcacaacagtgagtcagtatatttggtggggagggaatggccccagctcctcagttttacagctaagtgatctataccaccttactctgctgaaactgacttcaagaagaggctaaatgaaaccagttccttctgaaggggataactgagaaattgaaatgaatttgttcagaaggacctaggaccttccttctagtactcatttttaatagtgataaaactagggatcagtaaaatggaagtaggaaaagcagaattatgaagcccatttacttgtattgtacaactgttgtagccatttaacatctggcttctcatttgacctaccaagagtgatggtgtggagtgcagtaatgagaccatcacctccatccttcagatgaggaggccacgttttaatactgctatagggcacagtcaggtgtatacagcttgtcagtgtagcagagcaagattttaattcaagattttaattcaagcagagcgagattttaattctctgatacaaagctcagtagtgtttccaggatataacttatccaaaacacatttattgagcaactgccatggccctggccctgggctgggatgtgggagaaaggagactcctgagaggaatattagaggcagacatagtaagggccatgagtgcaaattcaggtcatggggctcagagcagcagtgaccatctcaaaccagggatcaagacaggcttcaaaggagaagaggtccttaacctaggcactgaggatggtcagaattcaggcaggaattaaggaagcagtgcttacccaacaggacattaggcaaactcatcactacaggggcatctcttatgtggcattgcacagtgtcagagggacagacagtgttcagatggatgtgaagggggctcaaaagacagctgtctttgtggggatttggctccggtgttgtcagtatcccttgttggcctccttctcaggccttgtcctgttttgtctctggtacagggtggtttgggctgctgagacgtggcatgttgctgatactggtgacagtggccctgagcacagtgtggcttccccagcctaggttcacaggatgtgcctcttcctccttagcacttagctgaacaccgcgagaggaggctgtagagcagctccctggcctcgatgctgctgtcgggagaaacaccaaccttttagcagtttgcagaggctctcttttatctgggctgttctcagatgtgaaggacacagagcagaagatgtctgaaggcctggttagcagggggtgagggagaggaggagggggaactgaaattcaaagccaagaccctcatcagcactgctctgtggcagctcatcagttctccctcttctcacccgcatgggagcccatgcaggcctgctcttgcctggctctggcctctgcagcatctgttagcaatgaataaagaagaggtggaggggagcagggctatgggtgggggcaggaggaaggtctacttaaacacaatgtgtttgctcacacacataaaaccacaggcctcctggaggcgagcaccccgccaggcccccctcattcttgaatttgttattaggaacacgcaatctaggccggcctcagtcctcatttcttacatagcgaggggcttgggtaaggagggttagttcttagggcctttcctgggctgacatcctgtgtcagaggtgagaggtttgctggcatagttctgagaactgaccagtcctcactcaggcacatggtgctgcaggacacacaacatctctagtctgtgaaggaggctgggtcttctctaggctccacagagggtgaagcagacattctggagaaaggttccatacagcccacaggggacatctgattctccaccttggcaggtaagatctccaggctctgatgtcagctttcccattattctcattaagtggcatcatgtttatttcaaagtcatgacctccaggaaaataagagggaacaagaacactgaaaatgtcccgaagcccaagttcagtcactagaatatttctggaagctggactgttaaaggtgatattatatatggaatgaaacagttccattatttctcttagcaagtgactccccttaggaaattattgagagtaggcaaagagttggaacctccccaaagtccctcaggattatgaaatgggaaaaggaaacaaaggcccatcctgccccctcctttctgtgctcctgaggaatgagtgtcctctcacaggctgtgcagcttctgtgctggccccatccatagcagggctcatggctggatctgagaccctctgctggcctcatccatggcaggacacatggctggacccaagaccctctgcagaccttacaatgagagaatgaagaaacacacctcacctcggacttctcatgctctgatgatctggtgaccaagttctgagagattcttgccagggtttctatttttaagaccctccactgcctttgggtggtgagtaggtgagagataggaaggaagacgggcaaagaggagcagaatggaataagacaagggagttaacggtgtggacattttgtatatctgattcagaatgaagtgacgaacccaccagtaggtagactgcacacgagtagaagttaaagcagggcacaggacagggacactggtgcaggggaagccccaggagcattgtgaagggatgtagctacatctcagtttttggcagggcagtgctgactgtcccccaactacagccaaagggtcatctttgctgagcaagttagataccctgtgcccctgttataaactctggaagttctgccatcactgacccactattgtgaccctagaaattagcctgtttctagggtcccaagtttcccgcatatctctaaattggagattccattacccagacccctctgcagccttggggattaatgaaagccttgttcacaaatgtctcggaatccataaaggtttagatcgataattaacaagaaggagaaggcataaacatttcaaatatatatcaactccctaatctataacagccaataagtctaaaaactgagtggccacaatttccctcagtgacaggcagcccatgcactttcaaaagtaattcttcattaggcataaattaccacttggggaaaccttccacggatgccatggctgtggatttattaagtgaaaatgaaacttttaaataaatatctggaacaaaaaatgtatttcccatctaatcgggccatgaggcgggagtgtttaaagtgctgtggaggctggactttgagagcagaaacctgggcacatttctttagaagcctttttgctgagtcagtcactggcatgccatctccctctccaactccccaaacacctggatcctcctgacattagccaagagcaataagggcagagaagtccctaggggagagccttcccaaacccttagggaatctgataggttctgaggcatcttgtttctctaggaagatcttgatttgggatccgcagtcagattctcaaccaggggacttcatgtatccaccttcccagccaaatgttcctgccagcttgtcttccccttaagggcagaagaagccagttcatttagttcctacgaaataatcctcatgagagaccaagggaaaacaaaatgtgagacggaaggaacacatcaaaaatctaaccagctccacagatatttgatggcattcctgtagtgcaggcagcaatgctcagtgaacactatttgtctctccagcagtgattctagcccttccatattgtggagcttcctacttccagtttcagggtcctgattacatgatatagatcatggtcattcctacatctcttgctagagaatggtgtaaaactcagcctaagctaatccaccatggggcctttcctgttggcaataatttatctagaaatgggcaagaaacatactttcaaaccatgagctgtaagaggatactttctcggggcttttggtaaaaaatttccttagacaaaaggaaaacttcaaggacacctggtctattgctgctgttgacaatcatgaggaagtgttggtattgatgggtatcctgtgatagcaaagggaactagccttaggataaagctgaatctatggcagagagaacagtgatgaaacctaaactggtcctttatgaccttgtagatggactaggttaatcttcttttccctttggaaattcaaattataacactggagctcttcaagtactatgagagatggggtatctcagatcgttgatccttccagcttattactggaggagatgtcatggctagaaacagtgacagttgcgctgaaaaccagcttttcactggggaagagactcagaatcacataaaaagaaattgtctcctctaagtaaaactctttataagtttctttttttttaatattttacattctttttttatttttttatttatttttatttttattttttatactttaagttttaggtacatgtgcacattgtgcgggttagttacatatgtaaacatgtgccatgttggtgcgctgcacccactaactcgtcatctagcattaggtatatctcccaatgctatcctccccactccccccactctaccacaggccccagagtgtgatattccccttcctgtgtccatgtgatctcattgttcaattcccacctatgagtgagaatatgcggtgtttgtttttttttgttcttgcgatagtttactgagaatgatgatttccagtttcatccatgtccctacaaaggacatgaactcatcattttttatggctacatagtattccatggtgtatatgtgccacattttcttaatccagtctatcattgttggacatttgggttggttccaagtctttgctattgtgaataatgccgcaataaacatacgtgtgcatgtgtctttatagcagcatgatttatagtcctttgggtatatacccagtaataagtttctacctagaatattcctgaacagtctcctaggaaatacagaaggatattcttgtaagcagaagccaatcaaaaaactttaatggtgctgaaaccttagagtattcgcaaaattgtaaatcttatctgggttcaaatagatcatgttatagctttttttttttcactttctggtctcaaaaatggtgatagttgatgaattctttttcttgttcagagtccctaacataataccaaagaccgggatacttcaacatgcccattttctttaacattttcaaagaaaatattcaacagccttctaattttcagaattgcaggtcattctggatcaatttcaccacatccgaatcccttaaggagtaaaaacactcacaataaactgggatctcaagaaaacaattaaatatattggaagaaaacctctgtggtttttctgtaaaaaaaaacccattactacacatatgagggtaatgttgactccctcactgggaaaactagcattgaacccttctggtttgtgtctgttatccccctgggttgcatactttgcttttcttccctctgtgactgacactgatccctacttgacatcatctgcaatactgttgattcaatcatgaatagaaaactgtgaagcaggccattacttttattttagttcagtgggtattttggagtcctttctgtgtgcaagacccagtgctagatgctcagacctcagagtgaatatgatgtagtctttgttcccacagtctagcaaggcaaatacataaatatcataaatataaaaattgaatacatataatctatgctaggatagtggaaacacagaagaagcatagttaagcctgctggggtataattttggtgcacttccataaagggtatcctgttaaaggataaatttaaattggtcagaaaaaactgagtaaattgtattgtccacatttctaggcaagcggggactattttagatgacattgcaggttgagcattcctaatccaataatctgaatttcaaaatgctcagaaatctcaaactttttgagtgccagtatgaatccatagtgtacattttcacatctactttgatgtgatgggtcataatcaaaatgcaggtacacaacacagctcattcagtttgccattgtttgttgttgttgttgcctaacagctgattcaggttttctggtgatgctgctgtgatgcttagttaccctgcacacattacttttgctctctattaatagtatgtcatattttttactattaagtacttatgtgtatgtgtgaataagtgtaagaaagtgactgtttatgagtagcatataaattcagagtcagaaatgatggtgacaccaagcaaccacagatggttcacatgagtggctgagacggtgatatctttgctttctgatgtttcaatgtacacaattgctttatgcacaaaattattagaagtattgtataaaattatcttcgggctgtgtgtataaggtgtatataaaacataaatgaatttcacgtttagacttgggtctcatcaccaagacatattattatgtatatgcaaatatttcaacattaaataaaaatctgaaatctcaacttctggtctcaagcatttctgagagggaatactcaacttgtactaagtaaaaatccacctcaaaacttaatggattaacaaaacaatattgtaacaattattttgaaaataaatctgcaaattgagcagagctcagcaagaatggtttatctatgttccgtgtggcatcatctgggacagctcaactaacagctggagcatctgcttccaagatggttcactcacatgaatgacaacttaatgctgactgttggctaagaggtcagccacagctgtatactgggagcctcagttctccactgtggacctctccacaggctgcttgggcttcttcccagcatggtggctggcttccaagagtgaacatcccaagtgaaaaaagcaaaagacaaagatatttttattacttagatttgctagtcacataatattattcccactgttctttattgatcaaagcagtcacaagatcctgccaaggtccaaggaaaggagatataaatcccatcacaaaatgaaagaattgtcaaaatcacataataagagaaacatgtgaatgggagatattattgtggactctatgaaaactcaatttgtcagagttttatttcatccttccaatatgtttaccttttatttcccttttttggggtcttattgcattagctagaacttccagtacaatgttgaaaagaaatggtgagaggaggacatccttgccttgttcctgattttaatagaaaacttttgagtttctcactattaagtatgatgttagctatagggtttttttggtagatattctttattaagttgagaaagttcacctctattcctagtttagtaagaatttttaagaatcatgaataattgttggaatttgtcaaatgctttttctgcatgtattgatatgatcatgtgatttttctttttagcctgtcgatgggattaattacattaatagatttttaaatgatgaactagacttacctgcctggagtaaatcccacttggtcatggtgtctaattttttgtattcattgttggatttgattgattaacattttgttgagaatttttgcatctgtgcttattagatataacattctgtagttttcttttcttgtaatgtctttatctaattttgtattgggttaacgctggcctcatagaatgagttaataagtggtccctctacttctatccaccaaaagagattttagagaattggtataatttcttgttttaatgttttctggaattagttagtgaactctaatgagcctggtgttttctgttttgaaattattgattcaatttctttaatagatacaggtttatttagattgtctatatttttgtgtgtgctgcttttggcagttatatctttcaaggaattggccaatttcacctaggttgtcaaatatgttggcatagaattgttcatgttgttcttttattatctttttgatatccatgggatctgtagtaatgtctcctcttttatttctatttttttttgataatttgtgtcctctcatttatttgattagttaacttggttaaagacttatcatttaaaaaatatcttcagagagccagcttttggtttcttttccttgatttttctcttttgatttgttgttttcaatttctttggattctgttctaatttttactatttcttttcttgtgtttactttggatttaacttcctttttattccttagtttcctgaagtgaaatttagattattgatttgagatctttcttcttttcttatatgtgcattcaatttgtaaatttgtttctaagccctgctttctgctgcatcccacaaattttgataagttgttttaatttaactttaatttaaaatgtttttgaacttttttcagatttcttgtttaacctatgtgttatttagaactctgttgtttaaacgccatctattttgaggtctgctagctaccttcctattaataatttgtagtttaacctggagaaaactaaacttttcaatctgttagtatcttttgccttccttatgatataatttattagcacatttaaaattttagtttcagattgatgtgaaagtttatttttctcacattcccctttatatgttttcttactaagaaggttttttgatgcgaattcttagtgctcttgaacttacaggccagccccacatcgtctagtggcattttggcatctcttctttgtggcagaattgtgggaattacatatcccatcactgagccagcaggtagtatggctctattcttggtctttgtctttgttttcctgcaccctatgatcactgtctcctataagcataagccgtaggtagaatatgcaacagcttctttgggcttcaagttatggtttggaacttattcagtctttgatttcagacactgaatccagcttcagtcttctagtttatatggatccatgttcctccatgagaatgggagtactgactatcactgctagagtctgaattgtgacaaagaaggtttatggctccagttgtgctctgtgctttgtactgaagttctatttctgttcatgctgatatttgctatttgagcccaactatgtctttttgcatttctcttattatatttaatttgtcattactatatgttgaaagctgataaagtgtaccagatataaacttaatatgtcatctttgccagaaatcttcttatttactaaatggagaattgaggctcagaatggaaatgtatcttgacgaaggccttagagtgatcttgtcctagagcctgagagatactcaggtcttctgattccaagccctgggatttttcactattcccaggtgctcagaaactgatacgagggaaaggtctcagcattgagctgcttcctgccttcttgtaggaataaactaggagtcagaggcagccactgggggattcagttgatgtttcctgataagcagagaagatgtttaacagatttcatcactgccaagttcatatctgactcagaaatctttctttcagcaagctgtcatgagtctgagttaagcatctcacccagagtgtgctgtgccacattcagcaagggatctttgtgttcaccagaaaaactaaagctctctaaatggtattttccatctggaggcaacatagcttccttataaagaagaaataagaaataaaattcatttttaatttaaaataggcaaacatttcattgtgtgttatacaaataaattaacacaaatgtcaactgaaaaatgtcactcagcttaaggaaaaaatttccatgtcatttgtgtttgggtaggaaagcagttcttcaaaagcttgttgctggcaaatgtcatctgagcagagacccattccttatactattgcatagctatgcaattaaaggctaccagactcactcaagtatgctatcacttaaaagtctataaagataaaattatcaagcaaattgttgtctgaaataaatgaagatattttaattagaatataaagatagatatttatcttccttgtggttacttaacaaaataaaaaaaaaaacccaaccagggaaaaaaatgtttttggtccatctagccatagcaaatactgcagtccctctagccatagcaaatactgcagtcagaccatgatattagagtttcttcatgccccagcttgactgtcttaatgcactgagacttcttatacttctgcatttgtgtggcttgtaccatgtccccttgtacccatggcttgtaccatgtacatatgacccctctctccctaatccccataaccccaagttctaaacaaatccctatacacttagatatccacctctacttgcaaaatgtgcattggaagatgatttgttaagttctgtgcattgtacccttcacatctctcatcactcagccgtgatataagtaggtattcagtcaaccgaatgccagaaggaaggtggttgcagataaagggcaggcacaacctcagaaagttgtcattacagaacgtagctgcaggaagggggtatttcctctgctatgttccaagattaacacatgtagcagttgaccaatgtgaacaggccaagcagaggatgtttaaaggatcaagtcagtgtttgtgtaatactttgaagacaaaggtgaagataatgagcaaattcttattatcacaaataatctaataattactgtaataattatcctcattcaaccagagaccagaaatagagattttcaagtgtattgagtttcattaagtattacacattctacagctatagtagcactcactgtgagaggtaaagcagattaaataaccatgaaccacaaagtcactctgctcactcctcaggtctcagattgagttacctttctcacaccttgcaaccaaattacacagagcaaaaaatgcactagaggtgggctgaaaggaggccagagaagggagagggcaggctagctcccagtttttccatctctgcattgtcaaaagataagtgaatatgtctaatgaaccagctaatatcttcgtgttaaactgacaggttgtttcgacatctttagacacagccaaacaaagaatgaaaacaaactggtagccatgtttgtagttcctgattatgggcacaaagcaaccaaacacacctgcaagaagtgctaaaatgtaggctttgatgatagctttgttcaagatcctcatcaacctcctcaccttccattaaatttgttgtgataacgtaactgtggggcatgtgttggtcctgtccagatcagagtcagactcacattttactctcaaaaacaggtgctcagctgtagctgaagtgctccatcacagtcaggtaggtatgagagaataacagatgggttcctaggcatacaccatgccaggatttagagactaggcctgcatgtgggaagaggtgatcaaataatcaggaggcttgatattctgcatttaacctagtttccaaatcccagggcttgaaaaccttgaattttaaagattaaggggagttttgtggcaggcagagatattctacctcatggactagggagtaacgtttgaaaatttgatgttatagagatggtctaaaagaaatttgaatcaattaagagacaacagtgcattatatgttaggaaggaaactgttatggtccgttgtctagtcacaatgcagttctactccaaaggacctcttggagtccacctgaggaaaaaacccaaggctggaaggttggtggtcttggcaggtgtcccttctctgatgtggcaagaaaacccgtgttagcaagcattagcgctacctaagacacaagagcctgctttcctctcctctctgctttcagcctttctggatcattcttcctggaacacagtctgggaccttgcttcaggaacctttccaacttctctaagatggtcatcatcaaatactcaaacacatgagatcagtgagctctcaagactaagcgactgaaagggtcatatggttaagaggagtggaggaaatagcaacagttttcccaaatcactggaattttggtcaagagacctggaataaagtctcatctgtgtcacctagagcaagttatatgggacttcctaagaagtaaaacaaaaacaaaaaacaaactaacaaaaaacagatgcaacaaagcttttttttttcttcttaacatggagttagcataaaggtagaatgagatgatcttttatttcataactttttcttttggtgtattatttaaaaatacctttctatgcatggatgataaagatagttttctatttttgttattttgttaagaagtttttgttttttatatttcggtttgtgttttagtactgtttacacaaggttattattttcccccatatggatagcctattgtgttaatatctttcatataatcaactttcttagtgatttctaatgtaattttttggttataaagcacatcttcattaacatgcagatttctttctgggctctctattttgtacatttgttattctccttttgtgtaaatatattcttttataattactatagctctaagtaaggtttgggttctagtagaagttattcttcctaaaactacctctttcttttcctcttggttctgtttcatagactctttccttctctaatgatttttaactcttcttagatttttatcataatttatacattttagaattgattggaatgattccatttcattaaaatcttattggaatttttatatgaattgcatttgatttgcagactaattttgaggaaaattgatatttttacaagattgggttttccaaaagtgaacattataatttaatatacttattctggttttctttaatatcctttaaaatttttaattatttcattgtaaatatctgacacactccagactaatttctggaatctttaaaaaatcatattttaattggttactgctaatggatagaaagaatattgatttatatttgatgatcttgtgctcatcaaaattgcttgtaagaatcaggagcccaacaagaaaaagatacactcaaattagggtaatttgagaagagattagtaaagggataatttacagaggtgtgagagggtatgtgaaatctactagtggtaatgcagtaggtcacggctaggaatagcaaggattcattagcacctttgtacctgaagggaccagaggaaggagcgcagggagacaagaaggttcctgtggagaagtctgcctgacagatgctaagacattggtggaagggatcagctagccagtggtgaagcagagttgggagactaacaccctgtcctcccttctgatagatctcctgcctttgccccttttccttctcaccacctgccaaatacatttgacgcttatagaagtcagtctcccagggcactgaaagagtgaagagtagagagtggatgtgcaggtgcaaatgaaaaatattcctgctattcccgacatctattagttttagtatttgtctatagattttcttgtatttactagatcggcaatcatgacagcatcaaataacgatgttgtttctatgaatctttcaacatattcattttttttgtctgatttcactaactaggtcctcccatataatgtgagctgaagatagtgatagtgtgtcagtttgtcttgtcactgactttaacgggaggacttctaaaatttcagcagtaagcagggtatttactttagtatgatttttgttttagatttattttatcatgttaagtaacattgagcttcaggtatactgtacctcaatctgaggaaaagagaaatgtttgaagtttgatttttacaagaatgggttctattgacacaactcaactcttgtgatcttataagtgaatgcatctccaaatctaaatatatatatataaatgtataaaagtatttatttaataccagctgtatatacacaagctaacaccaaaagcactttgtttactataaaaattctagaaatattagttttgataatctgagtacgtacagtcacatgacaatatatctattggacatccaccaaaatatctggtttaaatgttcaactctttaattagttgcaatttatgcatagttagtaaagatataataatgactttgtctaccctttaaaaaatgaactattgatgattcatttaacatagatgaaaaacatcaggttctcttaataaccttgactcatctttgctcctttttttgtatccgcctatattggatattggagtagtatgcatccttctttagatatgagctccttggagacaaggacttgtcttatttattcctgtatttcttatagaacattacacagggttttacatgcaatagtaatgcatctaacactggttaaataaatgaatgaatggatactgatgtcctttgtagcattggtactttggttcaaatctagggatgatggaaggtaggcttaagggactattaccacaaatgactcccagcatcacgggtgacctgagacaggtttctgaagaaatctgcacattccattcattttcactagtgttaatgaagaaaaagaaaggctggagggaaatttgcacattgaatcaattaataaaaagattgtatataagaagtatcacgggttctgtgtctgggcactgcataccctctatcctaaattatactgaataaatctgtgggtgaaaaaaacttgaatgaatctttactacaatttctcaggttctaaatacttattcaccactgtatttaacatcagccacactctttttcttggcctgcgtctacatttctatgcacttactgtctggacgcacttcttaatttttaaacaaaggcctagataggtacacatgcagacacagtattaacagaagaaaagcaggagccatttacaactggcacttgtccagaacacagacagagccatgccaggggccggaggattttcagtcttctctgcttattgaaaacggaattggagaaaagaggcattgccgaggcagacaaccagatagagtggctgcaccatccgcaggcttgcttctgccatacaccttgtaaattgataacttgggataaaatttcccaaccagtaactggaaaagaagtgggttttacagcaaatcaagtcaggctggcagcttccaataaacagaaaaaaggtcatctctgtaacctggataggaaatctctgtcggctttccccatctcatctttagcacagatcttctatcatgtcaagagttgacctggccactgcttagaaaataataattgtataattaatgcataaatcacatttattgaacacttaccaggtgccagtaactgtgctaattgatttataaatatgatctcatttaatcttccccaaaatctcactgtaattattttgatttcagataataaagctaacactcagagaacttaagtaattttcctaacaatgcacagctagtaaagggcagaaccagagccacgactcaaggttagtttatctgatgacaatgcctgctcttcatagtcttccttccaccttcccattcccaattctaccccaggtcactctcccagaatccgctgtaccctccacagactgttagcatagtccatccaacagtttaatatgcttagttgcttagatggctgccaacccaccaggctatgaactccttgaatgcaggagtgagttcatctctgtctccccactgtgtaagacagtatctggtacagaatgtgaacacaggaatgatttgatgactgagtaagtaaattacataaacatctggtaaggagctgctttgttgaagacctctcattagttgctttactgataattcctacccctgtatgcaaaatgaagtcacaaaataggattcttgtttattttgagatgtagatgctgcaccagtgtttttttttttttttttttttttttggtggaacaaaaaataaatgcatcagcagaagaaagtaaaatgttctcttcaggaatgggtgatgcaggaaaagactacaagtttagagttaggatcctgaaggacaggtggtcagtctgcaagcatcaaatcaaaaaggcttgcttctctcaccatccagagcccagagtgagttggatcaatgtaaacgaaaagccacctctcaggaaataaggcagctccccacagactgggtgaagtcggcttgcaggacttggtctcactctttctgagagagtaccagacaacaggtctggtctccgagtgttctcttagaaatgcagccatcactgtgcagcacacactgaggagaagctataccctgatgggatcaaagaatatggtccaggttttcaaagacagctgagaagaaggaacaagcaacccgggttgactctgtgggccccctgcatggaccacacacaagaggattcacacatacctggagctccacccacatgggtttaaggtttttaccagctccttagagaggagacactggggagtgaggccagtatttacagcatgtcattcatcctttgtcctccataaggtcccagagtaaactctatcaagttccaatgccggagtgtgtgtccaattattcttacctgatctttagttaaagagcgaaaagcttttccagatacgaactggatagagtccattaatttactggaaaagccaaagcagttaggaagcccttttggtaggatcttacctgaaagttttacatactgatcaaagacttggggatctacaggagtctgtccccacccaccccagattgctaagaagaatggtattttaggagcacagcaggcttgtgtagaaataataggaaaaatggtagacaaagctgcagatagagacatacaaaggtctaacctttcctagtcaagccattcatttctgtaggtatcttcctgagctatcctgagtgtgcatttcagtgatgaatcccagattgctagaaagatgtgccatatgtttcttgatattctagtggcctctatacttagaataatacacataatgttgagtaataggaaactctggttgcaatgctttgtaagcggtatggtggaacacattgagtggacaggtccctgagaaaagccattcaatatctgtcatatctgatagctacaattgcccatggaagctcagtattctgatattctgatgtcttttttaaaagttaatttcctaaaagggcacgtaatattactaggggagcctccttttctgctatggaatcccagtaaaagtgcactttttatgataatgttagtcactgacaggcacaggttaggaaaggtgaaatatttttagatcaaatcactaggaaagtatgtaaaccataggctttggtatatgcacttgagtgcaggcagagatggaaataaggaatctgttggctctttattcctgatgagttcagattaagtaatcattcatctccattagtcacccccaactcccccaacatacacacatgtgcctacacactgctgtgcacacacaggtccaagcctggtgcaaacatggtttcccgtgttcagccagcagcttcccacagctggaatggggaacacctgcatggtgctgctttgtgtcggctgcactcactcataggtggcctggttaccatctgcataggtaaggccgaccagacctggtctataaccaccagcccagttcctacaggcacaaagtcaacctggacataaagcaggcatcctgccatacctgagaggcctgcttcatgtccgtggttctctctcacacaaagaagcctatttattcctcccgctctctttcttgatagtcacatcttctctttgtttttagtagttgagtcattctgggagctggagggataggcttgggactcaaaaataagtggctctgtcactgactcattcattcatttaagaaactgttgtatactgctgtacaccaggctctgcagagacaaacctgcatagaacttcagccctgaccttcagggcctcagagtctagtggaagagacaaacttgtaatctcataactgcagcccagtgtgataggaacccttaaatcagtgcacataaaggattttgcaggcatgaaagagaaagcaacagacttcatctggaagagcttgggaagattttacagaaaacactgtatctgatgtgggcattgacaaagacataggagtttgctggctagagaagtggagaaagctataaagtcacaagtaagaaaccacaatgctggtttagaaatggcagatcggggaataagaggcaaaagcaaatgattttacaattgaattaacttaaaaatcaacaactagaagacctcaggaaaattcccaaatatttggaaactaaataatatatttataaataacttgtgagtcaaagatgcaatccaaagagaaaaggaagcattttgaactgaattgaagtgaaagttaatatatcaaaatttgtgggagactgcttaaccagaaattagggggaatttatagcattaaatgcctcataaaagaagaaaggtctcaagtttccaccctaagaagcaagaaaaagaagaacaacttaaactcgaagtaagtagaaaaaaagaaagaaagatcagagcagaagtcaatgatattaatatcagaaaaacagtagagagaatcagtgagaccaaaaacagtctctttaagaagattaataaaatcaatcaacctctagccagattgatgagcgtgaaaaatagagaaggcacaaattacaaatataaggaatgagaaagctgggatcagtacagattctacagatattaacagtataataagggaatagtattaacaggtttatgttaataaattcagcaacttaaatgaaatggacaaatctctataaagatatgaactaccaaagctcactcaagaattattagataatataaacagccctaggtttattaaagaaatttaatttgtagtaaaaaaagaactttttttttttcagagaaaactcccagatggtgtcactggtgaaatctaccaaacataaaaaaaaaatatgaccagttttgcatactctcttctagaaaattttgatgaggagaaactattatccaacacattctgtgagctagtagtactttgatatgaaagtcagacagagacatcacaataaaactacagaccaatgtttcacgaacatatttatgaaatttcaagcaaaaatttagtaaattgaatatatcatggctaagtggacctatccaaggaatgcagaattagcataatattcaaaaatcaatgtaatctatcgcattaacataccaaaaatttttaaaaatggcaatctcaataaaaatagacaatgcttttgaaaaaaatttccaacatgcattcttgatgaaaaaaatctctcaaccaattagaaacagaagaaaactttctcaactccataaaaagtatcaaattaaaaacttttagtaaacaccatactggaaaaagactgaatatgttctctctaagatcaggaagaagacaagaatgacagcttcaaccccttctaattaactctgtgccagagattgtagccagtgcaataaggtaaagaaaaaaagtcactgagattgaaaaggaaaaaaataattctacctttattttcagatgacatgatcacctattagaaaatttgatgtaatctgaaatctcaattaagatggctgataagaggcaggactagcttgcagctctcgatcagatggatagaccagcgtgtggagactcacatcatgaacttttgcttcaagaactactgtaggaacataccagcaaagctgagagaacccacagaccctttgaaggaacttgatcactgctgtatgctccctgggacaccaaaaaactgtgagtctgcttgctttctcaatggggaggctcgtggtctggagcaagttctcagccctggtcaccggctgccaaaaaatagactcagtgctgttggtggggcactgtgggagtgagactggcctttaggactgtgggctgtgtgggagcggggtgaggcctgtgactactggcttttccccacttccctggtgagctgtatgactcagcagaggcagccataatccctttgggaatataacttcactggacttggggaaccatcccccatcccccacagcagcggcagcaagccctgcccaaggaggggctgagctcagacctgcctatccctgcccacacctgacggtctttctctacccatcctggtaaccaaagacaaaggtcataatctcttcagagttctatggccctgcccaccacctgagaaacctgaatacttaacccggtgtccctagggcaagtttgcatcctacctatatgaccacagctgatgtgctcttgaaggtgccacctcttggctggaggccaaccaacacaaaaccagtgcactaaacaaaaacacaaccaaggaccctcacagagtccacttcactcccctgctatcaccaccggagcaggtgctggtatccatggctgcaagacctgaagacagatcacatcacaagacatttttcagacattccccagtaccagctcagagcctggtagctccgctgggtggctagacccagaagagaaaaagacaatcactatagattggctctcaggaagccccattcctaggagaaggggaggaaccacatcaagggagcatccagtgggacaaaagaatctaaatagcagcccttaagtcccagatcttccctctgacatagtctatccaaatgagaaggaaccagaaaaacaattctggtaatatgacaaaacaagcttctttaacaccacccaaaatcgtaccacctcactagcaatggatccgaacaatgacaaaatttctgaattgccaaaaaaaaaagcattcagaaggctgactattaagctaatcaaggaggcaccagagaaaggtgaagtccaacttaaagaaatcagaaacataatataggatacgaaaggaaacttcttcagtgaaatagatagcacaaatgaaaaatgatcacaacttctggaaatcaaggacacacttagacaaatgcaaaatgcactggaaagtctcagcaatatagtcaaacaagcagaagaaagaacttcagagctcaaagacaaggctttcagattaaaaagaattttttaaaacaaacgagtcctccaagaaatttgggactatcttaaatgtgcaaacctaagaataattcctgaggaagaagataaatctaaaaatttagaaaacagctttgagggaataattgaggaaaccttccctggctttgttagagatctagacatccaaatacaagaagctcaaagaacacctgggaaattcatcgcaaaaagatcattgtctagacacatagtcattaggttatctaaagtcaagacaagggaaagagtcttaagagctgtgaggcaaaagcatcaggtaatctgtagaggaaaacctttgagggtaacagcagatttctcagcagaaaccctgcaagctagaagggattggtgtcctgtttttaggctccttaaaataattatcagccaagaattttttatccattgaaagtaagcttcatacatgaaagaaagatgcagtcttttccaggcaaacaaatgctgagtgcatccaccactaccaagccagcactagaagaactgctaataggagctttacatcttgaaacaaatccaccaaaatagaacttccttaaagtataaatcccacaggatctatataacaacaacacaatgaaaaaacaaacaacgtattcaggcaaaattagcacaatgtatagaatagcacctcacatctcaatactaacattgaatgttaatggtctaaatgttccattaaaagatacagaatggcagaatagataataattcacccaccaagtttctgctgtcttcaggagactcacctaacacataaagactcacataaacttaaggtaaaggggtagaaaaggatattgcatgtcaatggacaccaaaagcaagcaggagtaactattcttatatcagacaaaacaaactttaaagcaacagcagttgaaaaggacaaagagggacattatataaggatgaaaggactagtccaacaggaaaatatcgcaattctaaatatatatgcacctaacactggaactcccaaatttgtaagaaatttactgctagacctagtaaatgagatagacagcaacaccataatagtgggggactttaatactccactaacagcactggacaggtcatcaagacagaaagtcaacaaagaaacaatggacttaaactataccctacaagaaatggactcaagagatattagaaaacattctacccaataaccacagaatatacactcattcattagcacatggaacattctccaagatagaccatatgataggccacaagacaagtctcagtaaatttaagaaaatcaaaattatattaagtactctcttggaccacagaggaatagaattggaaatcaactccaaaaggaaccctgaaaaccatgaaaatacatggaaattaaataacctgctcctcaataattgttgggtcaacaatgaaatcaagatggaaatttaaaaattccttcagctgaacaataatagtgacacaatctatcaaaacctctgggatacaacaaaagcaatgctaagaggaaagctcatagcattaaatgcccacatcaaaaagtctgaaagagcacaaatagatcatctaagcttacacttcacgaaactggagaaacaagaacaattgacccccaaacccagcagaagaaaagaaataacgaagatcaaagcagaagtaaatgaaattgaaacaaaaatacagtacataagataaatgaaataaaacctggttatctgaaaagataaataaaattgacaggccattagctatattaaccaagaagagagaagattcaaataagctcagttagaaataaagtgggagatattgcaactgataccacagaaatagaaaagattattcaaggctactgtgaacagctttatgcgcataaactagagaacctagaggagatagataaataactggaaatattcaaccctcctaaattaaaccagaaagatgtggaatctctgaatagacaaataacaagcagtgagatcgaaatggtatttagaaaatggccaataaaaaagttcaggaccagatggattcacaactgaattctataagacattcaaaagaattgataccaatcctattgacacttttccaaaagataaagaaagagggaatcctccctaaatcattctgtgaagccagtatcaccctattaccaaatccagggaagaatataacataaaatgaaaactgcagaccaatattcctgatgaaaatagatgcaaaaatcctcaacaaaatgctagtgaaccaaatcccacagcacatcaaaaagataatccaccgtgattaagtgggttgcataccagggatgcagggacggtttaacatacataaaccaatgaatgtgacacaccacacaaacagaattaaaaacaaaaatcacatgatcatgtcaatagacacagaaaaagcatttgacaaaatccagcattgctttacgattaaaaccctcagcaaaattggcatagaagggacgtacattaaggtaataaaagctatctctgacaaacccacagccaatattatactggatggagaaaaggtgaaagcattcccactgataactggaacaagacaaggatgtccactttcactacttctattcaacatggtactggaagtcctagccagagcaaacagacagaaaaaaataaagagcatccaaatcggtaaagaggaagtcaaactgtcctctttgctgataatatgatcgcatacctagaaaactctaaagactcatcttaaaacctcctagaactgatgaataaattcagcaaaatttcaggatacaaaattaatgtacacaaatcagtagctctgctatacaccgacaatgaccaagctgagaatcaaatcaagaacacccaacccctttcacaataactgcaaaaataaaataaaatacttaggaatatacctaaccaaggagttgaaagagatctacaagaaaaagtacaaaacactgctgaaagaaatcctagatgacacaaacaaatggaaacacatcccatggtcctggatgggtagaatcaatattttgaaaatgaccatattgccaaaagcaatctacaaattcaatgcaatttccatcaaaataccaccatcattcttcacagaactaagaaaaagcaatcctaaaattcatatggaaccaaaaagtagcccacatagccaaagcaagactaagcaaaaagaacaaatctggaggcatcactctaccagacttcaaactatactgtaaggccatagtcatcaaaacagcatggtactggtataaaaatagagacatagaccaatggaacagaatagagtacccagaaataaagccaagtacttagagccaactgatctttgacaaagcaaacacaaacataaaatggggaaaggacatgtagaagaatgaaactggatcctcatatctcaccttgtacaaaaatcaacccaaaatgaatcaaaaacttaaatctaagacctgaaaccataaggattctagaagataaccctggaaaaatccttctagttgctggcttaggcaaagacttccaagaaccaaaaaaccaaagcaaatgtaaatgcaacaaagaaccaaaaacccaaaagcaaatacaacaaaaacaaagataaatagatgggactaaattaaactgaaaagcttctgcacagccaaagaaataatcacaagagttaacagacaactcacagagtgggagaaaatcttcacaatctaacgaggggttaatatccagaatctacaaggaactcaaacaaatcagtaagaaaaaaaaaaaagaaaaaataaacccatcaaaaaatgggctaatgacatgaatatgtaattctcaaaagaagatatgcaaatggccaaaaagcatatggaaacatgctcaatatcactaactatcatggaaatgtaaatcaaaactacaatgcaatacaacctcactccagcaagaatggccaaaaaaaaaaaaaaaaaaagatagatagatgtggtaaaaagggaacatgtttacactgttggtgggaatttgaactagtacaaccactatggaaaacagagtggaaatttcttaaagaactaaaaatagatctaccatttgatccagcaatcccactcctgggtatctacccagaggaaaagaagttatacgaaaaggataactgcacatgcatgtttatagcagcacaatttgcagtttccaaaatagggaaccagcccaaattcccatcaatcaacgagtggataaagaaaattgccatcaatcaatgagtggataaagaaaattcccataaatcaatgagtggataaagaaaattgccatcaatcaatgagtgggtaaagaaaccatggaatactatggaaccattaaaaggaatgaaataatggcatttgcagcaacctggatggaattggagactactattctaagtgaagtaactcgggaataaataaaacaaacatcatatgttctcacccatatttgggagctaagctatgagtatgtaaaagcataagaatgatacattggacattggggactccagagaaagggtggggagtggtgagggataaaagactacacatcgggtacagtgtacactgctcaggtgatgagtgcacctaatcctcagaaatcactactgaataacttattcatgtaaccaaacacctccggttaccccaaaaacctattgaaataaaaaaaattttaaattaaaagaaagaaaaaaataagcacccttttctcctgttacaaaaaaagaaaatttaatgtaatctacaaaatggataaacaaactggaacatccagacaacagaatattattctatataagacatgagctattaagccatgaaaagacaagaaggaaacttaaatgcattttcctaagtgaaataagtcaaatgaaaattcaacatgtgtatgtttgcaactatatgacattctggaaaaggcaaaactataaagacagcaaaaacatttgtggttgccaagggttttagctgggtgtaggaatagaatgagcaggtggagcaaggcatttttaggtaagtgaaacacttttgtgtgatactgtaatggtggatacacgacattatacatttgccaaaactcacagaattgtacaacaccaagtgtgagtcctaatgtaagctatggactttagttaataataatgtattgatattggttttcagttataacaaatgtgcctcaccaatgcaagatgcaactacagggttaacaaggtggggcagtgaggctgagatgaggtggagagggtatatgggaactcttcactttctattcagtttttctgtatacttaagattgctctaaaatcaagtctctgtctatatatgttttaaatagggactcactgcagagtgattttaatcagaactgtgcgaaattcagactctgcaggagggtctggaaggggaaactaaaagcaagcacatcaagtaggaggatattgccatagtgagtaggcacttggggcctgagtaggatggtagcagctagaagggacagaaataatgtgagaaggctccaaagaattaggagagcctagtgacaccttagctgtgactgtgaagaagagagaagccagggtacattagtatttgcagacttctgatctagtcttggctcagattctgacacattgtgtgagctctggcaagcgacttggtatttctggaccttgattatctcaggaatgccctggaggcatcactctcatgtacaggctcaagatccaaccatcagagctgcctgtccggtacactagctattaacttcacatggctattgcacactggaagtgtggctagtctgaattgagatgtgctgtttgtgtgaaacagtgcaaaaagactgcaaagaaacagtgcaaaatggactgaaaatgtcttattcataatttttatatggataacatttaaattatagtagtttggatatattacgttaaaaaatacatattattaaataaatgtcatctgtttcattttgcagttttgatgtgaccgctagaaaattcaaaattacatacgtggcttgcagttgtggctgaccttatatgtctattgcatagcagtggcctctcttcaccagatgctttgtgttcagaaacatctacaattggcctggaaaatgttgtctgcctacacagggccatgccccactctaggatgggagtgggatggagagaggcagacctgttaggcaaagagaccctaagataacttgggactccctgtgagtcattttcctacccacttaggcggtatatcctggagaaatccttccaagtagtagtccaatcgcaattccccagaatatctagaagaaaaggccagaatttctttctcaaatgcagagataatccctcacagttcctcctttcttctgcctccatgcaaaaattagcaatttaaagtgacccaggtggctgcttctctcacctcatctcaccttgagacctggcagtgagaaaaaccacaaatgataatttccatgttgaaccaagactgataccaacatggagaaaacttcctagtctcccacccgctaggaagaaatcaggcttgaaccatatatgttcttagtggtcctaggactctgatggttttttccaagcaccttaggtgtgcagtacccagatcacatatacctgtacctcttacctgttccaggaacaccgtactgtgcatatatcttgcctgtatctatttcatttgtcctttcttacgtttcctttttcacacctggccctcagataaagacccatgtagtatccatgtccccatatttacaaccaatgagactcagaaatgtagtcattgcctgctttcatgagtcctggctcagatcgaaagtattcagttctctaacatcatcaatgaaacctgatatccttagtctggtatttagcctttcatataatgactcaagccaattttcctgatatatatctcatttctcagaagaacagggtttcgtccttcccatcagcaaattcttcaacatgtagaaaagaaactttggcgtgttagcagtcatggaatggcatggctgtagaggccaaagtgacctgatacagaaaaaaaaaacaaaaaaacttgtctgtgaagtcttctgttacatcttaaacattcatgcaaattttatgttccattacacacacacacatacacacacacacaaacgtattaaattaccatttagggaaattgttgcttcaggatgatgatcatgaattcttatatcccttgcacctagccaagcactcccaagtgtaggtattacctaatttaaggaaaaatgcacaacggaaacttctacttcagccagtctcgtttcttcagctaggaaatatctctcaagtttttctgttcccacccccaccaggaactagctggcatcttagaaggcctgaagtatctgaattccttctacctatttgagttccagtcaagttttactgcttcctggcaccttccctgaccactccatcaggacatgggtttctgcctccttgaactactgcaacagtgtctctgtccctctttggttcttagctgctagatcatgggctgtgcaatttttttatgtctccctcactgcagcttgaggtttggaaaggcagggcccatgtcagtcttgttcatagttattcttagcacttagcacagcgtctggcatatcattggtgctcactgaggatttagtaaattagtgagtgttcaaatggaaaatttgatattacttcagagactaacaatatcttaaggacagcatctgtcttccatgcccttgtttttcctgcagtccatgactaataatcatttggtgtttatgggagggtgggtggatgtgtgggcatgatagatggagagtttggatatttgaaagaattaccaaccagctcaacttattttctttacaaacatgttactagagtgaaccattctatatttcgtattttatgtagggatatgttttaaagtagctctgtactttgatactgcattctatcagacttgtatataaggccatattgttgagggctattgagagatggagaagcagaggattctttgaaaagctgcatgagaaagaattgtgggtggcaaagggacaactaggtgtaattgctaacaggaagagacagatgctcttctcattagcatcatcaatatctgtgctgcttgtatgatttcaaagcctgtatggagagtttccaatggcatattcaccatcaggctctacatatgatgagtagagaggtaatataaccacggagcagaaatgaatttccagcctttttacagttcagtgtgcataatggagaacctacagatgttagaaagaacagagaggcctgagcaacgcatgctctcctgagagaagggatgcatgggtttacaaactagttctaatcggaagattattgtttgtgctttctgtcatttaaagctatttacagatttggattcaagagtttctgttccatattgaagcatttccagaagcagtgagaaaagtgattggggaggtagagagtcatagcgtgcaggtatggcaagcagacatgattcctaaataaattaataaattattgcagaaattgcgattctccaacatgtgccagtatttgtctctttggccatatgagaacagagtaggttactgaattcataatgttaaccctggaggagacctatccaaggtctattgcaagtcaggagcccactggggactctaaggccaggctcttcccatgatgtcctggcaggtacacatccagactctaccaccctgtaatttctgccctagtttaatttggcatggccactttttcctaactatagtcttttttctaccacagagtttaagtaacactgatacataatcaaataacccgtaaccttggtacttcaagtatgatctgaggactagcaaccttgggtcacctgggagttgcaggctttactgaggaactcacagatgatcagaagtgaaatttaacatgacccccaagtgactcatatgcactgtcctctaatgctctgccctctaatgctcttcactgggctgcttcattataatggccattctggggtccttagatttctaacactttagtcttaaattataaccctatatcttaccagcaaactttttgtttgtttgtttcatcttagagatttcttttcctagcccacttctgataagtgctaccttgcttactggagatgagtccttcaaggatttgtgcattcatagagagtcacttcacttctttatccacttaatccacatctgatattcgtggcttattttaatattcctaaagataacagttcttaatttcctgaagctatgttaaattgtagatcatgtcttcttaaagttgaagacattagattcaaattataattttgatgttaagaataaacctttacaaaaactataaatgataatatttccaatagtaggcccttcacaaaaacctttatgggccctcactgggcaaccttttataaaccaaaaagaccagaataagaagtttgtgtacccacttccacctccagacccctgcacagaaaaatgtaacacactgtggggtgaaatgagctggtctgtactctgggaaaaagtagaaatatggtgaaaataaacaaacctatcaggcatttaaagcagttttggcagaggattttgtttgtaatacaacattgttataataaacaaatgtggatgaagaggggcttgattagactttttatagtttccaaatgttcgtgaaaggcagtgtaaactgggttttgaattaatctacctcctctattatgcctgttcggttgcaatgaacttgtggtttttaaaattatccagtttgctggtaagtttaaaattgttcatctaaaattaaaggaatgcagccttcagattgagacagatgtcaattcatatgccaggcccagcatttactagtcctgtgaactttgacaactcagttttctcatctgtgaaatgtagaacttcgtaactgctatatagggttgtcttgaactttagagaaaatgaatgcaaaatatctgggaaagatatttccctggaagaccagggaaaaatgtctcttggtaacttgacttaggagttaagctgcatagctgtccccagcataaaaattaatcttatcatttaactctgtcaataagacagattttagagttacatttcaggaatatagtgagtcaaatagacatctatggattcctggaggccatgttgttactacaagatgattccctggtttcagcctaaaactccaaaggagaaatatatcttaatttccttccatgaatgcaatggctattaacacaggtcaaatttcttgctaatgaggatttgtggagaagtatctgtgacctcagcatgggaccagtcagacattcatatgcctaaggtgtttgaatgtcaggtgttcgttgtccagctgagttgctgtacagaagaagagctgctggtgtggtacttggaagttggacatggcatatattagaggacttgggaggaagcagtggggaaatcaataagctctgttctaccccgatcatcagtagatacttaatatttattttatgtgcttacatatctgttaatgaaaacttctataattttatttaaagaaagcttataattaaggagcagaccattggctgatatactttaggttccttatgtagtgaaaacaattgtgaagttaaggtttgtggctggaagtgagtgagcttcaggcagagaagagagtcacacaagtatttcttcacctggttcttataggttgcattaaaaatgaggttcacaattgaaaaaatgtatttctaaaatgatttattttaccctacaaatgataaaaccattattcaaaccatttatgtttatttctatgaagttacttttctttaatcaattatttatactgaacatttttattttttgtttcttacgtagtttgcccttctttgaaaaaataaattacattagaaaaatcaaaaaatatattttttgttgatatttgtatatgattcaaaagcagtttcttcaaattgaaaaaacatttacaggtgccattactttctgtattcatattcttactgattttagtttgattttagataagtcttttaggtattaagatagaaattttttttcctacccatgcaccaaagtcccatacggaaactagaatattgacaaaaacatgctatgaaatcctcctatctcatctccttatctcttcccacttaaggtaacagccatcctaatactttgttgattacacctttaacaatttttattgtatgcatttaaggtgtacaacaagatattttgatatatatagatagatagatagtaaaatgattactatagtcaagtaaggtaacattgacatcatccacatatttattcatttataacttttttgaagttattatgcttttacatttttaaaaacatatacaaagaggttaggaaatacctttatcccctaggaacatgtgattctttcagaaacattcaatgcaatgtaaaacaatacttaggctggaggagatgttcatccttgttttctatttaaatactgaaatttaatgtttggcaagcagtggcataaatcaaattttatggcactctaaaagcagttctgcatcttacgtgaggaacctgcttttaaataagaacattatgtcatttaccatctagaacttgggtaattagccaattctaataaaagaatgcagggttcataacatgttacatctgaacttgttttcctattggtgctgtacatagcaaaatgatgcattttatgagatagaaggtgggtccttcttgtttcctgactattatgagtaatcaaaccaggaaacaatgactggtgctttactagagggtagacacttagtaaagatcaaagtaacttggatatgggaaatctattaatcattattttgttatgattgttaatagaacttttctatgtgtgttatctacttggctgatgacctagaccacaatgtaaatttgaccaacttaatcaataaacatttgcaaagttttcagtttctaaaagctcttattttcatattcacctttggaaaactacctagaatttacattgatgaatggaagaattaccgctatgaagtaaactattttggttactgaagaaaatgacctacttaggttattgaaccaagaatctaccaacaaactactctgatctctttaaaactttctcattttcatcagatttctagttgttgagaagaaaagtaaagatgtcaggtctcaccacacataatgtaaaatatgttcaccttttgctatggtttgaatgagtcctttccaaaattcttgtgttgaaacttgatgaccaatgcaatagtgttaagaaatggttccttttagaggtggttgagtcatgagggttcctcgcttattaatgggattaaggtccatgatggttaatgctgtcaacttgattggattgaaggatgcaaagttttgatcctgggtgtgactgtaagggcattgccaaaggagattagcatttgagtcagtgggctgggaaaggcagactcacccttaatctaagtaagcacaatttaatcagctgccagtgcagccagaataaaaagcaggcagaagaacttgaaaagactagactggcttagcctcccagcctacatctttctctcatgctggaggcttcctgccctcaaacattggactttcgctttgggactcaaactggcttgcttgctcctcagctcacagactgcctattgtggaccttgtgatcatgtgagctaatactccttaataaattcatatatatatatatatgtatatatatatatctcctattagttctgtccctcttgagaactctaatacaaggtccttatgaaagaggcatttgcagcaacatgaataagcctgaaggacgttatgttaagtgaaataagacaggcacagaaagacaaatattgcatattctcactcatgtgtgggagctgaaatagtagatctcatggagatagagagtagaatggtgggtaccaaaatttgggaagggtaggtgggaggggaggatgaagagaggttggttaatgggtaaaaaaataaggttatatagaagaaacaatggccaactccattggctcacacctgtaatcccaacactttgggagcctaagacaagaagatcatttgagcccgggaatcgagacatgcccaagaaacactgggagaccctctccctacaaaaaataaaaaattagcgaggcatggtggtgcacacttctagtcccagctacttgggaggctgagacaagaggatcacttgagccccagaggtcaaggctgcagtgggccatgatggcgctactgtacttctgcctggatgacagtctcaaaaaaaaaaagaaaagaaaagaaaagaaaaaagatacaatgaacaagttctagtgttgattagcacagtagtgtgactaaagttaacaataattaattgtatattttgaaatagctagaaaataagttttggaatatttccaacataaataaatgataaatatttgaggtggtggatatctcaattaccattatttgatcattacacattgtatgcatgtatcaaaatatcatatgtaccccataattatgttaaattatgatgttatcaacaacaacaaaaaagctccacatagtgtcctgcccttttctcccttctctcccatctgccaggttccttcacacagtgctccttccctctataggatacaacaaaatgatattttggaagggaataccagcccctcccaaggcaccaaatctggtggcatcccagcttctggaactgtgagaaaataaaatttggttctttatcaattacccagtctatgttattttgtaatagcagcacaaatggactgcggcatttgcctttgtaagaaaaatgatatgccatgtttgggaacgttcaaatacatgctatagaagagcaatttaacaaatgacctttagctacatcaacctgttttaatatatgcatgctttcaccttacatataacaagctgaaataaaatattcagtgtgacacatttattgataacctcattttattcatggggaaaaattaaattttcaatgtaaaatttttccttttgtagaaaataacttacaagaattttcagcttcttattttgttacaaaaagcaattgaaatgtagatattggtaaaaggatcttagaataattctcccatcttaatagaagttttgtcttggttttgtctgtcttatttcacaatcttttataaaactctcctgaatatcaactgcaactattccggtttgtgactggtgtcacagcaaattcaggaacacatttattcctgctgggggcagaggggaggggggcccagaaagggaaggaaaagaacctatgactcagcactgatcagttctactatttggaaaattaatatctcagggattgttttgttttccaatctgagagcaatctgctttgtagttcttacctcttagtttaccaaaatccctttcaattccaaaaaggctagtactgactcatcacagagacagcatgaggccatattgctttgtgaaattttcattctgacaatcatgtttccagactgggcctttttgcaatgctaattacaccattaccactctgcaggctaacatttctgtggcagaatcccataaaagtttgccgtgtgtatatatcataaatgctcatcagctagttgagacacatgtccacacagagagggaaactgatgagattgttatgctctcactccaggtgattatgaatagtagacacacaattattggcaggatgttcatagatagatcattttgcatatggttgtgctgatccaaggcattgcatgcttctaacaggctttagagatccccatgtatcctgagttgtacttttgagatgcctatctcacctacacactcctcctgacttccagccccatatttctttatatattcattaaaaagcatatacttcagttttgattccaaatttataaaaaaagctattatgtgctatgtaatattttgagatttacttctctgcttgattatatattgctatgatttattcatataattgcatatagagtttatatgttttaactgctataagatatcccattgtgtaaatatatcacaatttatccattgtattattaaagagccttgtaatatttccagctattgatcttataaatttcttatatatgttttctgcagatatgtaagagtagcttttggacactcacacacacatacacatgtacacacacctaggaatggaatggaattgctatgtaataaaggtgtttgaatatctagtcttacaagaaaatagaaacctgtcttccaacagtaatttacacatctatcagcaatgtgaaatagatttcattgatcccattctctcaaacactggatttcttgatttttgccattgaatggttgtagatgatatctcattcagatcttgactgcatttcccacatccctaatgaaatcaaacatttctcatatttattggtcttatgtaattactcatgtaaaataccgttcatgtcttttgcctacttttcttttgaattcttttcttttttatttctagaagtttatgtttttgatacttaccctaatgtcggttatgtatattgcagtatattctcccagtttatagcttagcattctgctcttttaaaaaatgttttgctatatacagacattttaattttaatgtaaacaaaattaccaattgtctttattattagcaacatggttattttaagaaatcttcccctacttaaagattagaactacagttttcatgttatgtcaattatattaacgaatgtgttaattcattaactacaatgttatacatgcaggctatagaaaatgcataatatacagttatcaaaaacctctcaacctagaggggaaataagctcatgaatagatgattatgtagaacataagtgttattttattacaacatgttgtacactcagggcagaagtatgcttccataaggcaggatactgtaaagtagataacttttgtagttttctttgtatctatcctaaaactttactgaaacagataggagaatatagtccaattatttgtctgtaaaaatatttaaataccacaaaataatctgctaagaatggctcagaaaaaactgactgtataacaacttttatgtacttatttccttgtgagcttgaaattcctcctaccttcatcccattctccactgagtatgtcttgggatccttatttctttttattttattattattatactttaagttttagggtacatgtgcacaatgtgcaggttagttacatatgtatacatgtgccatgctggtgttctgcacccattaattcatcatttagcattaggtatatctcctaaagctatccctcccccactccccccaccccacaatagtccccagagtgtgatgttccccttcctgtgtccatgtgttctcattgttcaattcccacctatgagtgagaatatgcggtgttcggttttttattcttgcgatagtttactgagaatgatgatttccaatttcgtccatgtccctacaaaggacatgaactcatcattttttatggctgcatagtattccatggtgtatatgtgccacattttcttaatcctttctatcattgttggacatttggtttggttcccagtctttgctattgtgaatagtgccgcaataaacatacgtgtgcatgtgtctttatagcagcatgatttatagtcctttgggtatatacgccgtaatgggatggttgggccaaatggtatttctagttctagatccctgaggaatcgccacactgacttccacaatggttgaactagtttacagtcccaccaacagtgtaaaggtgttcctatttctccacatcctctccaacacctattgtttcctgactttttaatgattgtcattctaactggtgtgagatggtatctcattgtgttttgatttgcatttctctgatggccagtgatggtgagcatttttcatgtgtttttgggctgcataaatgtcttcttttgagaagtgtctgttcatatccttcgcccacttgttgatggggttgtttgtttttttcttgtaaatttgtttgagttcattgtagattctggatattagccctgtgtcagatgagtaggttgcaaaaattttctcccattttgtaggttgcctgttcacgctgatggtggtttcttttgctgtgcagaagctctttagtttaattagatcccatttgtcaattttggcttttgttgccattgcttttggtgttttagacatgaagtccttgcccatgcctatgtcctgaatggtattgcctaggttttcttctagggtttttatggttttaggtctaacgtttaagtctttaatccatcttgaattaattgttgtataaggtgtaaggaagggatgcagtttcagctttctacatatggctagccagttttcccagcaccatttattaaatagggaatcctttccccattgcttgtttttgtcaggtttgtcaaagatcagatagttgtagatatgtggtgttatttctgagggctctgttctgttccattgatctatatctctgttttggtaccagcaccatgctgttttggttactgtagccttgtagtatagtttgaagtcaggtagcatgatgcctctggctttgttcttttggcttaggattgacttggcggtgcgggctcttttttggttccatatgaaatttaaagtagttttttccaattctgtgaagaaagtcattggtagcttgatggggatggcattgaatctataaattaccttgggcagtatggccattttcacgatattgattcttcctacccatgagcatgggatgttcttccatttgtttgtatcctcttttatttcattgagcagtggtttgtagttctccttgaagaggtccttcatgtcccttataagttggattccaaggtattttattctctttgaagcaattgtgaatgggagttcactcatgatttggcgctttgttactggtatataagaatgcttgtgatttttgtacattgattttgtaccctgagactttgctgaagttgcttatcagcttaaggagattttgggctgagacaatggggttttctagacatacaatcatgtcatctgcaaacagggacaatttgacttcctcttttcctaattgaataccctttatttccttctcctgcctaattgccctggccagaagttccatcactatgttgaataggagtggtgagagagggcatccctgtcttgtgccagttttcaaagggaatgcttccagtttttgcccattcagtatgatattggctgtgggtttgtcatagatagttcttatcattttgagatacgtcccatcaatacctaatttattgagagtttttagcatgaagtgttgttgaattttgtcaaaggccttttctgcatctattgaaataatcatgtggtttttgtctttggttctgtttatatgctggattatatttattgatttgcatatattgaaccagccttgcatcccaggggtgaagcccacttgatcatggtggataagctttttgatgtgctgctggattcggtttgccagtattttattgaggatttttgcatcaatgttcatcagggatattggtctaaaattctctattttggttgtgtctctgcccggctttggtatcaggatgatgctggcctcataaaatgagttagggaggattccttctttttctattgattggaatagtttcagaaggaatggtaccagttcctccttgtacctctggtagaattcggctgtgaatccatctggtcctggactctttttggttggtaagctattgattattgccacaatttcagaacctgttattggtctattcagagattcaacttcttcctggtttagtcttgggagggtgtatgtgtcgaggaatttatccatttcttctagattttctagtttatttgcgtagaggtgtttgtagtattctctgatggtagtttgtatttctgtgggattggtggtgatatcccctttatcattttttattgcgtctatttgattcttctctcatttcttctttattagtcttgctagcggtctatcaattttgttgatcctttcaaaaaaccagctcctggattcattaatttttgaagggttttttgtgtctctatttccttcagttctgctctgattttagttatttcttgccttctgctagcttttgaatgtgtttgctcttgcttttctagttcttttaattgtgatgttagggtgtcaattttggatctttcctgctttctcttgtgggcatttagtggtataaatttccctctacacactgctttgaatgtgtcccagagattctggtatgttgtgtctttgttctcgttggtttcaaagaacatctttatttctgctttcattttgttatgtacccagtagtcgcccagtgaatctcgctgattgctagcacagcagtctgagatcaaactgcaaggcggcagcgaggctgggggaggggcacccgccattgcccaggcttgcttaggtaaacaaagcaggcgggaagctggaaccgggtggagcccaccacagctcaaggaggcctacctgcctctgtaggctccacctctgggggcagggcacagacaaacaaaaagacagcagtaacctctgcagacttaaatgtccctgtctgacagctttgaagagagcagtggttctcccagcacgcagctggagatctgagaacgggcagactgcctccgcaagtgggtccctgacccctgaccaccgagcagcctaactgggaggcaccccccagtaggggcagactgacacctcacacggccgggtactcctctgagacaaaacttccagagggacgatcagacagcagcattcacggttcacaaaaatccgctgttccgcaatctccgctgctgatacccacgcaaacagggtctggggtggacctctagcaaactccaacagacctgcatctgagggtcatgtctgttagaaggaaaactaacaaacagaaaggacatccacaccaaaaacccatctgtacattaccatcatcaaagaccaaaagtagataaaaccacaaagatggggaaaaagcagagcagaaaaactggaaactctaaaaagcagagcgcctctcctcctccaaaggaacgcagatcctcaccagcaacggaacaaagctggacggagaatgactttgacaagttgagagaagaaggcttcagatgatcaaactactccgagctacaggaggaaattcaaaccaaaggcaaagaagttgaaaactttgaaaaaaatttagaagaatgtataactagaataaccaatacagagaagtgcttaaaggacctgatggagctgaaagccaaggctcgagaactacatgaagaatgcagaagcctcaggagccgatgcgatcaactggaagaaagggtatcagtgatggaagatgaaatgaatgaaatgaagcgagaagggaagtttagagaaaaaagaataaaaagaaacgaacaaagcctccaagaaatatgggactatgtgaaaagaccaaatctacatctgattggtgtacctgaaagtgacggggagaatggaaccaaattggaaaacactctgcaggatattatccaggagaacttccccaatctagcaaggcaggccaacattcagattcaggaaatacagagaacgccacaaagatactcctcgagaagagcaactccaagacacataattgtcagattcaccaaagttgaaatgaaggaaaaaatgttaagggcagccagagagaaaggtcgggttacccacaaagggaagcccatcagactaacagcggatctctcggcagaaactctacaaaccagaagagagtgggggccaatattcaacattcttaaagaaaagaattttcaacccagaatttcatatccagccaaacgaagcttcataagtgaaggagaaataaaatcctttacagacaagcaaatgctgagagattttgtcactaccaggcctggcctaaaagaactcctgaaggaagcactaaacatggaaaggaacagctggtaccagccactgcaaaatcatgccaaattgtaaagaccatcgaggttaggaagaaactccatcaactaacgagcaaaataaccagctaacatcataatgacaggatcaaattcacacataacaatattaactttaaatgtaaatggactaaatgctccaattaaaagacacagactggcaaattggataaagagtcaagacccatcagtgtgctgtattcaggaaacccatctcatgtgcagagacacacatagcctcaaaataaaaggatggaggaagatctaccaagcaaatggaaaacaaaaaaaggcaggggttgcaatcctagtctctgataaaatagactttaaaccaacaaagatcaaaagagacaaagaaggccattacatcatggtaaagggatcaattcaacaagaggagctaactatcctaaatatatatgcacccaatacaggtgcacccagattcataaagcaagtcctgagtgacctacaaagagacttaggctcccacacaataataatgggagactttaacaccccactgtcaacattagacagatcaacgagacagaaagttaacaagtatacccaggaattgaactcagctctgcaccaagcagagctaatagacatcttcagaactctccaccccaaatcaacagaatatacatttttttcagcaccacaccacacctattccaaaattgaccacatagttggaagtaaagctctcctcagcagatgtaaaagatcagacattataacaaactgtctctcagaccacagtgcaatcaaactagaactcaggattaagaaactcactcaaaaccactcaactacatggaaactgaacaacctgctcctgaatgggatccttatttctagtcacactgaattcttagcttttgccaatgcacttgatcaaagtgtaggttctgagtatgtagtctacatccaactatatctatgcatggctttgattatatcaagtatagtttgcaaaaaaataacaacgttggaggtttcatacttcttgatttcagattatactacaaacctattgtaaccaaaacagtatggtattggcataacaacagacacatagactaatggaaaagaatagagcgcccagaaataaacccatgcatatatggccaactgatctttgacaaaaacatcaagaatacacaatggaaaaaatctcttaaataagtggtgctgggaaaactgaatatccacatgcaaaagaatgaaattgtacccttattttacacagtacacaaaaatcaattcggaatagattaaagacttaaacataagacctgaaactataaaacctctagcagaaaacatagcgaaaaacttccttgacgttagtcttggaagcacatttttgaatatgctgtggaaaacacaggcaataaaagcaaaagaaagcaagtgggattacatcaaactaaaacgtttctgcacagtaaagaaaacagtcaacaaaatgaaaaggcaacctttggcatgggagaaaatatttgtaaaccatatatctgataaagaattaatatttaaaataaataatttatataattagtaaaaaacagataaccctttaaaaagtgagcaaaagaccagaataggcatttttccaaagaagacatacaaatggccaacaggtacctgaaaagagactcaaaatcactaatgatcagaaaaatgcaaatgaaagccactataagatattacttcacacttgttagaattgttattatgagaaaaaaaatgatcataagcattgacaaggatgtatagaaaaggggttcttggtacatttccaccaacagtgagaatgttaaatttattatgctaaatttgtacagccattatggagaacagtgtggggattcttccaaaaattaaaaatagaactaccacatgacccagcaatattacttctgagtatttatgcaaaggaattgaaatcagaatctcaaagacacatctgaactaccatgttcattgcagcattattcacaacagtcaagagatggatgtcaataaaaagatgagtggataaataaaaggtcacatatatatgcaattaaatattattcagtcttaaaaagaaggaaatcctgacatttgtgacaacatggaaaaacctggagggcattatgctaagtgaaataagccagacaccaaaagacaaatactgtatgatctcacttatatgtggaatccaaaatagtcaaatttatagaagcagagagtagaatggtagttctaaggtaggactaagggaaaggggatttgaggagatattagtcaaagggtacaaagtttctgtcatgtaggatgcatcagttctggagagcaaatgcataacatggtgaccctaggtaacaaattatatcgaatacttgaaatctgcaaagagggtagaccttaagtgttcctgtctcatatgcacacacacacaaatggtaatacatgaggttatggatatgaaaattatcttgatttttatgattatttcacaatttacaaatatgttaaatcatccagttatagactttaaatgtatacaataaaagtgttaatttgtaatactttgaatttagctaggaagctttgtagaaaaatactttctatgcaactgagtgatgacaatgtagtgtgtgagaattcattgtatgtgttatgattcaacatcaagcattagttattagataattagttacttaatgtcaacatctaaaaattatggagagatgaaaacaaaaaagcatgccttggaaaacgcaagttgccttctttcttagtgaaatgattgttttattttctcttcatgaaaaggtttgagttctctctggtggcttctgcagaattgatatcatgtgtgatctctgagagaagagaacactttaaaccacctatagtgggatgttccatgtttcgctttaagctggatttgaaaattgatacccatggcacaaagaaatgcacatgatgatacaactgtggaacatcattaaaattaccccaggcagcaacagctgtagccctatatgctgcaccacagctggatatcctttgtgttatatagagagacaggtatgcagagagtaaatggaacaagaagaagggttacctaactcccatgaggtgatcagagactgcatcttggaagaggtgaattttaaaggatcagtaagagttagcttgatgaggtggaggacagtacacatggggcaactaccctacataaatcctattgagctttaaagatggcttatttccttttgtggcttggaagacattgatatcattccccaattaaaatctgtggtatggcagtatgtggatcctgccaccattaccaacaccactggaaaccaccctggtggttagcatatgtaaatatatctcatatacattcattcaaaacgacattcatatcagaatagatcattgcacacaagggacaaagggcaaactctagccacagattgtgtgccaagagggtggttttccaaatgatcccccaaggtctctttccttaccaagggcaaagtgttcccatgcagggttatgccacacgtttccattcgagcagatggcagaaaggtttgtctgcaatgtggaacttgttaagggggaaggccttcctgatagagatcaagaaggccgctttaatttacttagtggtgggatggtttgtaagtcattcatgcttgtgaggataatgcctttataatgacttgtaagtagattgagagcctccagagttaactcacgggaaaaggctgtttatctgctgcttaggtttctgctgaacactgcagacaatatattcacttcttttccatgccatttaatgacatttcacatatatatcattttttggtactttgtaaaaatattattttgcctgtctggggaaggggtcaaacatcgtaagaaggttagctttgagagatgacttgatggtctatgcacaatatcatcaagactaaccaccaccaaaatgatcacaatcaccaccaccccaggggcgatgttgtacaagtgaggacgctttcactaggttatgctgtggtaacaaacaactcccaaatgtcaatcatttaagacaagaaaattttatttttctctcatacaaagttcactctgcaaaactctccagagtagctttcctccataggtgggttcagcattccaggccatttgagtcttatggaatctctatattatcacacatttccataatctcccaggcaggaaaacagagcactggatagttctgtgctgaaaattaaatgctcaatcctggatgtggcacacatgtgttctgtccaaaccctgctggccagaactagtcatagagctccacccaactgcaagcttagctgtgaagtttaatcctatcatacactgaaaagaggaagaaactggataaaggcaagtattacagtccactttaatacgaattattttaaattttcaaagtaactttatccagcaaaggttatgtgttcatattaaagatgagatgcaatgtggattaggtgctgagagcataggttttgagtcagtcttgaacccccaatatataatctgtggggctcaggcaagacaaaattcctaaacttgtttcactttttgttaaattgggataaggttatacaccttatagagatggtttgaggcatacatgcaatagattaaatgggtagcatagtttctgacacgttaagtgctctaaaaactttagctcatattattaaaaggcaactaattatcagatgttaagaaatatatgtctaatgagtgagggaataattcatctcacatatttcaattgaacaaatcaactcagaaggcacaaatttttacactgggttcaaaactctcatttctctaatttcaaggctctcctttttcccattgtatcacagtgcctcttgtgatatagaatgaattagcaggttgggcccaatttttatgaacagtccctctccctaacccagcctctccatttcagtctgactctatgcatgaaaaggactttggtttaatcacaattgctcaaacatttgcaaggaagacaggcgacatcctatcttgtgtcagaagatttagatttagtcctaactttacttaatgcctatgcaaccttagtcagttacttaagttctcacctataaaatatagcatagtagaagtttgtgtgtcataaaaacataacagtagaagtttctgatctgacttcacagggatgtggggatcaaataaattgagagattgaaaaatactttgaaatatccaaggggctgtaacagtagatgttgctgctatcatgatttagggacagaaaggtgttctatctagcaaagaagaacatagcacagaaaaacagattagtgtagggcacatgggtctgcttttaccagaaggacatatagtgagaacagttacttgtccaaaagtccagaaccctttagacacttaagatatcctgcctgtcacccaacctgatttgctgcctgcctcttagccaactactcagattgattctttttgaaaatagattcaatgtatatgattaacattaaaactgttcctttttagacacatttttcttagcatacaaaagcatgacaaaaatttggacttaggcataaataaaaacatcttcaaatataccattggcaaagacactattaagaaaattaaatgataagctgcagactgggagaaaatatttgcaaaacaattatttgacaaatatatgttgtatctgccatatgcaaagaacttgtaaaaccaaaaaaaaaaaaaaagtgaagacaacctcactttaaaaaatgagggtagggagcattctgtaaagcaacttggcagtgtgtcctggcctatagtcctcaaccttggtccaaataactctctctatattaaaaaaaaaagtaaaataaatgagagtaaagtatgcggaagatgctttagcaaagaagatatattaatgtccaatatcacttgaaaatatgttcaatgttgttaacattattgtcagagaaatgcacattaaaaacacatgatacattcaaaataggtaaattaataacgaaaacatactatatatatatatcagctttttctgttatcagtaaagcttccagtcaacagtggttacctttttggaagtcgaaagttatatacagcaggtctgggcgtgatggctcacgcctgtcatctcagcagtttgggaggctgaggcaggatgattgcttgagtacaggagtttgagaccagcctggggaacatagcaagaccttgtgttaaaaacaaaaaaaaaaaagaaaaaaaaagttagacacaaagtttctactgcttaggaggttagcgcccctaatctctgcattgttcaagggtcaactgtattttgtttgtgggttttcaaacaactgtatacatttgtcaaaatttattaaaccacgcacttaaaataagccaacttaattgtgtgtaaatgatacctcaataaagctgatttaataataataaaaacgattccctctacatagaagagagggaatgaactaatactgacaaatcaaccaatactgacaaataaactaatactgataaaagttctttttcatgttggcctgtgtgtagcaaaccagccatagaccaggataaaaaatttgtcagcattattttttttccaggtatgtcatttagctttttgtctttcctcttttctttcctcctctctccccaccgcctgcttttttttttttttttttgagtcagggtctctgttgcccagactggagtgcgatggtgcgatctcagctcactgcagcttagacctctaggacgcaattgatctcctgcgtcagcctccctaataggtgggactacaggcccagctaatttttctaggttttgtagagaaagggtctcactatgtcgcctaggctggtctcaaactcctgggcttaagtcatcctcctgcctcagccttccaaagtgctgggattacagatgtgagtcatcgtgcctagacctcttgggtctcttttacatacccccattattatgctatttttgaatagttccctattttctgacacttcaagatgttccagaatcattttttatataactatcccagccctagaaccagccatttttccttggagccctggcttcttttattgagaataatattagaaataaaaatctagatgttagatgtgattattgctgttggagtagcattttatctaggccctgtcagctaacagagcaagaaaatatatacatgcctactaacctatgtatatcaacatatctataaagatttctatgtgtgtccatctacatctatattaagctaaacatgagttcatacagatgtctccaactctaacaatgtggatcattctagtcttcttcccttgcttgtcagtaacctcccactccatcacaatccattacttgcttgttcaactccagaatacttacatactggtttcagaatttttaacccataggcctagaggaaaaaacttcatctattagagttcagtgcttatgtgcagtaccttttactttagtcttacaaatgccactcatttccaaagttactgtggttagcacctttttctcctataccctttagtgaggttatctcatatatttgtaataaagtcacctgcttttgccacaatacctgcatcccattttggcatctcatgatcaactagattttttaaaataaatttacaagcattaagtctcactctttgtgctgtacatttctatgggtattggcaaatgcatagtatcacatcccaccattactattgttgtaaagatttgtttgacctaaaaaatcccctacgctttattcaatacttcctcctttccaaaccccttggcaactccgcttgtgtttaccatctctgtagctttgtcttttctagaatgtcatataattggagttattccatatgtagcctttccagattgtcttttttttttttttcacttagcaatctacatctatgtttctgtatggcttgatgctgtgttactttttatcactgaataatattccactccatggatgtgccactgtttatctattcactgattgaaggacatcttggcttacttccaggtttagcaactataaataaagctgctgtaaacatttgcatgcagatttttgtggatatgttttatttaaatcagattggtaaatacagagtagattgattgctgaattttatggaaagactatatgtttagctttgtaagaaactgtcaaactgttttccaaagtagcttaccattttcattcccaccagcaatgaatgagagtttctgttgctctgaatgctcaccagaagttaatattgccagttttttgaattttagttctccagtaggtatgtagagttagctcattgttgttttaatttgcatttccataatgaaaaaatgatgtcgaacattttttcatatgcttttatatatatatatatatttacacatatatatgtatgtgtgtatatttggtgaagtgtctgttcatatcttttgcttattttttaattgggttttttaaaattgttgagttttaagagttctttgtatagttggtattcaagtcctttatcagatgtgttttgtgaatatatttttccagagtatgatttttgattctctgaacattttcattcacagaacaaaaccttttaattttaataaagtcaaacctatcaatttcttctttcatagattatgcttttggtattgtacgtcatcatcaaaaccaaggtcatataggttttataaaatattttcttctagaagttttataatttcatatttgtacatataggtctatgattaattttgagttaatttttgggcaaagtataagacgtgtgtctagattttttctttgtgatattttattcattatccattttctatatttgtctttacaatataagttatggaaattgttgatataatctgagtattacttctttaccagttacgtgttttacaaatattttcttccagctgtagtctgtgagttgctttaaattattttcttgatttctttttataatatactcattggcataatattattcacatacacaacttcagacactattcacattgtattttactgaacatcgcaatcctgtgtacagaaattttaagcctaattttacagatgacgaattaataattcttgtctttatgattagacttttgtctgatctctgaaattcctttctattttgagaaaaaaaaagtatcttattcttttttcttctgaattaaaaaatgtattaacatttaaaatattattacacataaagtttatttttaaataaagtatcagatagagatactgttcaatttttttccaatatggataaataattattccgacaacatttattacctagtctccgattttcctgttgattgatggtcacctctgatgtgtatgaatttccttcacatgtgtttgatgaggctttttcttttgggttttgtttttttattttggcccatttctctaaattttcaccaacgaaatacccttatattcacattaaatacatttaaaatttcaaaattttagttgggtgagtttctacttatacttcttaagattcatcttggttcctctttgttgggcagatgctacagaaaacagtatggaggttcctcaaaaaattagaattaggactattgtatgatccagtaatttcacttctgagtattaatcaaaaggaattgaaatcaggattctgaagagatgttaatactgctgtgttcaatacagcactattcacgaatagccaagatgtggaagcaacataaatgtctattgacagataaatggataaagaaaaaatactatatacaaacaatgaaatactgttgagcctttgaaaagaagaattctgaaatatgcaacaatatagatgaactttgaggacattatgcttagtgaaataagccagacacagaaagacaaatatttcaggattctacttttatgaagtctgtaaaatagtcaaattcatagagtcaaaaagtgtactagtgtactggtggctgccagaggcaaggaagagggtaaaatggggttgctgttgtgaaaggaaaagaaatctcaggacccctaaatcagtaaaccaaagggaagagtcaagctgggaactgcgttgagcaaacttgcctcccattttattcctaaataagatagctacaaagataaaagaaaaaaaggtacatacctcctcataatttgcccacaaggaaattccctgtcatcctcaagatctttacccaaaaacagttctgtcgaatttcaccctggcaatgtaaattgataacttgtcttcacagttgtaggacaaaggacagaactcaaagtcatccctttgctcatctgagacaaatgcgtatctgattgcttcctttgcccttgcatttatggaaaaatgcagattcattcagccagactaatgcatacgtgactattcctctaccttcctctcacatgtaagttgtgtattcagtgaaaggctcatcaaagactcaaaagaatacaaccatttgtctattacctacctatgacctggaagcccctgtgatatggtttggatctgtgtccgtacccaaatctcatgttgaattgtaatccacaatgttggaggtggggcctggtgggagacaagtaaatctagagggcagatttcccacctggtactgttcttgtggtagtgagtgagttcttgtgagacctggtagtttaaaagtttgtggcacttccccctactctctctcttgctctgactaccgtcatgtaaggggtacctgcttcacttttgcctcctgtcatgattgtaagtttcctcaggcctcctcagaagttacgcagacaccagcattgtgcttcctgtatagcctgtggaaacgtgagccaattaaacctcttttctttataaattatccaatctcaggtatttatttatagcagtgcaagaatggactactacagaaaattggtaccagagaagtgagaaataaccataaagatacctgaaaatgtggaagcagctttggaactaggtaacaaacagaggctggaagagtgtggagggctcagaagaagataggaaggtgagggaaaatttgaaagttcctaaagacttgttgagtgttggtgaccaaaatactaatagtgatatggacaatgaatttcaggctgaggtctctgatggaaatgaggaacttactgggaactggaataaatgttttgctacgctttagtgaggagcctggctgcattatgcctctagatttgagatctgtggaacctttaacttgagagaggaaatttagagtatctaacagaataaatttctaagcagtaaagcattcaagatatggcctggatgcttctaatatcctgcactcatatgcatgagcaaataaatgacctgaaactggaacttatatttaaaaaggaagcagagtgtaaaagtctggaaaatttgcagcctggccatgcagtagaaaagaaaagcccattttcctggacaaaaaattcaagcaggctgtagaaatttgcataagtaataaggagccaaatgctaatagccaagacaatggggaaaaggcctccaagacattttggagatctttgtggcagcccctcccttcacaggcctggaggtataggaggactgaatggtttcatgggccagtgctagcgccccactgccctgaacagcctcgagacaccacttctgcatccaggccactctagctttagctgtggctcagaggggtccaggtacagcttgggccactactttagagggtgcaagtcataagccttggctgcttccacattgtgttaagcctgcaagtgcacagaatgcaagagtaaaggttgggagcctctgtctatatttcagaggatgtatggaaaagcctggatgtccaggaagaagcgtgctgcaaaggtggaaccctcatggggaacatctactaaggtagtgtggacgggagccactcctgatgtggaggggagcccctgtggggttggagcccccacacagagtccccactggagcaccgccaagaggaactgtaagaagagggccaccatcctccaaacccctgaatgatagatctactgatggcttgcaccttgcacctggaaaagccacaggcactcaatgccagcccttgaggacagccttgtggactgaaccctgcaaaccacaggggtggggctgtccaaggccttggggacttgccccttgcatcagtgtgctctggatgtgaggcacgaagtcaaaggagaccatttggaaacttcaagatttaatgactgacctgctgggtttcggacttgtgtggggactatagccctttcttttggctgatttctttcttttggaatggaagcacttacccagtatttatacccattgtatcttgggagtaattaacttgttattgattttacaggttcataggcagaagggacctgacttgtctcagatgagactttggactttagatttttgagttaatgctagaatgagttaagacttttgggtactgctcagaaggcatgattgtattttgcaatgtgagaaggacatgagatttggaaggggccagtgagagaatgatatggttttgatctgtgaccctacccgaagctcatgttcagttgtaatccccaatgttgtagggggaggcctggtgggaggtgactggatcatggaggtggatttcccacttgatgctgttcttgtggtagtgagtgagttcttgtgagatcttgttgtttaaaagtatatggcacctcccactactctctctcttgctcctgttctggctatgtaagatgtgcctggttctcctttgccttctgtcataattgtaagtttcctaaggcctccccaggagctgagcagatgctgcatcatgcttcctgtacagactacagaaccgtgaggcaattaaaccccttttctttgtaaatgacccagtttcaggtatttctttgtagcagtccaagaatggactaatatgccctgctttgagttgtgccccctttctggactgaacttatgtacatgttacacatattgattgatgtctcatatctccttaaaatgtgtaaaaccaagctgtacgctgaccaccttgagcacatgtcatcaggacctcctgaggccatttcacaggtacattctttacctaggcaaaataaactttctaaattgattgagacctgttccagatacttttggttcacactgttcaatggacataaagtttcagtcaaaaaagatgaataagctctagatatctgctgtacaatgttgtgcctattgtacctatagtaaacagttctcatgttaaatgttctagccaaaataaaaaaattaaacattgaattttacttatcaagttccattaaaaacaaattgaatttttttagaattgcattgaatgtatagattaatttgggcagaattgctatatttcagattttgaatatttccacccatatatatggtatatctacccatatgttttattttaatatttttcatgttccttaataatgtttattttttcttttctgtaaatgtagcacatatatattatatatattatatattatatattatatattttatatatataatatatatattatatataatatatattatatataatatatatatataatatatatatttaaatctattcctgggtatcttataatgcttgttgctgttgtgaatagtttgtgtgtttaaattgatggtttcaagcatgtaaggaaagtgtccatttttatatatttatcttacagctagctaacttgatttactcttttatcagttctgatattctgtacatttttctgcatgattacctcatcagtcaaaaatgacattgttttctttactaatctttatttttaagttgtattatgtagtattttcaaggaccacctacaatgttgaatagaggcagtgataccaagcacatttctcttgattaaaaaatactacttctaaaatgtcactggaaaattgtattagctatagagtttattagaaacacttttcaaattaaggatattatgttctatcactagtttgctaaaacgtttgcaccaaaaatcagggtttaactcctctgctacttattttttacatatgtttcaacagtaacaaaccttttcatcttataatgtgatgaattatattcaatcatatattctgtccataaatatttattgagtatctatcactagaatcaggtattaaagagagctaggaaaatagaaaatggtagtcagagaattgaatgcatgcagctgagattgaatagagattgcaattacagaaatgtaaattctgatatataaccatgggaatgaatgcctgaggtagcatggaggacaagattatctgaggagaggtgtccaaagaattaatgaatgttgggagaatcatcttaatatatattttggaatcactaagaattaagatagaaatagcgttgcatatactgaaccaagaactataatcattaagacatgaaggggcgttaagtagatgatagcaacaaggaattaaagtggtagtgtaatctgaggccacaaggttcagagctgggagatttaagggagtaggaaaggagaatggcttaaaagtggcaataatagacaaagaggatacatgttcctcctccagttaagaggggtagctatgtggaaacagcatctcaggggagagtcaagtggctctaagaataagaagatcaagaacagttagaggaagttttttacatataggcaaatttgctaataattgacagtggattccagagatcatggtaaaagaaaatgtaagaaatgaagtgagttaaggagatggggatagaataggaaatatttaaaggacctatggaggttagagaaaaggagctgatggtgactcagtggtctggtcttctataataacagtgtataatgagcataactgagactccacaagtacaacacagaaaatgagaaggagcctatgtgtattggtgaggtaaggaggggtgcctgtcttgtttctattttgatcctgttaaaacggaccaaaatgtctgggggagaattgacttagttccacttggagtctgtccttctctgtgctggtgagcctcctcttgactcctgaccatggaggataaagtctgaggatacagggtgtggccatttttccaatgagtggggcccagtttggatctctataggtgagagtggcctgtgtcccacattcacggctgatgacaaagaatgactgggggaacttagtttgcatctaccatgaggatgtcctcttggcctctgaaaactgtgggatgagaaaggtagaaagatttctttactctatatgaagtatatcagcatctgtgttaatagtggaaactgtctataattttctctggctttcatgtatcagaatcaaggtcatcctagcctcataaaacaagttggggagaattccttcttttattgttctctggaatggtttgtgtaagacagggcttttgtgttccttgaaggcgtagtaaaagttgtctataaaactgttggagcctgatggtgttgatatttgggtttgtgggaaggggaagatatgaaaaggtgggggtagggagatggatttttttaaactcccaacctaatttctttaatagatgatcaatttctctaatatttctttgcttagccttgataatttactcatttttctaagaaattgttcattgcatgtttgttttcaaatttattggcataaaactttttctaacattctttaaagttggggaaaagtttctactgttctaccatacctgtagttttatccctctttttatcttgttttttcttctttttttttgactagctttgtgatggatttgactatttattagcctttcaaagaataatttgattattatcaaattatttagatttactgtttttctcttttttattttgtttgtctatattatttccttcctctaactttctttagattatcttcttaaattgcacatttaacttacagcatgtcattcttaattttgtatgtctatatctatatttatttgtagggacacatatccctgtaagcattgctttagttgcctactaaaagttttatatatgattatttcagcctctgtttttttatttcttttttatttctggcagctgggcatttgtctttcttgtgagctcatttgtatgttttccatacttttctgttggtaatattttatttgtggttccacaaataaaatatatttcaaccatgttactgagattggaacactaatatacttcttagagttgataatgatatatatatgtgtatcattctatgatatatacatatatgtatataatatatgatatatagatatatatcatatgttacatatatttataatgatatatgtatcattatcaactctaagaagtatattagttttccaatctcagtaacatggtggaaacattttttttgatatataatgtgatatgtatcattatcaactctaagaagtatattcattatatataggacatatatatcatatcacatcaactgtatatatgtatcatatcaatttcagcatatctatctatatatagaactaggagaaaaataatacagcattaatattgagttttctgaaaaatacgatctccaagtcaaagaataaaagtaaatggatttatcaatggggtattttaatgatcaggcattaaaaagacagacttttaaaatgatcagtctaaattataagtcaagcaggtggtagcattttgatttctgcatctgcaaactgggaatgagaaagtctacttccttgtagtgaggataaagtgaaaatggtagggaaaatactttaaaaagtaagcacaatgttacaacacagcatatgaaaattctagtttccaagtacttggagtcagatataatgagatgtatgtcaatgtgttttgtagaccatagagcagtgatatgatatgatatgattgatatgatatgatatgatatgatatgatatgatatgatatgatacacgatagggtttggtggtgtccccatccacttctcagtttgaattgtagctcctataattcccatgtgttgtgggagggtcctggtgggagataattgaatcatgggggcagtttccttcatactgttcttgtggtagtgaataagtctcaagagatctgacgattttataagggatttccccttttgcttgatcctcattctctcttgccttctgccatgattgtgaggcctccccagccatgtggaactgtgagtccattagacctctttctctttataaattacccatgctgagtatgtctttatcaacagcatgcaaatggactaatacaatacacaacacgattattatttttaagtacctatttctagaaaaagttatttgaatcctttaagtttttacactctaacaaaattagcatatttagaaaatgtactaaacactttaaatgttccactaggtgacatcaatgggaaaatgcttgtgaacaaattcaggtaggaaggaataaagagcttgttgtgtgagaggtgtctatgaagtttcagtcttattccctctatctaggtattgattcagggcactatctttttttttcctttttttttttttgagatggagtctcactctgttgcccaggctggagtgcagtgtcatgatctcagctcgctgaagcctctgcctccggggttcaagcaattctccagcctcagcctcccaagtagctgggattacaggcatgcaccaccatgcccagctatttatttttttagtttttaatttttagtagatatggggttttaccatgttgaccaggctggtctcaaactcctgacctcaggtgatctgcctgccttggcttcacacctggaattacagatgtgagccgctgcacccaaccagggcactaccttttaaaggttctaccacattcctttgtatgtccttgctgacattcattttctttacattttaactattatcaaatcattttttttcttggaaatagacaggttataagtgattaatcaaaattatcaatgaaacctaatatgtacacatagattgatagaagggggaatgttttatttctcctcttaaactgaggaatttactagatgtgaggtgttttaatcaaattctaaaccatagctatctttgcttcctgaatacaaagttctagtaataaagtaactcaaaactgaccccctctcaaatggatgatccaagttatgacagctgattcatctcttttgatgcatagaagttattctcttcagagtcagatgtgtactcagcattcctctgcattttggatattataattttcaaaagagtaatataatggtaattacttctcttgacaattactcacaaataaatcacatgtatagagttaaatgcctttctatttattctatttttacatctggacacaagttaagtactcctcatggtaccatagcttttatgaaaagatttgtaaaaaattttctgtggcactattagtctgactatcatgcattcctctattcatcagtcaacaaataagggtagaaaagttattatccttccagatctgctcctaaccttcatcctacatgaagcctgctctggtaattctagtttgccgaaacctctcatttgagtatctgtagagtctccttgggcactgaacatgcctgccctggttcctctcctgaactactagggaatatccaagtgcttatgctgttgatgtagatctgtgaaaaggaagcttgcaaaatgttaggctgctgcttccctgatgagaatcaaaatagcaatatatttgcaaacataaacttctgtccatgagattttgatataattaccatgaatcccctccacacactaatccaagtactgtgggagggcagtggtgtctgcacatatgtttgcaaattttcaaggcctctgttttgtccaaaaagttttcactggaattacttgcatacactggatttacttgcatacactggattctccattccacactatttttccctattctttttctttttatcttatcttaatattcacctaaacaggggacccccaattctttctccctgatataatttcctaaataccgttatttctctgtcatctccatcagcctcctccttgacataatcaaaagacacaattttggtaataaaacagtgttgaaccagtttatcttacagctctgtcagataatttccatagaatataaaaattcctactccagaaaattcccttggtctttttcaccaactaagactccagtttctcaatacgtttctctgtagcttcccactccttccccaacgtcactaccctccagcaacttctccacaccactttccactggatcatgcagagcccattccacattcccctgcctgaattccagacttagttcctgatctctctgtacttatccaaaaatacattaatgtgctcagctaaacaatggtgagtgttatgctttttctccttcccaatcaatctccagggaaaagaacgagggcagagggttattgcttccatgatatggaatatgccacccttccttcagggaaaatcattatctcttcagcactgggagatgaatggatcttggatgttcattctggaatagtatctgaagatggccaaatcatatatgataattcttcatttctaattagagtaacccttcctgatctttaagccttaattccagagaagggtgtgtgtgtgtgtgtgtgtgtgtgtgtgtgtgtgtgtgtgtgtgtgaaaagcaggattaaagaaaggaggaggccaaaagtgagctgaccatgagacattatagagttatgattatgacgtttggagatgaactttctggcaatcacagaagcaaggaaaacctggtgagcttcatcaacagaacagagaaaatgcactcattcctcaacagatacacattttctgaaatgtaattgtaaaaataacttgcaatcagatatggttgcatttattcttgacaatagttttacaacaaattttgagcagtttccatacagcatctgttttactgaccccctcagaaaagccaaagagatggcatcatagtatatctttgtgaaaggcatactgctgtgggtaaggtaattggttcaagaagtcttctagtgacaccaaagaaggtgtaaatggattcagaatttggtatcactgagacacttccctcagacagaggcttgtgtacacaggaatctaagtctatttgctacaacatatgtttgaccctaacatgagtctgacttgtatcttatttcatagagttaaaattcttgggaatttaaatgattcagccaaacttattcagtttcagaattctgagattctgaagattgtataatatgtggcaagttcttggttagacatttcaataactgaactttttgttctaacactgatatcctttagggctccagtaggaaaaatttaggactggaggaaactaacatgcatgcaacaggaattactcagtaggtggaatcagtcctgttagccctatctgtgcagcctccagtggaagacccctgtttctgtgtagctcaaggctgcgctcaagttggagagaagatgatataggagcataaccagcaagctcggtgggcttgcagggaccctggggagctcctgatgggagccggctgcctccgcgcttacacagctgtaaggctcttcatgttcttgggctggcctagcacatgtgtggcttcaaaatgttcaaacctcaggcctcaaataatcttttgttctgttttcctgctttgtatgtttgactcagtagctttgtttattttcataaagtatttccttttggtttgtgtttcttggcatggcccagtttgggattttctacatgcaatcttcttgggaccccttgccattcataatgccacacctccaggaggtctgcaagctttcagatgatttccacttcctaaggcttgggagagcactaaggaccatgatgccttctctttttgtacctgaggggtgagggctgtagggaacacaactgtgtagggtctggagcttcctcatttacagtgcaagagatgtactcaagccaaagaaatctcatattctcatcttccagctgaacttttttatcactgatattggcagtactgactctttgaaattacaagttttttgaccttatctttggggtcctgcaactagtgggttctttaaaagaaagccaggcagaaagataagctctcaccagcagccccaagtcccagagaaagcctcagcctttctttacatagatctaccagctttttttcccttcccctgaggaaagacataaaaccctttccccaagattgtcaacattccaaagcaactagtcctgcaggttccctgtgtgcaaatggccattgcccttctctggagctgagctccagggtggaagctcttggctccctgagcatccccttcaaagaggaaaataccagtgcctcctgaaccaacaatgagatatgtttgactagtggtgatgaaatgtcttctataaacactccctaccttacccacctcccctttctaggactgattcaccactgaaatattcgtgtcacccaagttcaagtacatgaaaccaaaccctttggtgtcagttgttcttaagtgctgtagaaagccacacaaacttcactggctagggaggtaattaagccaaagccagctgctggcctccaacaggccttcgagaactacaaatgagacctgggcctggggctttctgggtcagatcaatagtgcctgctgggaatccatgttgcacagtgaattacccccaaaagttcctggccttgcccagccagaatacatactttcagcacaagaagagataggaccaaggcaccaactaatgtgatttttgtcttctaccatcagcagactatgtaatctcattatctcaggaccctctccctcagagcttgggatccgaaatgaagtttaattttaaattcttatgtgagtacaaggcttttttttttttttttttttgacaaagtctcgctctgttgccaggctggagtgcagtggcaggatcttggctcacggcaacctccgcctcctgggttcaagcgggcaacctctgcctcctgggttcaagcgattctcctgcctcagcctcctgagtagctgggactacaggcacacaccaccacgcccagctaatttttgtatttttagtaaagatgtggtttcaccatgttggacaggatggtcttgatctcctgacatcgtgatctgcctgcctcggcctcccaaagtgctgggattataagcatgaaccacctcacccagcctgagtacagagctttttacatatatttttagaataaaaatgactgtaatgggactagactaattatttccttaggggaaatatatacatatatatatatacgtatatatatatgtgtatatatatacgtatatatatatatgtgtgtgtatatatatatgtatacatatatatatatatgaagcacccaatttttctatatattacagggggcattttcagcaggaagagtgccagtataaatcaaaactcccctggttatggagaacactgaacccaagcaaattctcctgggagtccctagtcattgggaaagacactatccctgaagcaggaggagtgatgaccccctttcacaaaccttaaattttattttcccctgaacactatgttagataaatctttaccttctcaggaaagtctgtagaagttcaggttatttatgatctagctacagtatattgtttttattattatagtactgaatgctgctgcaactatatgtattgagctgttattctaccacagatgttatgcaacatagacacttttaggtgtaaataagcaaattggcattttccaagctagcgttttgaaccctattctcaggatgtcaattagggtaatatgaaacaaaaacttgttatgtattaaaattgttagtaacagctgatgacaagaactttaaaaggtttctttaccttagaatcttcaataactgagtgtgcattgcaaatctccaccagggagccttagtgtgctatattttccaaatttattctacaaagtaactttattttttcttttttcaggactattaacaactcctgaaatactaagctatagaacacagtttagcaaagtgggttaagaagaatttcctgtgatataactaagctaattcagccagtgtagtttagcctagaaggggctagaagattgatagaagaaatccgtattttaaaaataatattatttatggccactaaatagaacattttaaaaacagtgtcttaaaagaattaatttgtatggactgtctaagtagcaaacaagcaaacaaacaaacaaacaaacaaacacacactctggctatagaacactattttactgggcttaatgttgcttgtgtgtggcccatgtcaccttatgccctttggattagaaatacttgtgtggctgacctgggagatggatcatcgaatataaatttacatgtgtaagaacatctgctctgaattgtaaggagctcacttacaatttcaccttggaaatatgacttatttgtaagatggcactacctgtaatggaaagctaaacttcctacatcatgggtgtgtaagcagatgtgttctcatttaagctttgcattccttatctacattggtctaaattagtgaggtgagcctatccccagagctgacatgtgaatacaatgtgaggagaaaaacactccttcttcagtgtttcagccctgtttgcagttccaatcacaccttctcatgttactggtaaatcagtcaagctcctggcctgagtttgcagctcagagaaaggcaacttgtcccttgctgagctaaggggcagcctccaggctccttttaatctgattgttttaattcgatttaatctgcccagtaaatatttttcttcagctgcagaaaagtgtaaatcaaccaagtagttcataatctatgtacacagttaacagaactcacgctggctgatgcaatgggagttgatttgcgtttgcttttgccaggcaatcaccacagttccccacggggtaagcatttcatatgatggtaataacagaagcagtacctcaccccattattaactccaattcactgatcagttactatgtacttgtagctttccgttaccttcattatacttgggaaagtaggcatcgttatccccattttacagatgagttaaacgaggtgcagaaagattgaatgatgtgcccaaggtctcccctaagagttggtgaagccagcattcaaactccaagtatgctcgatgccaatacctttgctcttgctgttatactaccaccattctgtctatataaaatgacacacacacaattttaacctgttcagttctatgagctaacatccttgagctgactcaatagacttggctgggatttgtttttttaatgccaagcatctgagaatcaagatcaaattggacctttcaaatttcttccaaaattcccatggagacacagacgacgataattcaaacatctactaacatttagtactaacatctaaattttatccagaacctggaggcacttgtgcaactgcaagaccatgagcctgtatagaagaacatcatctgaggcctgcttctgtgatgtttctagggaaactgaaaacctgcacccactaaagcagggaggaagactatttacccatcaatccagaataatcaaaccctcatcacagctcaagacccctctgcttcacaggggttagtgtttgaagcaaccaggagggggagggctgagctgtggcctgggtgtagtgatggagaaggatgttgagaaggagtaggaggagtaagtaaaagtatgttaaacattttacatgcagggagaatcaaagttgacagcaataataataacagcaatgtattgagtatacacataaaatgatgccttttcaaagacatgcttgtaagtttgactcagagcttagaaaacttagcaaaggagtattttctttttccttaggggataagaagattgatctgaggtcagaaaaaattgagtttgagtctcattatgctactttcttttttgagacggagtctcacgcagttgcccaggcttgagtgcagtggcaccatctcagttcactgcaacctctgtctcccaggttcaagcagttctcgtgccttaacctcccaagtagctgggattacaggaacctgccatcagacgcagctaattttttttttttttttttttttttgtggagatggggtttcaccttgttggccaggctggtctcgaattcctgacctcaagtgattcacctaccttggcctcccaaagtgctgggattattggtgtgagccactgtgcctggcctcattctgatctttactagttatgtgactttcacaagtcatttacctttcgtgaacctcagtttacggaactgtcaaatgagaataataatacccattttcgaaggatgctgtaagaattaaatgaggtaatacatagagtattcatagcctggcattttgctatcatttaaaactggcagcaataataatatttgaggccttgttcttgtattacaattgggccacaaaacaatttgtcaaggtaaatagaagaaatagacccagagcctgcacatggctaccagcacaaaggctgtatttaaattgaaataattattctagtcctagttaatgctttttcaattatagctccatgttttgtcttgactttcttagactgatagatatatgtttaagaatatttttgaaaatcttaaaagtaatcattaaaagaattaaaaccatatgtgtgcctattaaagtttggggagatataaaagcaaagacctccaacttgaaaaaagtaaaagaaatatgaaaaatacatcccaaatataaagtacacacacagaaaaaaaggtgacagaagaataacacaaattaattgttaaataaagacaaatgagtttaacattcttattacaatacagcctcctttggggaacaaaaataatattagtaaaacaaatgtctgctctttataagggtaaatcttgaaacaaaatgacagaagaatagatcagaatagtaagatgggcaaagatttttccagtaaatgcaaacagaagagcttaatgttgggtaaattgattgcatcttgcaattctaatttgtgttctgtcagttataaatgaagttggacatctttcataaattttccagttcaatttttttcttataaacttcctgctcacaattcttcctcaattttctattgtattttttgactttgtaactgatttattagagtcctctatgttagtccttaattgtatgtgtttcaaaaaaattttctcatttgtcatttgtcttcggactttctcacaacagtttctaaatttatgtgcacaagactgtttatcacaacttatttttaataatacgaacctgaagaatactcttctatataaatattagggtcaactttcaacttgcttttttcacaagaacctcatggggcatattaaagaaatcatattgaatcaacagaattatttatggaaaattgatttatatatgttattaagttttttcatctgtgatttacatatcagtttgtcatttatttccaagtatttgtagtttccattaaaatttgatcttcaaaccacacactatttagaattgcttttttgtttttttgaaattccaaatgtatgagattttggggaagcatagtttatcacttttaattttatcaaattttagttacagacaatggtttgtgccttataaattatttggtatttattgacattccttattgattaatactgtattagttttctattgctgcataacaaatcatcccaaacttcataacctaaaatgacacccatttattagctcatatagttctatagttcagaaaactggcacagagcagctgagttctctgctcatggtctcacagtgcaggaattgtagtatcagctgatcttgtctggaggctctgggaaataatctgcttccaagctcattcctgttggtacagttcagttctttgtgggtgtaggactgaggttcctagctacatctgccagctatcagctggagatcactcttagctcctagaggccatatgcatgaagagcctcatgaccccatccatctttaaagccagcaacagaaaatttcttttgtatcaaatcatcttcatactttgaatctctggattgtcctgtttctgacctctagacccagatttaaagggctcatggagctgggtcaagcccacttggataatttatctattttaaggtcaactgatttggcgccttaattacatctgcaaaatcattttacagcagtaccaagattagtgtttgattgaataactgggtgtatgtacaccaggttttgggctcttggaggccctcttagaattctgcctgccatagacgtgtgcttgaaaagcctacattttatatatataccgtgttcagtgtttcataaatgtctatttgatcaaacttactgtgacctcaaatcttctatgtccttacaaattgcacaggttttaatgtgtctgaaacaatgtttatattaatatcttgacattcatgaaagtagtgtagtcaaatcagtgaaatttaagacagagaaattagtgccatttaagacacttgcattttatctcacaaatatatatatattttatctcacaaatatatatatacatacatatatatatatatttgtctacacagttctctaagaacttagggagaatcaattccttcctatttcacagatacatcagataatgatactctactcttgggcatagaaaggttgttgcttcaccaattccattctccaataactctaaagcatcctgcaggatcctcttcagtcatctcttcatataatacctgacccccaacatcttatagtccttcacttatttgtcgtcaattcttcctctctccttccttcctttcctccttcccgtcttcccatagtaagcttttgttacacacacacacacacacacatttgtgagcaggtgcgtgtgtgaatctttaattatatctcctcttttcttattcagctatactatactgcctatgattgggtgtgaagattgggaagaaacatgtgttttaggttaacattgtgttcctagtatccaggatagttcctgttccatagtgctgttcaaatatttgttgaattagtaatggatattatttataaacaaatggataaatagataactgtttataaagtgtccatgatgaggcaaggctttcattcaattataatgacacttaaggtgtcattataatttataattataaattatatatgtttataagtttatatctctgctttccccatttgcctatagaatctcttcactgctgaagtcatcctagtctacaatattaccaatttcttacctggattactgtaatagtctcctcagtgctttccctgcattctggttccctggcttcaaatccatcctccatacagcagtcaaagtgagctcttaaaactgtaaatcacattatttcaccactatgcttaaaacctttttaaaaaaataaagtctaaattaatgtataaggggcaaccgtacataccagtttgcctggcacacttctatttatgcttactatcctaacataaatcctactccaaatgcctagatgtcagtctatgacccatgggtaaaatgtctagtttttgaggacatcctgaaactggcttaaagacttaaatggcctggccctttaacatgtgcttggtatagatatgagtgaattagtgttggctggggattgcatggcctagagctccttttgggtatctttgttgtttttcagcctcacctctgcaagagcctttgtaactgagtagctgaatgatagtaacaccctgttgatttttttagctgtccccagagtagtctttgttcacacgcagggtgggcagcactcattgaactcgatacatgtgagccactttgttcagctttgacaacatcccaaaattttccgctatgtgttcttctaaaagttgataatatttttgacatgattcctaaatatattgatcattgatactgattgttaccactcatagaacattagtgtcagtgaaaaatcatactttattttattttattagcatattagcagtgtaagcatttttattaagacagtagtctttccctagagcacatcatgaaacagtcaatacttcctttgaccaaggctagtacttgaaaacataactctttaggcttaacatgtctagttatctagcagctaggtaaacaatgatcagtttgggttgaatatatagggtgccaagtattaaattgtttgttgtaaatataatttctgagcaagaaaatcatgcctccttccttgagcatttgagattttaagataaaaatgacagagctccctgccttataagacttacagcttataaaaaagatagcttttacagacaaacattgtaataatattctagaaaaaatggcttgcatgatgtctggcatacagatggcattcaaatatgtactacttgaataaataaaataaagcatgcatgagatattaaataaaagtacaaagattgagggaagcatagcagaaagcactttctgcatgggaagttagcaaaagcatcacaagccatggttgcacggagaccgacctctggagcttgtgtgtgagccgactagatggagaaggctggagaaggtgtcctgggcaggtggaattgcttggcaaatgtgtggagctgtactgaaaacaaaaccatgcatggcatgtgcaggaagttgagtaggagttcaatgatctggaaagggtcctcaaaatttcgtgggtaatgttttatcaggatgagaagtaatggctttgacagcactgatgtccataatacaagttgattgtgcttcagaatgtaggctattgatatttctccctggtccatgcaggattcgatgacacacatttatcacattcacaaaagcagctacccttgttcttggagcacctagtccataggactgctagaccacatgtactcaaagatgggcctcccaagatcattggggagcaaacggcccatcctccctggtaactgtggatgccactggctctggctactcctagtaaacttctcttttctcgatgctcctggataatatgtaagaaccaaaactaaatgagagagagtgcgtgaggttgtttgcctgaggctaagtctgtggcgcctctctacttctttgcagtgtttgtttataaggtcatgtgaggcaggatggtataaagggaatgctactgaacatgtgggtaaatctagaatctgaatcccagcttggctcgtggctaactttgtgatcttgggcaaattacttcctttctttgaattttggtgcagaggcaatttttgaggttgctgctagctctaatagtttaggaccacatcatcctattgtgccccaggttgtcagaataaccaggttttttagatggtggagtcagaatggagaaacaagcaaacaacaaaaaaaatcttaaggaaaattttatgggcaatatcttatctgggtgaggaaagtaatggcctcgatagtactgctgcccatgattcaagccaattttttttttccaaaaagtacagtatcaatagcccagacaaaccactaaatgctggttagctgggagttggaagaaacaagacctgagttagatggacatagtctgatgccataggctcatctcttctgcaactttcacacaatctcaggcatcaaagctgtttgcctttgagtgagaacagcttcctctctaggggaacttctatttgctcactatgtcccagaaagcaagagaaaaacaaaaacagcgggaccactctttgctaaccctttgctagcacaccagtcttaagagggtcagagtctggtagctctggtcttctcagagactgctttaacagaaatacctcatgacctgggcagggcagagtgaactgcagcatttctctgaaggaaagagaaggggccccagagctccagtatcatatctaatagaaaaatgttctgggtgtgacgctgtgtaggaggacttgtttctgtgagggagccttatgaaaagacacacagactaaacgagcaaacaaaaaagtggcagacatgaatgtacttcctgccacattttacacaacatggaggtacttcctgccacattttacacagagatgaaagttgattttgagaacacaaagatattacagtaaatactttcatctctatagtaacaagagtgagaaaaatcattagggttatgtttgtgtgtgtgtgtgtgtgtgtgtgtgtgtgtgtgtgtgtgtggtatctggctactgtactttaacaataattcctcttgacattatacaaggtcagcaagtcacctcaagaccaccctgctcgagggtttgctttccacacagggctgcatgggctccctcagctgagaaatgtcacccagcacctttcatatttatggtgactcataaacaggaaaccagtcctgtccatgacattgtaactttttcatatctcaaatccttttatcaaaatgaaaacacacacacacacgcatgcatacacacacacacacacacacacacacacacacacacaccccaaacaaaataagagaacttagctgccttctgctttctgggccaaaataaatattgccaaattagtaaggcatactgaacaaattaagcgctaaatgcaaatttatcgactgaaatccaatggcagagtcaccaaagagcttacagtggtggagtgcagccctgtaagtaggtgtttgtgttggcgagtctctgcagagggacatgggaacagtaatataaaaagagagcatttctgttacacccaagatgaacagtttgttttagaaagttcaagtaaacagtgtctaacatatattcactgaattcagaatctcagttgctaacaggagagggatgaaaaaaataagctggcaaaaattttttaaaaatatctcatttggaaatgttcaagtcagcatcataaatcatctgatgagatggagacgttcctcctcatctctgagccatgaataagcctcaacagtgcttcacaaaggcaaacaagaacttctccctgaaggatatttaaaacctacaaaataaggagaagatttatcccaatattttctaatgtcccaaatggaatatacatgatcctttaaagttatgggcatcatttattatgtcaaagttttaaaagttgtatacatattgccttgttttgatgattgatttgggaggggttgaggtagagagtggacatgtttttaaatgtgatcctgtgattgtggactcaatgacagcccttcctacactgctcaggttctctcatctactttattatgaaataccctaagatgcagagaaactcagtaagatctctgtttgcattagatgcttcttctttagcaaagagttcccacttgtctcgtctttgaaactagacaattgaagacaccatgattcagagaagtcttttatcacatactacaaattgagaatagaatgggaacagcatagcatgtcaagcctagaaggatgtttagaacactttctttaacagaggaaaaatctgtgccagagaaagttctagaagactattatttttatctgctgactcttaaccaaagtgctttctacataccactctcctctcaaacacagttattatttagaggttttttctatagataatgttctcttcctacacacagcaacacagagtaacagagttaaatttctcctttttcatgccatattttgttgcaagaaaatccagcggcctttttctgcagaggaggaaatcaagtctaaactcctcaagcgatttgtgttttgaggatactcttggcctttgttggccaagacagagcacaagtttagaagtggcagtgccaggaagacagtgagaaaactgtgaagcagaaaaaagtccagatataacaacttaagaaagggaactatattaatatttagtgggtgggaataaaagtgacttagacattatcttccccaatatgacattccctaagaaatcagctagtgttaccttttcaaaagttaatttatattttttaaaattaacacatttatatttatttatcacgtacaacataatgttgtgaaatatgtatatactatgaaatggctaaatccagccaattaatatatatattacctgacatacttattattttgtagtgagaacccttaacatctagtgttacatttttttaaagtgtctagagagtcaaaggaatgagcattaaattgatttaatttatttgcatatcacaatttcaacaatctagaaaccaagcaactgtaatctataaaaagcagcaataccttcagttcagggactcacacagcatagcaaacaacctcgtaagtgtagcttaatttacctgtgacaccctggattcatcttagatttatttttttgatcaatagtctaggtcaataaacatccacacacatacttagaaacctatccctaggagttcaggaaaaacttgaactactaaaaaaataattacaacagaagttaaacaaaactcttttaaactgatttaaataagaagtaatataaaaataagcatagtgattttattaataattatactcattaacaatatgtaaatttcttggtgaaaataaccaaagtttattgttattgcagttcaattctcagtcatgtctccttcagtggaatattaaactaggacctcgcgtggccctggttcttggtatagaacccacagccatcaccttagctgggtggccaatccctcccctccacctgagcaaggcagctcagagtgtcagtctgctccagaatcgacctgctccaccatcaagggattgggtcctcctgtcctgcagaagatacaatgactgtcacctgttggttatcggccagtttaaagcaacaggtgtcttccaatgtgtagatgtttaatgaataaatattaattttactcttttcacatgggttgatctgccctagaataatcttgggttgcctaattcttcctacctcaaaggttgattgttcagatgaattaaactgtgaatatgaaagttttgggtaacctcagagaactaccaatttgaggagattggttattagtgtagatactcatggaaatgctgtggcaaacttaaaatctgtgctgactttgaaagtgacaccatatgaagttatttataagacataggggggtttgtgtttcaggccaggttttgctaaagcagtgagctgggagtagaatggactaggggttgaataaccaccttagccgcaaggatgaccaccactcatacaaaagcagtctcccaggagtggcctccttttcagccttactcaattaacagcactgtgctggggcacttggcaaagcacggggtcactggagggctccctgggaagcacaggtcctgtgggaagtgagccaggtcctcacacctgcctctttctctgccagcactcctctctgtctccttatagacttcttcgcatttcttttcagagtgttctatttacacagacaccatccaaactcatcatgcaaatctttgcactcacttaatccaatgcccagcacatttgaagatgtaataaatatctagactaatcttactgaactatcattgtcaacatggttatcatcatcattagaatttatttaatctttacaacattcttttcagttccttaattaggataaatccaaagttcatctcatacatataactggtaaatatgttatttacagtttgtcttacatgacagagtctatattaactgaacaatttgatatcagagaattctctcagcatggtgaaaatattccttttgttgctgctataagttttgttgagatatcctgaaataaggtaacaggtatctgggcagctttgttcagacaatgttgccttgaccaggctgttttctgttgggggatgatctactgtccaagtgtgtgtatctggtctttcaaactgtgtggtgacctctttaagagtataaatcttatctcctatttctgtactcttttccagtatctaacaaaagacttcacacttagtaagtgttcagaaaaaactctgcaataaatgagggagcctgagagcagatggggtttgggttggaccagcattgtcttctgttgagcataaagactggtaattctgtaggcctctctacagtcatacgtatccataaaaccccatttctccatacatgaaaacacactcgacacagctgatgtgcatgcatctctctacacactcacacctgtgcaggcatgtgtatcctagtatcccagtatgctccgtttctgacattcacttcctctgcactcaaaacaagtccctaccctgcccaccacaaagccaggctcacagccaggcacactttgtacacagacacacgccaacacaaacacatgcaaacttataaagaggccagcactcgtgcacacacatgctacacacatgcacacctgcatatacttcaggtgtgtttgaagctgagactgaaagttgggaagcaccctgaatccctgcctgtgtggcagtcacaacgttataaaatatgtcacactaaaaaaaattctctttagcccctgaggattgcaggttgactttaatgttttcaaggaccccgaatactgactcttctctaactttgctcagggctagttcctgaacaatacataaattgtattggaattaacgagaagaatacactgtgttctctaagtgcctttcggagtagtgtctcaaatgctcaagacaatattactattgtctccaaagctcaagcctgttgttttatctttgaggaagtttattcctagatagagatcttcataacaccagctggatatggagacatcgacaggctgggtagcattgttgccgccttataagagcaccattttaagagcaccatttaaaaaccaatgacttttctccttagcaatacagcacttgccctgctcagatctgcctttctgggaaacctcaggctttaggaattggcccagttactggcaggatccacagagttgtaaagaccaatgggaagggaaagagtttaaactttaacttcttcagacatcatggtaccatcacgaaaatgaatcagaaacacccactgagaacatttttcacagtcactgtgcagatgacagaagataaggaatgttagcaaaggtggaaagttctgtactgatagcatcttagacctgtgcgaatggagacagtacttctcggaagtttgctggggagttcacatcacttgttttcttctgacttgcagactcagaaagaaaaacctattcctaaatcactcttaagagaaatattctcccctccctcctcctagttttggaatgctaagcctaaagggcctcaacttaattcctttctctctctctctctctttcactctctctctctttaacaggagaagaaaaaccaagaacacaaaaagagaggggcttattcacagtgaccttataatataggggccaaattaaaacttgagctcaaagtcccagactctcattttaggttttatttttattttttcctaatcaggcaatgttattttccactactcatttaattctccccctttaccaatgggaattagccatcttttcagtgaaaatggttgttgacttggcttaattttgtgctacaagcttttaatttactatcacatttactgtaacgatttgaatagggttttgatgaaatcttaagtgaatttggtgggggagcagttaaaaatgaattcgattgggatatttaaaaagttttttttttttttttcattctagagacctgggggattttagaacagggctttcaaggtaatgaaggaagagaatcttctttggacttctttttgctccagatgcggagaaggcaacttcccggagtctctaccagtgagaaggctacagaatcatgggcgtaagtatgcatggctgggcatatcctggggtttgctgtcttgtaccaaagaccggaaatcaaaggccacttgaattgttaagacacatctggcatggagtcatgttgctgtctccagacttgacctgccagactctagtctctgggtaacacttttctacccactggcagagctgaacaggtttttggaggccatcagatccaacccattttgtaggtggaacaatttagggccatagaaagtgtggtattcagaataatcccttcacctcctctacaaagttgtgcatgtcctaatccccagagtctgtgaatatagccaaagagaatttgcaggtgcaattaagttaaggatctcgagatggggagataaccctggattatctggggggtccaatgtaatcacaagagtcctcataagtggaagagggaggcaggtgaatgagagtcagagaaggagaagtaactgcagaaagaaaggtcagagggtttcgattgctgagtgaagatcaccagccaaggaaatgaattctccactagaacctccagaaggaatgcagcccagctggcactttgatggtatccccgtgagacccctgtcagacttctgatctctggaactcaaagatgaatttgtgttgctttaagccaccaaatttgtgatagtttcctatggcagcaatagaatactaatacaggtagaaacaagcaaaagggacaaggacctgccttctttctttttccttttgcctggaaaccatctctcctcatgccctttctttgcttggccaacttctttcctcctcgagccttagctaaggacgtgttgtagcaatgcgtccctcagactagattcagatagtttctctgggttgtgctttttctatgaagttactcaccactgtggactgtactgacttgcacgttcatctctcccagcatgctgcagagtccttgtaggcacgaaccaggtcttattcatcttctgatcacaaacatctagtgcaggagagctttgagtcattagttttgaatgaatatgtcagagagtaatggaaagctgttttcaaacccaggtgtattagagctttctagctggcattaaagaagaatgcatgcatttcttctggggtattattcttgtctttcactttttgcatcgcaagagagcaagtccttgagatgaccttgaagcctttgaatccaagtggattgcctgtggggtgacaggactttggggacaggctcaggatggctgatccaaggcaaggcttatgccttgagctcctcaggaaggggcgtccttgaacttgtcactgagttgttacagctccatggacaaaatctctctgtctgaggtgataaaccagtttgctaacatcctctctgatccccagaaaaatcaggtcaccaccccaaaagggaagctttatttccagaaggctgaggaaatgccaatgccagatatcacttggcagttcatgaatggctccaaaaatctgccatgggctaattgcaaatgtctgttcctatatatgaagataagcatgaacaaacatctatcaccagctgctggttcttggaaccagttgattgacctagcagagtgggttattttggagaagacagtcctgatgccttttttttttttctggcttcttctacgttcctctgcagggtatatccatgacaccagcatggacttttgctggctctcccagtgtcacggaccccaagaaaataatagggctcattcaccttagctcttccatctcgtagaagtagggctgttattgttacccaggtccttcactttaacctctgtggatgtggctctgacttaggtgctaaagttgtgtgcacagtctgccaccagtggaaggcaccctagatattggtgggatgggagctcaaagatctggaggatgtgtcttctttctcaatatttgtttccattttacaaatgaaagacaatttaggcttaagcatatcatgctgattgcctataatacactgcactggctgtagccttgggagaatgtctggcaaagaaaaggaggcaaatatatacacaaccccaaaacaaggtggttatttcatagtggggcttctgtgggacctccttcttcccaagggttggctagaacagtcatttcctgatatggtttgattctgtgtccccgcccaaatatcatgtcaaattgtaatccccagtgttggaggtaaggcctggtgggaggtgactggatcatggggacaaatttcctcctttggtgctgttctcctaatagagttctcatgagatctggttgtttaaaagtgtgtgacccctctccccttctctctcttactcttgccctggccatgtaagatgtgcctgctttcccttcgccttccaccatgattgtaagtttcctaaggcctccccagccatgctttctgtacagccttcagaaccatgtgccaattaaacctcttttctttataaattatccagtctcaggtatttctttagagcaatgcgggaacagacaagtacatttccccagccgggtcttctaatgtatcaccacttcttgagaaccttgtgaaaaggattcaacagtcaagtgggcttagaaaaagctgcatcttatttcttttggaaatttacaacacaccctgagaagtcatataggaccaaacccatctaaatttatctcacaatgttttgaatattgttgcatggaaactttcccctgctgaatacctgttaatatatcatttaatgaatgttcagcagctctcattttgtgaaaccccacattttgtgaaacccttctcagggcttcttagtgaggtcagtttctttgcagtgctttctgaatgctgcacgacttaccatttatgaaacaagtgtcacagattaacctcagttaatcctcaaagcaactttgaggtaggtactagtcattcaatcactaattaattaaataattcatatttattagttatctactatgggcatggcacccaggacaagtttgctattatccccattttatagatggaaaaactgaggcacagaaaagttaaataatctatccagagtgacatgatctgcagatgacagagccagaaacaaatttcagcttctttgattccccatcttctgttgttttcgcttttctgactgcagataagtctgtaactgtcagcttgccccagtatcactctagaagttcaggagaggggtctttgctataagccgaatctagattcctgctctgtctcatcttcccctgatgttgtctctgctttcagctctgagggtctgcagagactcagagccccggccacctttgtagttccatactctgaagacagagagcaagacagaggcctttgaattcctctgcacttggctgcttcctagaagagactctcccagacacaaagctttgggacaatcattctaaagggtgcccaggcatggtgggcaagggtgggaggcctttggaccttggagtttcctgtgctgtggtctaagacctgttcagtcaagtcgaattgtaccggaattgtggagtttgtgtagcgagcccacagccagctgtttattattttaagaactcttggttgctgctcttagatatgggggtggaggggggcaagcctactgtgcagggcggctgccacattcttctgggaatgacaatgttcctctgtgtgctctgcagtgacccctcgggcagagctactgcattccagaaccctatgcagccagatgaacagaaactattttatctcctcagttattgaaacagagttgaagatctagcagttggacttctttccctcatgtagcctttatatagggaagaccccactggggacttgggattgtgacactcatggctgtatcagagtaataggtctgcatgctcacactatgctctgtgaagctccctcttcttttcctcacctttcaaaatgtgtccctgctgggtgccctgcagtatgaatgtctcagtgtcccactgaaacatctgttattacccaatcgggctcaacaccccttccagccatgtcccaagacgctagcgctgagtactttcaatgaaacagagcaatgtcctcgagctgtaaatgcctcccaaagacaatcggacagaacttcattgttttggggaagaaggcgcctcacatagtggtcacattgtggttaccagggcctgatgattaatccacagagaggatgtgcaggagagaagagctggcatcattcctgtagacggagattcttgaaaatttcatgtctccaactgaacatgtacatcagaaacacaagattcccattgtaacagtttctttggtgaccttatttttccatttgtcagttggcatatatgtaagtaccttttgtctctgcccagggatactgtgttcctgaagtataaatgtttttactcttcaaaaatttacattgtgctgactacaattatacttctaaagatgcacacatattgtgctttctaaaatttctaaatcagaaatgaaatattgggcaaatggtgcatgtagaaattaacatattcagatactgatcaatatgtatatatttagtacaaatattaaattctttttaaaatcaagttttcaaaagctctgtgcccagatcttttggggttactctaggggtttcaagcactatctgccatgattctgtcctccacgattctgtcctccacatgatcaccaccgagtgaagaggactcataaagtgagacaaacactatactcataggcaaacgctgtatgagaggagctgaaacagaagaatacaatgatatctggtggatgacaattcgctgctctgacaatactggtactggaccttagacaacttctttgagtttctgttccctcttccagataagtttgctctgaagaataaatcatgagatgtatgtataacacgctctttctcaaccagcctgatggaatagctggttaataaacatttgttttaggatggcattgtgattttggactcctatgaaatattttcaaacataatcttagtaactgtgcccctcaggcctcttcggaacagcagtagctgccaggtgggcaatggcaatggggatgaaggtggggctggtgcaagagtcattaggaatttggtcattggttggatatcagattagggagatgtgtctcagagagtttgtgtttctacagtggacagctgggcatctaatccagctcctccaatatcccaattaaatgtatgcttcagcttttggggaaacccagcccagagtgcactgccttcaggtctgtgttcagaagcaagccttctgtcaaggcggagtgggatgagctgttgcttatttttataacctaacatcacaccagacagggctcaaggctcagaagacaaagcagagaaagttgtgtctctttgaatgttgtgtctctttgttttgagctcaaggccttttaatgccatcaaatgtctccttgttcccttgttgtgcaacagggcatgcagctctgaatgggaccttttataattggaaattccatcaccgttccagttgcccctgattctcttccctgccaagcaacatcctccaagactttgaagttgcatgtttgaaggaagcatagcccacccacacctccccacccatgttcctgtccacagtgtcagctcagactctgcaatagaagggggaccagcttctggctgccacatttcaggagctggagtcagggggcctgtgctgtcccatgatccagtgctccctgtgcctggaactgccaaggacagtgcattcagaagtttcatctgcaaggaggggccgggcttatcctaaagggaatccctccatgtctctgctgggtcccagttttagagagggcatttctgggagaggccagccttatatactgcagacccaagtccgtcccaggtcctgccccaagcatacagtgtctgcttcacatgcagcccctgcttttctcatttgtatgtgaccagatttctgaaaaaatatccatagatgtttttctgacacttacagagccattggactagaaatgcatccaaacacagtaatagctttgtacctaagcaggagaggaggaaagcacaacatttattaagcacatacaatgtcagtggttgatattatattttacttaatcatcacaaaaaaacacttggaggctatctgcattgtacagatgaggaaagtgaagatcagagactgaggatttgtccgtattttcatagctattaagtgaaagaatgagattcaaaaccaggtctacttaactcaaagatgggctctttcttttagagaatgattattttcagatccttttcatactgagtctggttattaataagacttctcttttggccagctcctttaaagatgtgtcttgggcagactcttcctaacttgatatcctccctctgtgtctttttcttcctggtgctcatcatttccccagccctcctcagattccagggcccttcggatcttcctgcttctccctcaggcccccagccaacatgtatttgacatgctccatccatgttacataggcttgaaggacagttagagaagcaccttgtcttggttcatgcaggttgctatagtaaaataccataaacttgatggcttaaaaaacaatataaatgtatttctcacagttctgaaggttggaaatctaggttcgaggggccagcagattcagcctgtggtgagggccagctttctgagggacaccttcttgctgtttcctcacatagtagcagggatgaatgcactcccttgggcttctcttataagggcactggttccatttatgagggcttgctctcatgatataatcaccttctaaaggccctagctcttaataccattaccttgtggatgaggatttcaacatatgagtttggggatacacagacaatcaaccattgcatacctcctgtgtatatattgtctgaacttaatagggttttaaaaccatcagcccagaagaaggctgttgtagagtagcggtcctgtttgattcagttttatagtcctggactccaacacagttctgggcctttgcatgatgatatggtttggctgtgtccccacccaaatctcatcttgaattcccatgtgttgtgggagggactagtgggaggtaattgaatcatgatggtgggtcctttccatgctgttcttgtgatagtgaataagtctctcaaaatctgatggttttataaagaggtgttcccctgctgccacccatgtaagatgtgacttgctcctccttgccttccaccatgattgtgaggcctccccagccacatggaactgtaagtccattaaacctcttccttttgtaaattggccattcttgggtatgtcttcatcagcatcatgaaaacagactaatacactaaatcagtaccagtggagtggggcactgctgaaaagatacccaaaaatgtggaagtgacattggatctgggtaataagcagaggttggaacagtttgaagggatcagaagacaggtaaatgtagtaaagtttggaactccctagagacttgttgattggctttaactgaaatgctgatgatgatatagacaatgaaatccaggctgaggtggcctcaaatggagatgagaaacttgttggaaactggagcaaaggtgactcttgttatgttttagcaaagagactggcagcattttgcccctgccctagagatttgtggaattttgaacttgagagagatgatttagggtattgggtgggagaaatttctaagagcaaagcattcaagatgtgacttacgtgctgttaaaggcattcaattttataagggaagcagagtataaaagtttggaaaatttgcagcctgataatgtgatagagatgaaaatctcattttctgaggtgaaattcaagactgctacagaaatttgcataagtaacgagaagccaaacgttaatcctcaagacattggggaaaatgtctgcaaggcctgtcagaagtcttcatggcagcccttcccatcacagacccagagacctaggaggaaaaaatggtttcatgggcaggacagcagggggcaggcgcaggtgccccatgctgtgtgcagcctagggacttggtgccttgtgtcccagctgctccagcctcagctaaaagggccaaggcacagttaaggctgtggcttcagagagtgcaagccccaagccttggcagcttccatgtggtgtggagcctttaggtgcaaagaactgacgtttgggaatctctgcctagatttcagaagatgtatggaaacaaacacctggatatccaggcaggaggttgctgcagaggcagcgctctcatggaaaaccactgctaggacagtgcagaagggaaatgtggggttggagcccccacatacagttgctgctgaagtaccgcctaatggagctgtgagaaaagggctactgttccccagatcctggaatggtatatccaccaacagcttgcactgtgtgcctggaaaagctgcagacactcaatgccagaccatgaaggcagctgggaggaaggctgtactctgcaaagccacaggagtggagctgcccaagaccatgagaacccacctcttgcatcagtgtggcctggatttgagacctggaatcaaaggagatcattttggagctttaagatttgactgccctgctggatttcagacttgcttgaggcctgcagcccctttgttttggccaatttctcccatttggaacagatgtattttcccaatgcctgtacccccactgtatctaggaagtaacttacttgctttgattttacagtctcatagggagaaagggggactgttgggaaggcatgattggttttgaagtgtgaggacatgagatttggaggggccaggggtggaatgatatggtttagctctgtccccacccaaatcttatcttgaatcctcacgtgttgttggaaggacccagtgggaggtaactgaatcatggcagtgggtccttcccatgctgttctcgtgatagtgaataagtctcacaggatctgacggttttataaagaggagttttcctgcacaaactctctccttgcctgctaccatccaagtaagatgtgacttgactcctccttaccttctgccatgaatgtgaggtttctccagccatgtggaactgtaagtccattaaacctctttcttctgtaaattgcctagtcttgggtatgtctttatcagcagcatgaaaatggactaatacacatgaataaatgaatgagtagaactttaagaaattagcccaactgccgtgaatgagcatttgggaatatcagatatttttccttgcatctatgaaatcacgttatgttggtagacacctcacaagcctgtgcgcagtatcccaaaacattaaacttgttcttttataattttattcagcattttctgagcaccaactcttagtcaggttatgctggaggtgatatgggtatggagaaatataggccctgtcctcagaaagctcacaatccaagtaggaggcagactttatttttatgcaagaaataagacataaagtaatagacatctgtctcatttgagaaacagatgtggaaagactacctggatgaaatatctcttgaaaacaaggatttggtgtggttatgataaataatttttgtgaaagggtggaaaatgagcatgtagaatcagtagcagccttgcgatgttagagtttgaaactgtataattttaataggagagtatacatgtgtgagcattgataattatattttacattacagaatgcttccacatatagtatttcaaatgctttacatgaatgagctcattagatctttgctatcactctgaagtaggttctcttattattcccacacaacataggaggaaactgaaggcaaaagccacacaggaagtccgtggtagagctggaattctagcccagtctctgaacccccagacacttctgccttttagagatatgatggagtgtactctctggaaaccagggctatcctctctaagtacaagacactcatggaagtggtggtcaaagtgtaacctcaagcccaggcttgaatcttggactcacactaattcctgatccagatgacaatgccaggaatgcaagcatcattgtgttggtctggatggctcatgggatgggttcagattttgtgtgttcaacatttaagagacattgaatctagtggaaacagagattacatggaaaatgacctcactagctaagggctgaagttgaaaatgcctggcttgaattttggcttcaccccaccctttcttcctttctggctgcttctatggccatgtggcccagtcccaaggctgctgcagagtagccttctgtgctcagggtggcagctcctggcagcactctgtatctactctgctgtatggaggaggaactcccaaatttcagtagcaatatgcaagattatccaaagaccagagagactaaggtagaggcatttataatatataaccatgttttcctgtatgaaaaaattggaagaaaatgatgtgactcattgaaaattttcactgaaaagcccaaataattgtagggggtatggcatttctatatcatacagtattttttcttttttcttttttttgccaaaaactcatatatcttctctaccagccttgtgaaataggaaagtattcttttcctttattgcatatgagaaaactgaaactcaaacagtgagtaacaggcagaaccaagctttccaactgggatctttttgacctttggtttagtacttttcatcctggttggtgctgctttttctggtcttctgaattcaagctgaatgcttggtctcctactgtgaactatggtatttaatttatttataagcaagaatgatgttctgcctgtatgcactattttgacatttttgttgttaatgaattccaccttaccgattggtcaatgacaatgccatagtagtttttaaatattttgactagtcattctgtttttatgtaaatatttaatattttctattaccctacttcaaaaaagatttatgatagtctataaaagtatcataaaatggtaagataatattattagatgttgataaagaagcaaaaagaaatacaaagacagaaagataaattttggcagaaatgagaccaacatgaaagtgtaaatcttcatctgaaacacttcttagggatgagccacttactagattctaaacctcccaggagccaaaggcagaagaagagctgatttagtatgttatgtactgtgtctttaagaaaaaacaaaactatgtgtgaaacaaaatcatcttactgagccccctcaaaaagagaacactgtaatttaatgagtaccatttccacaatctctataaaatactcaggacaataatgagcttgaatgggtcatttcataggctgcttgaaccaagaggtaggatgtccagcaccagcctctattttgccttgagttgttttgtgaccttctgaggctacttgctttgtctcccttgttagataataatttatctaacatgtgatgcttgattcaaatttttcctgaaaaattaccaaacaataacttttaaaaactagaaaaataaaggagttgaactacagttaaggaggtgggaacatagtcctgttcgaagtacatttcttacatgattggactccttccccttgctatgccaaagacatgggaagccaaatgtttttcattaccctctgatttaacaggtggaaaatcctatggacatttgtagaatccttgtcaacttcagacagaagtagtcagtgcaattcttacacccattcattttgtcattcattcatccagctttttattagaaatgtatagactagcattatgtgattggccctgaggacatagaaacagttaagtgctaccctggaagagattatgaatcaaagaaggaaacagaaatacacagggagaatcacagggtaatgaggtaagcatcgtagcagagatacatacaatgtggtgaggaaaggggagaaaagaaccattatcaccacctgggaagctagggatggcttcctttaagacttgatggttgattccagtctggacataaattccccaagaggttgagggttagaagaagatgatttatggtgtgagaaacatattaattgcacagcagtgaccaagagtagcaaatgtgtttgggcaacagtaagcatttgaaggatacagggtggagctgctcaaaggtttgggaaggcttttattcagtagagctttagtactaaaagatttaatatcagaccacttttcccataaacctgttaagaatccatgtctctcattactacattttaaaagaaaaaatttactaaacatatggtttatttaaagtttaagaaggggttttcttatttgtgtttatttgtattcattaaggctctgagaaagagaaaaagcatcagaagcacagagagtgtactggatccatgcaggactgttggatggccatgaatcaaaggcctaagcaagtgactgcccatttccccttagatataatgctttaagaaaaaaattcaagcaacggcatataatgttacgtcttccatgatgcacttctccccttggtaaggagtgttgggctttagtttcgtgttttgggcttgcatcaactctactctgtatgattaatatgaagttcaaatggccaagaaagaatgtgctgcctccaattcagttgcataggcattcatcccaaaactgtatatttgcaaaagtcacaccatgagttaatttttttttaaagcaggaaaatctcattgccagaagaatgaagtgcctttggatttgtgattctatgagctaccctcaaagtgggaggaaaagcagagcctttatagctattaataagtggtgtgtattcttgaggttgagtttaaaaacttaaatccatgctggaacttaataacctctgaagatttagaacacatcattcaacattttcaacttcatcagtagcattggaatcaatataagtgccaggagacttgctatataaataaatttaagaagtccaaagaaatgaatggactgtagatgtgtatagcacaaataattggctggatatacaaatttaattctccttaaaatttgggggtaaagtccttttcatttgccttaggatacaatttttcaagcagaatgaaagaagagggagtcttttacttactgtcataagagttcctagactcagaggtctatgctcatatctcctgtttgctaaaattggattatccaagccaactggtagacctaatattgagtttcagtcagttgcctgaatttgccagatccccaaaaggactctgtcacaagctaaagctcattagctagcttccttactgcaatagtaattttctctcattctatttaaagtaaccctcactcatgccatggtaaatgattttacattgcacaaaatatgctgaagcattcacattttggctgatcgcaaaccacacaggaataggactttattcttaaggaatagtttttgcctgccctgggtctttgttgctcactttcagcactctttgccaacttaacattctccaagaaagtgtaaatcctaccacgggaaaacgaggtgtggaatatgtgtcttggttgatgacatcaccttctggttagggctgtaaattacatgagcctatgcatacagatactggcttctaaggtgctaggttttatagctgtatattttgagcttggaaattcatcatttaaggaatggagatgatcccttctgcccagcagagagccattctgggatcttaagggagtgcattggcccagaagtccaatgaataggaggttttacatgtaacaaagctactgattttggccaaatgcttgtgattggcttattataagtccccattataaaattctgataaaatagctaatgactacatgtgctaccttaccctcaggaaggggctaccctcattaagtgatttcaggatcccaaagaaggtcattaagctagtacatgcctaaacatctatcataagatagtctccataccttattgccaattcccttagaaaggaccactgttgaagtcccttttagtgcactagttattaactgtaagtgatagtgtcctcagggggacatttgggaaagtctgggacatttttagttgtcaccactggagaaagaggatgctactggcatctggtggggagaggccaggagtgctgctaagaatcctacaatgcacaggacagcacccctgtcactcacaacaaagaattatccagcccgaaatatcaacagtggtgagacggggaacccctgtcttagtgtaaatgagggatgtgaggggtttattgaagagggaagatggtagacggaaacagcatgaggaatatggacccttgtgtggaaagttaggaagccctaagcacagagtcagaacataatggagtgtctcattctaccgatggtcagccctagacctttgctggaaaattatagttttcaggatctttttagagctcagagagaatgaaatgaaacaaaaagtagcatggcctcaggttctattctgagctggcagagtccagcagaaagatgtttcagtagagagaatacagaatgcaagacccaggtgacaggcctgcagcaaccccaatgcagtgagggctgtcagattccatgcagaaaaactggacacacaaaatctcttccctaactagttgtatgttctctctttgtagcaaacacaaattatcagtattaatctagtcagttgtacatggcattccaaactagtgggaagtattgcgttcttcttcttcctagtttgtggatgatagattcagaactctcagatatccatagacctctctaaggagtaacagtggatgaagcatggagaacaaccattttccccaggcaaattctccaaaagtggtgcatattcaatagttttcaacagaggctgatatggcagttgtttactggatcatgataagaagatattagcagaagcaatggaaagcaaggctgggagacatgtggagaaggtgttttttgcaggcttgcttctccccacctactgaaaacacatgcctgcttcaagacttattctgttgataatttaaacttgtccaaatccctattgtccctgcaaaattctatcagcggcatccatggtgatgcgccaacttcttcttaagccagatcatgccatagctctctttttacttcctgtttgttcataaagaaactgtccagaccttctttggtgttttttgttttttttttttttttttttgctcagatgtcagctacatgaagtcacattgtaaccgcaaagagactctgtgcttgtgccgctgcctggtgttaacaaagctctaatgctgcttggcgtgaaggaggctagtcattgtggccaaacttctgagaggtgcacggggccaaatgtcggactgccaattaagcagcaaggtggaaaattcttgccttccttttggctcagatgagctggctgggaaagaaattaaaatgaaacaggcaataagaagagagattttatttttaatgtatttgagtagtatgagaagtgcaaacattactatcctattgataaccacacatcgcactctccacacacatacagcacatgcacacatatgcaatgaaaggactctaagaaactgtctctttggcattcagttgctagagctccaagttgagcaaatctgcttaagaagaaaagcaatttacaccccaggtcaatggcttaacctctgtccacatggccctgttaacacaatctatctttgaggattcagagtgaattatagagtcatagaaatctatttttagcaataatagtaattatacatatgcatagtgatttaactattacagagaatatacacatgcattttcttgttagatcttcacaacaacatcattccttcattcattaaaggtttactatgtgtcaggcactgggttcatgagattaactgggaagtgagatcaaataatgtggttataatcatacaacttctaagtagaacaacctgcatggaaacctgccttctaaccctcagtcacacattttttcaacaagctatatattacaatttctgcttccattcatacttggcatttagcttacgtagggctgatgagtggagcctctgacttaataagacagtgatcttatggcccccttgtcccacatgggacaattgtagcctagtgagggttctttaggcttttcccagtgaatgtttgttttttttttttttttttgagagctactgcctgtggttctcaacatttcatgcatatgggtaaatagtgggagtggatgattttattatattttacaaatggccaaattccacattcaatattccatagttctatgggcagatttatttatttatttgagacagggtctcactttgtcatccaggctggagtacagtggtgtaatctcggctcaatgcaacttccaccaccccaggttcaagcaattctctcacatcagcctcctgagtagctggagttacaggcatgtgccaccacacacggctaatttttatatttatttttctgtagagatggggttttgcccttttgaccaggctagtctctgacctgaagatatccgcctgtctcagcctcccaaagtgctgggattataggcgtgagccatcatgcctggccagccattatgcccactgagatttatttttggtacagtttttataagtaggctctgcaaaagggagattgtttttatttaggaaaactgaatacatcacaaatatgctgtagatattttggctcttcagtccctgagattttacttggacttgctaatttcaggccatgttgactccaggttgcttttttcacatacacacatcatcctttattctaagaattgaagagtttccttttaagccaaaggcctattgaatgggaagtttggcccatattccacatgtctgagtcctagctctagagtcagtgattaacatttctctccccatctctctctccccacttcctctttcttgtctccctctctctctctttctccccactcattcatttatgtcattcatctattaacttattccaaatgtattaaatgcacatgaatatttattgagtacatattctgtgccaggtgctgtagcagtctcttgaagatttagcagaaaacaaattatccagttcttggtatgtgatgagtgtgtgtttgtgtgtgtgtgtgtatgtgtgtcatggggcaaggcgtccctgcatgtgtgtgcatgtgtcaatgtcaatgcatatgtgtgcactgtcacctgtattactgctataattaatatacaaaaattctcagttttgatgcctcttagacccaaagtgtaagaggaaaacacctcctagggatatctttggttccgatttctctacaactttcccacaatctgtcctataatcagttcaacttaggaattatttttactttcagacgcatcttttctgtcttctaacttagatttatcaatagatgatatgctcacattatttttgctacttgaagcataatttaaatgactaatctccaaatattagacttccctttcttatcctcccaagaatatattgtagttaacacttaatcttgaaacaaagaaacaaataaaagctgtgctgagaaacacaaaaccaactcaaaaactgcctggtgaatgactccctgacagctttttctttagctacgtggtggtagcaggtgtttggtctggataaccagggagttcccatacgttatgctagttttcaatgtagcttccaaacacgactttatgctaatatccaggtagattgtagccaatgtcagtgtcttccagttgctctgcccaagtgaagcagaggcgttcattccagaccatttctctgtgttcccgtccatccagctccagccagggagctaggctgattttgaggacaaactactggcaattggctttctgacttctgcagtaatgcttttctaactatttgtgcttggaccttttctctattcagttaactaacacattctgcctaaaataatcatcctaacattattctgtttttcctgctcacccaaaatcttcaggtaccatcaaatccattaattagccatatgccacctatgtattaagactagaattgccttctattaggagaacattagcatacactatgctattttatccaccagtcttgtgagttaggcattggcttcatacatattttaaagaaaaagaaaaagccatcagctaaagcaggctctggactccattttatatcaccttctgtaagatcctccactgagttacagcaaagatggagagggagggcaaaggtgtccactgaagaacaaaagagcatgggataggggctgtgttgagatctttcagcatcccaagggtagctctgcattgagaaatttttgcaagtttgaggacatgtgttactaacagacacagatgggtaatggccttgatgagtgtgtaaacatctagaagtgagaagtaaaagcatactctaagttggagtctgtacagcactagatcatgtgcagtttgttgtcagagttttaagttacaagattgaagcatgaactattttctaggccttcttgccgagaactaggaaaggaaattaggatgaagcagggctgcctaatgtcctgagctgtaccctgtgagttcctgaagggctctccattcctgtgatgacagatgcaatagctacatccaaccaaggccgtcctggggagaaccataggcagacaaggtaacacaatgcttaatagcatgggttcaaatcctggctctgcctcttccaagggatatgactgcgcaggtgaatcaacttgtctgggcttccatttcttcctctataaaatgtaaataataacccgctcagggagtgtaatgaagactaaatcaggtaatctctgttaagaactaagcagagcaattgacattacatgttcaattaatagttattgaaaaacattttaaaataattttagattctatcttagattcaggggatacatgtgcaggttggtttcttgggtatattgtgggatgctgaggtttagggtataattgatcacattaaccaagtactgagcttcgtacccaataattagtttttcagcccttgcctcatccctttctccaccctctagtagtccccagtgtctactgtttccatctttatgccatgaatatccattgtttagctcccgcttaaagtaagaacatgtggtatttggttttctgttcctgcattaattcaccaaggataatggcccccaggtgtatccatattgctgcaaaggacatgtatttattctttttcatgactacatagtatttcatcatgtaaatgtaccacattttctttatccagcccaccattgatgaacacacaggtcgattccatgtctttgttattgtgaatagtgctgtgatgaacatgtgagtgcatgtgtatttttggtagaatgatatattttcttttgaatatatacccagtgatgggatttctcattcaaatggtagttctgttttgagttctttgagaaatcttcaagctgctttccacagtgactgagctaatttacattttcaccaaaattgtataagctttcccttttctcttgcagccttgccagcatgtgttgttgtgttttgaaaaacatttttaaaaggctgccatattttaccactgatgtactcttctctcatcctgacttaggctagggagatgctttgggagacttcactttggtctctcattcctggcctacacacagaagtacacagaactgtctcaggcaaaactggttgaagcggcagtggtcctttttttacaagttaggaatttgttggctggtatggctgggaaagacatgactgccttgcagaaaaaagaagcactcaggagccagcatccctgggctggactctgggtcctgaggagacagggatttcctccactgctgtctctcatttctgctgcccctggtgtactggccttactgtctccaattgtaggtgggctttctccccagaggagggaatgtgttcataggtagcctcacatcaacaattcttgcagaagacaaaatagggtgtgatttttgataatgaattattcaaggtcccaaaaagaaagtggatgactcttttcaaccagagtgataaaaggaaggtttagtaaaggagctatttacaaaggtgtgtgcaggacgtaggtagggtgactcaccatccagtttgcccaagactgttttagtactgagagccctctcatccgaatgagaggatttcacaacactccatttctgcgaaaagtagggtgagtggccattctaggtaagaaaaacacaagaggctatgcacaagaggctagtaacagcagggttgtggccacccctactcctcaattgacaaacggagggagcagttaatggaacttgggaggagtgtgttgtattgaggggcccactgcaaggagcactggtctttggtgagggacccaagcagcctaaggcagccctgaaagaaggaagtcagggagataaaagccctgaacttgctttccttcttttctcccatcttcaagagtttcaatttcaaatcaaagaacatgctggagtgttgtcatgaaaagcagattcaaaactggtcacttagttcactcattttacaccagtttaatgaataccagtaggtcaagttctatattatgtgctggtgtttaaacaaaggcacctataccaggagctaaggtggggaacatggagcccaagatagaggtggctgtagtgaagaataggtgcatggtatgatgggtgaggccaggtggattaggcaccactgaggaagaaatatctggaatttatagctctgggtccctgggattatcttcagaaatggtgttttgtgcatgtatttctttttaaggtctatactctgttcctggggccatgaccttcttctaattcaagatgcaggctgcctcagaacatagcaaccaatgagattattgcttgttgctatcatcaatagaatgcgttaagattatatcttgactcccaatatgtaattactactgacacccacttcctaactccctcaggataggtatgttttatatattatatcatgtaattttcatgaaaaattatgataaacatattttcctggtttaagaggctcagggactgggtaatttttccaaagttgtacctaaacaaggacaggaatccaggactgattacccctcacattccttctcttttcattgtatcagctcaactcatttaattcatgcaagatatagataaatactatgctagggtcctgtttgaatttctatggcagaaaaagacagaacctgtgacatgaccctatatctgctatgtaattgatcaggcaagtattagtgaaaggaactacaggatgtggtaggtcaccatgcagcacatggccatttctgtggctggagcaatagcagggggtgtaatggcattctcctcctgcagtgcaccccagatgtcagcacaaagtaggcaattcctgcaaacagtcccctggagccagggccgaggtccttgattgtggctatccttctcctgctaatgactttttcaagctactttccctctctctacctctgttccctgattgctgggggcttttccaactcttttgctcaacctcattaagaaatgcatggatatatttttctataccagcatttaagtatttcccccatgatccgtaggaatggtttcctggaaagactttgcatggattttccactgcctgctgcccttactagcacttgggaaactgctatttttttcttcctggttgcatttgccacttaccctactgaaaacagaaattaagactttagacagctgcttactacataaaattttcaaataaaatattcctattatattctcttagggaaaaagttcactcgattagattagcaaaactaacataaatatgaagtaatgccagtggctgcttgcagaaggtgtttttaactttccatttgacttaagcgtccagtgcattgaggtgtctgtgacactctgttctgtgtcacatttgtgagcaggatgatgttgtaatgctcccgtaatggctaatattatgttaatggagatggatgccaatgtgtacacatatatatttagtcaggtggaggcattcccaacttgtaatgtaatctgtgtggtttaagaattcacacataaaaatggaacaaggaggattcagctgtgattctggactctgcctttgcccttgtaggaatatttgacattattctctcacaatggccatttttcactctcttgaggagaaaacaaaaatactccaactaaattaatgaatgtttagaactccagttcagtctttcaaaaggtctaggatggtgctggggaggtgaagttgtctgtgaggtgggatggcaggtcacttctcctggatgtggtctacttggtcacagccacatgacactgagcaaaaggggtaagtgggacaataccaggataatccaggggattaacctacctccttcacctgtgtaagcaagaacagaaagataaaggatcaggagtaaaagacttacctctgctgcagacttcttaggtggctttggaggaatcactaaacttctcaattttctcatctatcaaaaacttgggaccctctgctgtggccttcctctgagttgttcaaataaaacaattctgtgaaagtgctggtatcaatgaaatgatttacaaaatgatgggattatgtaaaacagtgactgaagtggataactggagcttgcagagccctctctgacccaaggccagatgtttgcgtaacctctccctgggtcagcaggcctatgcaacacttctggaggaggcatcgtgcaacaccacctttctgttacaaccccacctccaattcctatctcagccatctgcggcatatctgacatgtttgaagagcagacacctcttaccagacactttcttataatgttacaggatcataattttaaattatagaacacagaatccaatcatttttatagtcagtaaatctcatgtggaagcagaaatgcctcctgatgcaccaaaatgtcagtctctgaaggctcctttccccatgtagaggatgccatgggagtcagtcttcctggctagatttttttcttctcctgtgtggcatgcctttattcttgctaatcctgatatttgtcttccaaagccttgcacgtaggcatcatctctacaacttctgagattcacaggccatgtttatattttgcatcatggagatgatagatttttaaaatttcctctgactctaacattcacagccatataacttggtagaagtcacctagtccagtccgggcctgggccaccctcatgagaagtcagtgagatgagattttgtgatctatagaataaaggagaagatggaatctggacacaaattatacagataattgagggtattttgaccaagatagcccttgcatctgagtgaagaatcaggaagattttatgtctgaatgagtaacagttaatttggccttctcattcactttgtgtagatgcatgcctatataagtgagattccaggaggcaagcaggtagttttagctagattcaagaaagaacgtccaacagtgagaatgaggtgcaatttcatgggctacatgaaaggcagggcccactttaacacaggaatggtttgatgagagctgtacaatcagctggcaaagatgttatagctataattttcattgggatagaaagtattggagtagaggttgaatcaaacattctaggcagttgcttgcaaggctgagatattttcactcactaaataggtggccagaggagtagttctctctcagaaacacacacacatgccaccaccaccatcaccaccacaaggcgcagaagctttgtacaagttctaaaacttaaagcctctccatagagatcagacccctgcccaggaaaacactgaacaatggcagatattcaagggaattttgcttattggtaattagctaacttgtttgtcagaagaccagtacgaaaggaggaaagaagacatctttgcagggggaggagagggagggaagatacaagaaaacaactaggagacacattttaccttttggccttattcaaacactgtgtagtgggccccaggaatctagttctggagctagtccatcaagtaagccttcgaaaagtttgcacaaaagattcttaagtaagctcataaatgtgacaccaagcaaatacttggcaaaatttagccaagtcataaaaaaagttgctggggccatacagcaacattacctgagctggaaaaagcttgtctgtagggcttctctacccataattagggatcaggtaagtgacagagatttcaagctttatttaatttggtcctggaccagttctttctggtctctagactcttgtcataaaggggaaccaatataaaataggacaagaccaaagaaaacatgtgaactttttattatagaaatgtgaactttttatggaagaatctggcctgatgtgaacacatcactgctgtggaagctgggcactgggctccaggtcatgggctgttcttggaattatcttgactgcattcttctctcaattattttgtttgtaattaaataactagaatcttctattcagtccctgatcagaaatggtcactgccagagaaagtagatgtggaggatggctcaacctgacattataaaaacctgagtattagtttcttaggctgccgtaacaaagtaccacaaactgagtggcttaagtaacgcacatttatcatccaacagctctggaagctggaagtctgagatctacatgttggcagggatggttcctttgaggggctgtgagggagcagctgtttcatccctttcactgaattcctagtggttttctggaagtctctggtgttcttcggcatgttgaagcagcatcctggtctctggcttcatcttcacatgatgttcgccttgtgtgtgtctatgtccaaattcctccttctcatagaggacactgtcatcttgggttaggccttcctaatgacctcatttttacttgattacctctaaaaaatgcctatctccaaataaggtcacattgtgaggtactgcgggttagaacatcaccatgtgaattgggggtgtgggaggggtacagttccaccaataacaacctgatttctaaagccaaaacagaagggagatattgttcattgaagtttttaatcctgtggaaagaaataatttacaaagccctggtgaagatgatgattatagcacttcagaagcaccactttaataatctacttttgtgtgttattaggcttattgttcattgccccctgtgtaaaaagtctcatttgagaaatttatagtataggtaatgccaagaaagacctaggttgacctcatcctttttgataataaggactaagtaatttaccacgtttcatttctttctgaggttaccttctagtaaatctcagagccaaacgtggtactcagtcctggttccttcatttatttctccctcttttgttgaacttggttttcagttcctgtttttctgcttttgcacgtgatcttaatgtgcctctggccagctgtatcccagacttactggagagagatgggtgcactttgatgcagtgaaaagaccaaccccaatgtcactactgcctcttctgcttacaactcctggagctaccatccatttatgtccttctcagtgaggtttgcccaagcatttggtaaactatatctttcaatttacctccaagcttccatctccctgccagagcttttgaaaacagtggttaaccctgcttagagcatggagctgttcactcccttgagtcagatttttatttgaaaagaaattcagccttaatagtgcagtaccacaaaatacaaaagcaacttctttgtgtgacaaacaacaatgaatgagcaaaatgtcctgtttgtgcttaaacaatctttggagaagacagctgtcgtttctctgagacaggagacatctaaaatacagggaaacacacacaccaccaccaccaccactaatactaacaataacaaactatgaattcatagttcaatgtttttttggggttcctttgtatcacactgaggggatcataaaataaaatatttgattaaaatctttaatttatgaatacctcattaggcatctgaaactggaatttacctcaagaattttacttggggtttgacattttttgaatcataacatgggattgtgaagtttagtcactgttgattcaagtttgcggacaacaataaaatgaagaggcttagttcttagcacattgaattagggattcaaactctgtgtgtttgttctgtgttgcaaactcatttgtccattggatttttaagatctaaattggtatttagctacacctatacccttttcagtttattaaaatttataaatcatatatttttatttctagaaagtctttttgcttggtctctaaatgacttgctttcagagtatatcttatttttaaagttctttttgaactcttgcatctattcaatgtcagtagaagtcatctcttctaaaggcacatccttatccctgaaaatccttaaatatgttgttataaatttttttgcttgctcatttttctctataattaatttcagcaaaggcaccatcaggttggaaggtctgtgaaagagtagggagcaagagaagggtggaaggcacagccatgtctcctcccgtgagccagctgtgagcatgccagacaacctgactctgctgctggggcactaactgaaggcctctccacagctagtctcagcctaatagagtcagtgcagaggcaataggacccatttggcctggtcatattctaggagaattgacaacctgtagcttcagtcatgtttacaccttccagagaggatggtgggagagaaaggaaatcaggaaggcatgctcaagtttccatcatttaaatctctgtccagattttgatgagttccaggaaaaaaaaaaatggcagctgtgaatcgaaagcattttgcaccatgtcaaagtggagttcatcttaaaaaatgtataaatattcaacatcaagacacctacctgcataattctttgtgcaaacaaatcagaaggaaaaaactgcaggcgatcatgtagataggtacagaaatgtcattgttaagatttagggggaccagcaattcctaacaagaaccctaacaaaagtggaaataaaaaatgaagattagttatagacaaaatttgttaatagttatatatagttagttataacatatcaaatattgaaatgttaaagccattttccataaaattaagaacaaaatgcagatggcagctatatttctcataagaaatgcagctttggagacgatttcaaccttcataagaccataacataaaatcatttataaaatgctaaagaaaaaaatcaaagaatatgaaatcacctgtgtcagaaaatactatttgaataaaaacaattgctagcatgctacattagttttctatgctgggtaacaaattatacaaatttggagacttgaaatgatatgtggttattatctcacagtttctgtggatcagagtactgatatagcttattcaatcctctgctgagggtctcatgagactacattccaggtgttagtcaagctgtgtcctcatctataggctcaacagtggaagaaactgcttccaagatcactcaagtagttgccagaatgtatttccttgtagttattgactatggcagcttgctacttcaaaataagcaatggagagagagagagaaagagagagagagagagagagaatgtctagagtgaattgactagttagacacagttttatgttatctcacatgctgaagagagtgacacttcattgcctttgcaattggtcagaagcaggtcacagtttctgcctatactcaaggagagggggtacatgaataccaggagacagggaccatgaagcccatcttaaagttccataccccaggaaaacagtttagcagttacttaaaaagttaaacaaaggattgtcatatgacccagcaattccacttgtacatgcatacccacagcaacactattcataatagcccaaagtaaagacaatctgtattagtcagggttctctagagggacagaactaataggatatatgcatatatgaaggggagtttattaagaaatattgactcacacgatcacaaggtgaactctcaaaatatgccatctacaaggtaaggaacaaggaagccagtctgagtcccaaaacctcgaaagcagggaagccgacagtgcagctttcagtctgtggctgaaggcctgagagcccctggcaaaccactggtgtaaagtccaagagcccaaaagctgaagaacttggagtctgatgttcgtgggcaggaagcatgcagcacgggagaaagatgaaggctggaagacttagcaaatcggcctctcccaccttcttccaccttcttcttcctgctttactctagccgcactggccgttgattggatggtgcccacccacactgaaggtgggtctgcctctcccagtccattgacacaattattaatctcctttggcaacaccctcacagacacacccaggaacaatactttgaatccttcaatccaatcaggttgacacttaatactaaacatacacaatccaaagatccatcaactgatacatagacaaaatgtggtatgtacatacaattattcagtcttaaagaatgaagcagtataacatactgcgacataaaagaaccttgaaaacatcatgctaggtgaaagaatccagtcacaacaggccatgtatagtacaattctgtttatatgaaatgtctagatcagtcaaatccatacagaaagaatgtagatcagtgactaagagaggttggggttgagaggaattgttctgactgacaataaatacaggtttcttttcggaatgaaggaaacatcctggaattagatagtgttgatggttgcacaacgtagtgaatatactaaaagcacttaactatttgtacatcctctatgtgtatgtgtgtgtgtttttgtttttttgtttttttgtttgtttgtttttttagacaaattctctctctcttgcccaggctggagtgtgcagtggtgcaatctcggctcactgcaacctccgcctcctggattcaagccattctcctgcctcagccttcggagtagctggaattacaggggcatgccaccacgtccagctaattttgtatgtttagtagagatgaggtttcaccatgttggccaggctggtctcaaactcctgaactcaagtgatccgcacacttcggactccaaagtgctaggattacaggcgtgagccaccgtgcccagcttatttggacatcttaaaacgtatgaaaacaaatgttatgttgtgtaaattatatttgaatttttttaacaactctataccacatacatgcctaattaatgtatacatatacaaaattaacttttttttaaaactttaagttctagggtacatgtgcacaacatgcaggtttgttacataggtatgcatgtgccatgttagtttgctgcacccatcaactcgtcatttacattagatatttgtcctaatgctatccttcccccagcaccccaccccccaacaggccctggtgtgtgatgttccccttcctgtgtccatgtgttctcattgttcaactcccacctatgagtgagaacacgcagtgtttggttttctgttcttgtgatagtttgctgagaattatggtttccagcttcatccatgtccctgcaaaggacataaactcatccttttttatggctgcatagtattccatggggggtatatgtgccacattttcttaatccagtctatcattgatggacatttgggttggttccaagtctttgctattgtgagtagtgctgcaataaacatacgtgtgcatgtgtctttatagtagcatgattcataatcctttgggcatataccgagtaatgggatcactgggtcaaatggtatttctagttctagatccttgaggagtcgccatactgtcttctacaatggttgaagtaatttacactcccataaacactgtaaaggtgttcctatttctccacaccctctccagcatctgttgtttcctgactttttaataattgccattttaactggcataagatggtatctcattgtggttttgatttgtaattctctgatgtacgagtgatgatgagcattttttcatgtgtctgttggctgcataaatgtcttcttttgagaagtgtctgttcatatcctttgcccactttttgatggagttgttttttcttgtaaatttgtttaagttctttgtatattctgtatattagccctttgtcagatgggtagattgcaaaaattttctcccattctgtaggttgcccattcactctgatggtagtttcttttgctgtgcagaagctcttcagtttaattagatctcatttgtcaattttggcttttgttgccattgctttttgtgttttagtcatgaagtcttcacccatgcctatgtcctgaatggtattgcctcggttttcttctagggtttttatggttttgggtcttgagttaattgttgtatagggtataaggaagggatccagtttcagctttctacatatggctggccggttttcccagcaccatttattaaataggggatcctttccctattgcttatttttgtcaggtttgtcaaagatctgatggttgtagatgtgtggtgttatttctgaggcctctgttctcttccatgggtctatatatctgttttggtaccagtaccatgctgtcttggttactgtagccttgtagtaacaaagtttgacaaacattttatttagtaacaagtggtaaaaattgacaaaaaaaaagtttgaagtcaggtaacatgatgcctccagctttgttcttttggcttaggattgtcatggctatgtgggctattttttggttccatatggagtttaatgtagtttttccagttctgtgaagaaagtcattggtagcttgatggggatagcattgaatctataaattaccttgggcagtatggccattttcatgatattgattcttcctatctatgagcatggaatgttcttccatttgtttgtgtcctcttttatttcattgagcagcagtttgcagttctccttgaagaggtccttcatttcccttgtaagttggatttctaggtattttattctctttgtagcaattgtgaatgggagtttcactcatgatttggctctctgtttgtctgttattggtgtataggaatgcttgtgatttttgcacattgattttgtatcgagactttgctgaagctgcttataagcttaaggagatttggggctgagacaatggggttttctaaatatacaatcatgtcgtctgcaaacagagacaatgtgacttcctcttttcctaattgaataccctttatttctttcttttgcctgattaccctggccagaacttccaacactatgttgaataggagtggtgagagaggtcatccttctcttgtgcaggttttcaaagggaatgcttccagtttttgcccattcagtatgatattggctgtgggtttgtcataaatagctcttattattttgagatacattctatcaataccttttctgcatctattgagataatcgtgtggtttttgtcgttggtggttggttctgtttatgggatggattacatttattgatttgcgtatgttgaaccagccttgcatctcagggatgaagccgacttgatcgtggtggataagctttttgatgtgctgctggatttggtttgccagtattttattgtggattttcgcattgatgttcatcaatctctttttttttgttgtgtctctgccaggctttggtatcaggataatgctggcctcttaaaatgagttagggaggattccctctttttctgttgattggaatagtttcagatggaatggtactagcttctctttgtacctctggtagaattcggctgtgaatccgtctggtcctggacttgttttgttggtaggctattaattattgcctcaatttcataacctgttattggtctattcagagattcaacttcttcctggtttagtcttgggagggtgtatatgtccaggaatttgtccatttcttctagattgtctagtttatttgtatagaggtgtttatcatattctctgatggtagtttgtatttctgtgggatcggtagtgatatcctctttatcattttttattgctgtctgtttgattcttctctcttttcttatttattagtcttgctagcagtctatctattttgttgatcttttcaaaaaaccagctcctggaatcactgattttttttgaagggttttttgtgtctctatctccttcaattctgctctaatcttagttatttcttgccttctgccagcttttgaatttgtttgctcttgcttctctagttcttctaattgtgatgttagggtgtcgattttatatctttcctgctttctcttgtgggcatttagtgctataaattttcctctacacactgctttaaatgtgtctcagagattttggtatgttgtgtctttgttctcattggtttcaaagaacatctttatttttgccttcatttcgttatttgtccagtagtcattcaggagcaggttgttcagtttccatgtagttgtgtggttttgagtgagtttcttaatcctgagttctaatttgattgcactgtggtctgagagacagtttgttgtgatgtctgttcttttacatttgctgaggagtgcttttcttccaattatgtggtcaattttaggataagtgtgatgaggtgctgaaaagaatgtatattctgttgatttggggtggagagttctgtagatgtctattaggtcagcttggtgcagagctgagttcaagtcctggatatccttgttaaccttctgtcttgttgatctgtctaatattgacagtgggtgttagagtctcccattattattgtgtgggagtctaagtctctttgtaggtctctaagcacttgctttttgaatcagggtactcctgtattgggtgtatatatgtttaggatagttagctctttttattgaattgattttttgccattatttaatgaccttccttgtctcttttgatctttgttggtttaaattctgttttatcagcgactaggattgcaacgcctgcttttttttttttttttttttgctttccttttgcttggtagatcttcctccatccctttattttgagcctatgtgtgtctctgcacgtgagatgggtctccggattacagcactctgatgggtcttgactctttatccaatttgccagtctgggtcttttaatttgggcatttagcccatttacatttaaggttaatattgtcatgtgtgaatttgatcctgtcattatgatgttagctgattattttgcccattgattgatgcagtttctttatagcatcaatggtctttataatttggcatgttttggaagtggctggcaccggttgttcctttccatgtttagtgcttcgttcaggagctcttgtaaggcaggcctggtggtgacaaaatctctcagcatttccttgtcagtaaaggattttatttttccttcacttatgaagcttagtttggctggatatgaaattatggtttgaaaattcttttccttaagagtgttgaattgtggccccctctctcttctggcttgtagggtttctgctgagagatccactgttagtctgatgggcttccctttgtgggtaagccaaactttctccctatctgcccttaacattttttccttcatttcaactttggtgaatctgacaattatgtgtcttggggttgctcttctcaagaatctttgtggtgttctctgtatttcctgaatttgaatgttggcctgccttgctaggttgtggaagttctcctggataatatcctgaagagtattttctaacttggttccattttccccgtcacttccaggtaccccaattaaatgtagatttggtcttttcacatagtcccatatttcttggaggctttgttttttttcactctttcttctctaatcttgtcttctcactttatttcatttgatcttcaatcacagataccctttcttcctcttgatcgaatcagctattgaagcttgtgcctgcatcatgaaattctcgtgctatgattttcagctccatcaagtcatttaaggtcttctctacactgtttattctacttagccattcgtctaaccttttttcaaggtttttagcttccttgtgatgggttagaacaagctcctttagcttgaagaagtttgtttttactgatcttctgaaacctacttctgtcaactcgtcaaactcattctccctccagttttgttctgttgctggagaggagctgcattcctttggaggagaagaggtgctatggtgtttagaattttcagcttttctgctctgatttctccccatctttgtggtttttatctacctttggtctttgatgttggtgacttacagatggggtttggtgtggatgtcctttttgttgatgttgatgctattcctttctgtttgttagttttccttctaacaggcccctcagctgcaggtctgttggaattttctggaggtccacaccagaccctgtttgcctgggtatcaccagcagaggctgcagaacagcaaatatttcagaaccacaaatattgttgcctgattttacctctggaaatttcatcccagaggggcacccacctgtatgaggtgtctgtcagcctctactgggaggtgtctcccagtcatgctacatgggggtcagggacccacttgaggaggcagtctgtctgttctcagagctcaaacgctgtgctgggagaaccactgctctcttcagagctatcagacaggtatgtttaagtgtgcagaagttgtctgctgccttttgttcagctatgccctgcccagagaggtggaatctagagaggcagtaggccttgctgagctgcggtgggctccacccagttcgagcttccctgcagctttgtttacctactcaagcctcaacaatggcagatgccccacccccgccaggctgcagccttgctggtggatctcagactgctgtgctagcagtgagcaaggctccgtgggcgtgggacctgctgagccaggcatgggagggaatctccttgtctgctggttgcaaagacaatgggaaaagtgcagtatttgggcagaagtgtactgttcctccaggtacagtctgtcacagcttcccttggctaggaaagggaaatcccccaaccccttgcacttcctgcatgaggtgatgccccaccctgctttggctcaccctccatgggctgcacccactgtcccaccagtcccagtgagatgaaccaggtacctcatttggaaatgcagaaatctctcgtcttctgtgtcgatctcactgggagctgcagactggagctgttcctatttggccatcttggaagcgacctggaaacttctattccaaaattaacttttcaatataatagaaacatcccattagaaataaaggaaaactatattcataagagtaataaaatgtttaattatctatgattcattttaacaagaataggaagatctatgaagaaaatgataagaaataatagtatcaaataccagtatttacaaaattgatgcttaatacaaaataactaaaatcttaatgaacttttaaaactagatacatatttttaaagtcattatgaaataatcaatgtgtaaaaatagctaagaaaattatgataagaaaattcctggagagtaaaacttaatttaaaaacttcctataaacaaaatagtgtgttcttgacccatttattcagtggaacagaattaaaggttttgaaatagattcaagtaaaaatgagaaggtaatatggtattttgtttcagtggataaagagtgtttatttaaaaaatgattcagatatacaggcaagattaaagcaaattgaggtcctttacctcatatatatatgatattttatatatattatatatgatattttatatatatgatattatatatatccatagtccatgttgattaaatatataggaaaagaagaaggaaaaatgcattagaaaaagctaggggaaatatctcattacggaaggaaagaaagaaactcgggtaaaaacaatagtagatatttctgatcatagtaggttaaatatgtataatgatggatatatatactaactatgttatataacaatatgcattaactatacacacaaatatatcaatatatatgtaaactaaatgttattgacagatgtgtatgcttaaaaaatagacagataatacataagtagaagtttttctgacttctcagacaggaaaagagttaatattgctaaaatcttgagagtgtattcaagcccatcagagaaaaacacaactcaaaagaaaaatggacagatgtgaataggaaagtcaaagaagattaatccaagcagactatacacatattgaatgatgccaaccctcactagtattgagggaaaggcaaattaaagcagcaataagataatatttttcaccattagactctaaaaattaaagtgatcatacccagtagttataactttttgaaaaatacaactcattagagcacctttattaactccagaaatagactatataaaatagaaagattagtttaaaatcagcactgtgctggtaagggcagccacgattccagaaacattaattgctgggtagactcattactgattagataagaaacctcaaacaccattagacaattgtgattaaatgtatgtcgttctaattgaatgcattgtttattgccttctactgaatcagcaggtcacctgcctgttttgtatatttgaaaagggcacatccatgcagatcttaggttccctgttgtatgacatactccttcaccaccttcaaatactaccttttaggttataacatttagaaaagaaagtggcacttccacttcacctgctcagcaagtgaattcctataacatcttgtagagtgatgaataaacaattattagaaaaaatatcacatgcttttcattcagcaatcccactttgagactatcttctatgaaaataggagcatcatatttaaggacgttaatggaagcattattattattattattattatttttgagactgagtctcactctgtcatccaggctggagtgcagtggtgcaatttcggctcacggcaaactccgcctcccgggttcatgccattctcctgcctcagcctcccgagtagctgggactacaggtgcccgccaccacacccggctaattttttgtatttttagtagagatggggtttcactgtgttagccaggatggtctcgatctcctgaccttgtgatcctcccgcctcggccttacaaagtgctgggattacaggcgtgagacaccgcgcccggcctggaagcattatttttaatagcaacatattggaaatatgaacactcatcagtagttgtgctttcaagaatcatgtaatatccatcacatagaacattatgcagctatccaaaaaaatgattcagaccctgtcatcctaaatggatgcctgtaatgcttaatgaaagaagcaagttatctagtattttcattatttttgtaaaaataaaacacagcataatgactacaccaaatgctttcatctgtgaatgtgtggtctagctatgttctttctcagccatggggaagggtgagcactgaccctaacagagtattgatatttgttgccttaaatctgtaagaaaagtgaaatgggaagagagggaagttatctcctttttttgctgtatcttgctttcttctaccagctataatgggtttgtgttattttgccgtacaaagaaagaaacagaaaatgtaaaagaacagtatctttggttggctgataacttttcccagttatttatgtacttctttttgttttgtagttcttactgcatttagatgtattttcaaaatggagcagagataaatgtaaattctttttctttatttgaaccagaagcctagattttgttttaaataatcactctggtcaaacttctattatctcccacttggtgggacagagcccctatgaataaaattagccccatgtggagaaagaaagggtgttctgagttgggctggcctggcagtaactgagagaggtttggggaaatgcgattgcaccaggcaaagacctttcaaggacaatcaaaattgaaaactcgagcagacaaaccctgtgtggttttcccaaacgtacttggaaaaggagaggtgtcttccagcccaggtcctgggcatggcttctgtctcactctgcaagagacataaaaatttccccacaagctgagaggacctcaaggccttttcccagtatatgaagtgtgatggagagaaaatattattttggaacaaagccttggcatgtgttgttggaagagcttctgtagcatgagaaataatctttctctctaaacatgtgaaatacttctccaataaaatcattcaagcctagagtttgttgttattgtttatttttctgttttggggtagttaaacactttttccttgattgttttttatttaggctttacattccaagttgagtttgtttgctaacaaaaagggttttcagttcacttcatcagtatttcatatttattagaaaaaactaatatcctttgtaacatagagttttgttttcccattttggttgtaattctgtcatatttgcctagttttcaaaaagtttatatataatttgttgttggttatttacaaagtgtcatctattgtattattagttctactctttatttctaatttatacactgttatggttaacttaattattttctttgtcctactatccttagtagtctttcatggtttttaaaaattccaatttatttatttttggcaatgaatgcattaaatgctacatattgaccactgatataattttggctacttagtattgggagagtcattttctaatttttttctcacttttatgtttagtgtctctgtgcttccttggcggctcaatttgctacttgatgaaatataaactgcagtaggcctgtctttcagtcatggtctgtgggcaataccctgaaaatgtctttattttgcttccattcttgaatcatggtttaactggtatacagttctatgttaagatatattggccagacgcggtggctcatgcctgtaatcccagcactttgggaggccgaggcgggcggatcatgaggtcaggagatcgagaccatcctgggtaacgcggtgaaaccccgtctctactaaaaatacaaaaaaattagccgggcgtggtggcgggcgcctggagtcccagctactgggaaggctgaggcaggagaatggcgtgaacccgggaggcggagcttgcagtgagccgagatcacactactgtactccagcctgggcgacaaagccaggcactgtctaaaaaaaagaaaaaaaaaaaagatatatttcgtcagcactttgaagtgatttttttcattgtcctttgaaatcccttgctgctgatgtgaagtccgctagtttgctgttggttggattgttttcatttgtaagcaatctctttttctaccccttttaaagcttttctttatttctttttcttttcagagataaggtctcgctctgtggctatagctcactgcagcctcaaattcctgcgctcaagtaatcctcccacctcagcttcccaagtagatgggactacaggtatgtgccaccaagcccagctcctttctcaagctttaaaacaacaacgaaaacaaacaaacaaaggaaaaacctttgcattgtgtaatttagatttattttgtaaccatgttggattaagtataatttttatactgaggactcctctctttctttaaatcgggggaaaataaaaaccaaaataacgataacaaaaaattttacaatgagtaacaaataataaaccatgataaaatagcaacaaaaaactagtaaatactaaatagatgactttcaaaattctgtgtctgaatttagttgaaaaaaatctcttggattaaagcagaaatcataaagaaaatcatttgaatgaaaacatgagtatcaaaattacatccaacatttttggcttcatctcattttttaattctctgtttcttgaatagtcagatatattttggcatttgcctttctgttatccaatgtctttactttttttccttttaactctctctgcctcattctgagaaatttcctcatgtctagattgcattttgtgtgtgtgtgtgttatatgtattatatactgtattctttttttttaattttattattattatactttaagttttagggtatacatgcaggtttgttatatatgtatacatgtgccatgttggtgtgctgcacccattaactcgtcatttagcattaggtatatctcctaatgctatccctcccccctcccgccaccccacaacagtccctggtgtgtgatgttccccttcctgtgtccatgtgttctcattgttcaattcccacctatgagtgagaacatgaggtgtttggttttttatccttgcgatagtttgctgagaatgacggtttccagtttcatccatgtccctacaaaggacatgaactcatcattttttatggctgcatagtattccatggtgtatatgtgccacattttcttaatccagtctatcgttgttggacatttaggttggttccaagtctttgctattgtgaatagtgccgctataaacatacgtgtgcatgtgtctttatagcagcatgatttataatcctttgggtatatacccagtaatgggatggctgggtcaaatggtatttctagttctagatccctgaggaatcgccacactgacttccacaatggttgaactagtttacagtcccaccaacagtgtaaaagtgttcctatttctccacatcctctccagcacctgttgtttcctgactttttaacgatcgccattctaactggtgtcagatggtatctcattgtggttttgatttgtatttctttctctgatggccagtgatgatgagcattttttcatgtgttttttggctgcataaatgtcttcttttgagaagtgtctgttcatatcctttgcccactttttgatggggttgtttgtttttatgagtgaactcccattcacaattgcttcaaagagaataaaatacctaggaatccaccttacaagggatgtgaaggacctcttcaaggagaactacaaaccacttctcaatgatataaaagaggatacaaacaaatggaagaacattccatgctcatgggtaggaagaatcaatatcgtgaaaatggtcatactgcccaaggtaatttatagattcaatgccatccccatcacgctaccaatgactttcttcacagaattggaaaaaactactttaaagttcatatgcaaccaaaaaagagcctgcatcgccaagtcaatcctaagccaaaagaacaaagctggaggcatcacgctacctgacttcaaactatactacaaggctacagtaaccaaaacagcatggtactggtaccaaaacagagatatagaccaatggaacagaacagagccctcagaaataatgccacatatctacaactatctgatctttgacaaacctgacaaaaataagcaatggggaaaggattccctatttaataaatggtactgggaaaactggctagccatatgtagaaagctgaaactggatcccttccttacaacttatacaacaattaattcaaaatggattaaagacttacatgttagacctaaaaccatcaaaccctagaagaaaacctagacaataccattcaggacataggcatgggcgaggactttatgtctaaaacaccaaaagcaatggcaagaaaagccaaaattgacaaatgggatctaattaaactaaagagcttctgcacagcaaaagaaactaccatcagagtgaacaggcaacctacagaatgggagaaaatttttgcaacctactcatctgacaaagggctaataatatccagaatctacaatgaactcaaacaaatttactagactgcatttttaaattcaattttcatattcaaatgcagtgtcaaattcccttctttctttctttcttttctttccttcctttctttctttctctctctctctctccttctttctttctttctttccttctttcttgtttttttaaacagagtcttggtccattgccaggctggagtgcagtggtgtgatctcagctcactgcaacctctgcctcctgggctcaagcgattctcctgcttcagcctcccaagcagctgggactaccggtgtccaccaaaatacctggctagtttttgtatttttagtagagacaggtttcaccatgttggccaggatgttctcgatctcctgatctcgtgatccgcccgcctcagcctcccaaagtgctgggattacaggagtgagccaccacactcggccaattcctctcttttttgtagtgtacagtttaacctgtcaattaagtctttttaaaaattttagtgactcactagaattttcaagtctagaaatcaatgccacttaatgcacattgctgttaactgtgtgagcttgggttaatctcttcttcagttttctcatttgtaaaatggagataacactagtttcttccttaaggagtaacatgttgccatgatcaaataagttaatatatgtaagctgtctttgagatgctttaagtaggataaattatatattttttacattgcatagaaatgaaaagttgagtaggtatattttgggggcttacactctttcccttccacctcttcagagaccttctcattatttcctgtaagttttacaaaaggatgatcttaattctttaccaggcaaaaaaaaaaaaaaaagccattttttgtttatttaccttttttcaatacttacagaatattttattctaaaaaaaattttgtctaggtgaggatttcatttaatgagttttccttattaatagctaccaatgtgtcttgtcttaatatctttttcaaacaaggaaaatttctttttgctatacgtctaattgctttttttttgctatattttcttcttaatttctgtaagcttgtttcttcatctataaaatagagaaaaatgctacctacctcacagcattgtcctgaaaattactcatgataaagtatggaaggagtccagccctgggtggcattaacaaatcatatgcctccttaataacatgaccgaaaggcatggcaccacattcttaaaggggtccttgctgtctgtatttcaaatatcttcttcttctaaattttctcacatttgagttcttaaacaacagaaaaaaactgagcagaggaactggcacattgttgacactaagtaaatggtagttctcctagtccttatttttatgaactggaattcatacattgtctttttagtattctttctatgtatctgtcatcattcttactatttacatctgtttttcttcctctccatatgatgctgcttttcagttttgtcttttatgtcgttaattcaactctgctcacactgcagggggtggggggttgtgtgctttgttttgtttttagtttagttatatcattagaaaaccttgggcagtctcgtctctttgccttctgtcatggtgtgctcttcctgtcacagtggcacgcatttcacttcaaaagcaatgtccttctgcccctttcaaagcacacaaaaaaagagtttctgaacattatgtttctttggaggattttgtttctaaaggatgaaattgctccttatcagtaggaaatgttctcgtatatcttgaaattaataacctctctcttttgcacttgtgcctgtctaatcaatagctcttattttaatatcatgtattaaagattgcttcccatagcacagtcaacttaccagagtgagttgaatatagaactccttgaaaaggcagctgaaattttgtttttggagtttactttttcaatgtttttgtgactttctgatagaagaaatttaaagtctcatgatataaattatcataaagggtagtttgggtataatttctaggtgacatcgattctgtgataattattttttggctgatttatgtcaagggataccctgttatcagcagagattttctcctttggagtaaaattatacttaaaggcaatagtctacccaagcctaaaatctattcaaaggaaactagactcaggaaaattgcctgcattttctatgcaccatccttggtatgctattattcaaattacctgtatacccttatgaggacacagcacacagaataagcatacactgttttctcaaagttgtaattacaagccttaggagctatcctataaactaaatctacatgataaagctttggttatcttcctattagttattgattccactaatggaaaagaaattgagaatttctttccttgggtattgaaatgaaattcctgagttccgaagttgttttcttttaattgggaatgcaatggacataaaaatgctcctgagaagagtgagactccttgaatatctgaactgaggaaggctctacaagtcaaacaaaccttaagtcaaagggctgtgggcttgttctgcccgtgtggtccactgtactttaattatggaagtggaaaagttgatataaaaatatttttttaaagagaccattttctatatgggttaattcaacttttgtgccatcaatgagccctggggcagaaactcatacctgtgatgtgtccagcatcacaacaggttttgcatagatggaaagagtgtagcatcagcactgatcatggtgaaaatggacaatggtgagtgaagtaagctccagggttttaatctgataagaaaaatattattaaacatttaattggggcctatttttgtgtgaggtacttgcatagatgttaacccacttagtcattatgggcatcctgcgggacaggtattgttctctcttataagtcagggaactgagggtctttggttcaatagaaagccacctggactggagttagaagtgaccagatctttcacttaatggtggaatggccttggggaggttgcttattcttggtcatcattgtggacttggcccttatgacgctgaaggcccttccagctctgacaccaatggttctagtttattccactgcttgctagtgtattccacacacaggtcaaagacattgctggcagacattgtgtgttccttcacgtttatgtgattgtggtttacaaataaactcattctttgtgtatgccaactactctctttagaatagaccacagcccaatgccccaccaggagctggctcagaaaaagctccagaggctactcatggctggcttggaaacccgttctctgaaagaagccaaagaaagatgccagtttgctctgcaggggagaaaaggcctcatatagggtgggacacaggcattctgtgctactcattctttaagaccaaaggtaatgatcaacatgctatttttggtgccagccatggccactggagtcactactcattaatactatgaatgcaaccttcatatccattatgcagaagataaaggcagccaatagagccacaagtgctgactgtgtgactcaggctacagaaggaacttctgtaggaagggccagctgctcccttcatagagacacttgcacaaccaggactttgtatcattctcactattcacataagacaatgtctctcatttacaaacagagcaaggcttctaaaacagcaatcttagcagctatcagtgccctagggactattttatgaaaactactttgtgagccctatctatatatttacactttaaacattaaatttactcacatgtaagctcttgtagaacacatttgtatgacctatccaaagagatgtataaactatctgatgaggctatttacttactttaataaatgaaacgaaacacaaaatgcttcgaagactttaaaaaatatgaaaatcccatcatttccagcacctcagcagataaaatcaggtggctaatctggatttctcagccaattactcttatgtaatggagtttctgagagcctttctctgcatagtcatataagaacaatatgcaatatctgcatttgcagactgccttttttttgtttttgtttgtttgttttttgagacagagtctcactctgtcgcccaagctggaatgcagcagcatgatctctgctcactgcaactccacctcctgggttctcctgcctcagcctcccgagtagctgggattacaggtgcctgccaccatgcctggccaatttttgtatttttagtagagacagagtttcgccatgttgaccaggctggtctcgaactcctgaccttaggtgatccgcctgcctcggcctcccaaagtactgggattacaggtgaaagccaccatgcccagcctgcagcctgccttctgactggcagtaagtttgcaggaccccagcaaaacattcttatagggacaacaaaagtggaaatatattccttagacacttgagagtgacagagtgtggtcatacttggtttcagaaataagatattcttcgtgatgaacaagcattaacatttcatgcacaacaaaaccactcaactctataccctcacctatttcctattggtatcttctccttataccacagcaatctatgcaggattcctggttctactgatcaagtagcctgatgaattccccaagtgtaaatatcaacagttaataaatcaattttctctttaatgggatagaggagatactagttctgtgcaactggataaagacattctacttcaccagaactaccagtttagtgataaactggataaaggcattatccaaacacccttctatgtgctaggtgcttactgagacagaatttactctaagagtatttgtgtgtaaaaaaataggcatggactgtgttgcttttgcaatttaatacccatttcacctcaaatatatggcagaaagaactacaaagttgcaaatataaagctttcaaaagcaaaacatattcaatctccctatccctctataaaagactggaattctcctcaggcatcctttagatacgctatctagattttaaagtgtcctttcaatcctcttgttgaatgctaaccccaaccttcaggctgccctcacttccgatgtgacagcaaccctacacccctatcctgacagaaggatggtggcattgccaggtccctatttctcccccaccttagctggacggacattgttgcctttcagagcagtcagagctcatcattgtgacctgttttaatctgacatgtgactcttccacatttaccaactcccctacaaccttttccttcccagcatctgtagtggcattaacttcctgttatttcagtaattaagatagtcactcccagacgagattacttcacaatatctgcagtagacaaaggctaaaagaggaattctcctatattctagagaggaaaatgatgcttgacctttcagaacagaaatgattgtgtgggcaaaggaaaagattactaaagtgaagacatcacagtatttgggtccagatgggcttggtgtcaacctcttgctctactgcttagaagtcgtgagactttagagagattattcaacttttctgagactttgtttccctataggcaagccaaaataaaatgtctccttgataggattctagtgtggagtaggaattctaagtgtcaaatatcttgcttactataggtcctgatgtttttacaatcacagtgattatcatggtggtgatggtggaggtgttggagatggaagaggttctggtggaggcagtagtgaaggaggaaggtattggtcaaggagttgctgttggtggcggtgaaagtggtagaggcgtcatcagtgcagtagtggttatgatgtctccaagtcacacatagaggaaccccaaacttccagggagatttctgagaagaggcttcagttagtatgagctatgggaaaatagattttccttaattttctaggtaagtaaaccttgaataatagtgcaaagttagcatgcagagtgaagagtgaattcaaatttggatgcagatttcactgtgcacataatcatgtgatattaggaaaatgaaagaaaaaattttcgaggatgaaaacacccatctatcttgaatgctaagtttatatcacttaataatggtaggaacacagggaaagaattagagagacatgtaccacacacacacaggtaaatatacacacacaactacacacactcacctaccttcttttgttcaattaacattaggaaagaagtattatcaatgccattttacggataagaaagctgaggctcagaaaaggcagggggcactgtaggaggcttacaggctttggcatatgacagatattgcactaatcctttgatttctatgtatcagttgtttgactttatctctcactctcctcaaactgcaatttcttcatctttgataatgatgccaataattgtcttgcagaattgctatgaggaataaacaagatatgtttttggtctacatcattggcaatgtcatataaagaatctaacacaatacttgttattgtgtttaacaaaacacaatatagaaagtttaacaaaagtcctgctttccattattcattcattcacattttaatttattcttccatccatccatctatccatatatatatttatatatatataaaacaaggtgaggtctcactctgttgcccaggctagttttgaactcctgggctcaagctgtcctcccacctcagcctcccaatgtgctagaattacaggcatgagccactgctcctgccctggccccatctatcctgtaatccatccagctcggctatactatatgaaaattcaagatcagttttagtccatgcaaaggctccaaaaattgcatcagttggaaattttggatttcaagaattataaaacctggcccaaatctacataggaattttattgcttaatgtaaccgaaacatccaactgtaggtctagctttaggcaaggctgaaccatgggttcaactggtgtctctgtgactcagtttctttcacccccatctaacataaaaccctgtaagctggcttctttcttggtcagactctcttttaatgattacaagatcagtagtttctgaatacacatactcccactttaagtccagaacaaggataagattattttcacaacaatataaagcccgggatttgacttccaggcaggatgatggatccatttctgaaccagtcacttgcaccagtgagattggttactctgttcagcttcaaccagtttctgattgcccctgaagtatctgaggcaagtcccgcaaaccacatgctctggagaggcaggaggattgcttgaggccaagagtttgagaccagcctggacaacatagtgaaagcttgtccctgcaaaaaattcaaaaattagttgggcatggtagcatgcacctgtggtcctagctacttgggaggctgaagaaggaggatcactggagtccaggaatttgaagtttcagtgagctatgatcgtgccactgcataccagcctgggtgacagagtgatactgtctcattaaaaaaattgtcttcctttctccctatcatgttgtataaaatttcatcatttgagattcactcattgagaactgtaagcattttcctgttcaagagcctctggtaaaatttaaatacctcatggagttctgtcttcatcttcccatactttattgacaaattattccaatgcagctacagttaaacaggataaaaataaaagttacctcagaggagagtcataaatgttgccaagtttggtccaatttctttatattgttaacattcaataagaaataaccattctatctgtcattatcactattgttatcatatacagaactcatacaattctcagagaagctgtgttaaatagattaaatagattttcccactttacagctgagaacagaatgggggctaagtgagccttagggtaactttctggtcacacggctagttggaggtatacacaggagttgattccccctctgtttgaagttcaggcctttgttatttttgctgctttactcttctgattgccaaactccccaagccaaacttaacttcccaggaagaaggcccggtctgagcaagtgccgagccagccacagggcaagtggcctctaagtgcttgtgatgtgaaacgatgaaaatcactcacaccatggataaagaacctgcctggatccaaatgtggacacctgagagttcctgggacttataaaagtggaagccattctgtttgcccaggcatcaaaggatgctagagttactaccatgcataatcatcccttgtgcacccacaagtgcacatagtgaaaccttgcccctgcaaaaaattcaaaaattagttgggcagttgggtccctgctccagaaccagtcctgaaagaaccttgaggcagcttcctaggagcctttggccaaggcagaaacactgagggctcccttctctggagtcttgaagtggcacacagattctagttccttttggctgggcaagcccctgtgtttggcttagggtgaaatgtataccacacatctggccactggaaagctggggaggaacggtgtggtcagtggggctgcaaggccatttcagggcggttaagctggagtaacccgagtatggcagggcctgagtcatcctggactcaggaagctcccacttgggcggagtctgacacctgagctcatctgtggctttgccctggctggccctgccctgccccatcttgtccagtacagctcagcccagccagcccaggctgggtcctgctgggttccagcctgaaggaactgagcccaaactgcagagccaggagctctgagcaaaggcagtgatgtcagcaagggtggggtatgatgtgtgcacagcccagggaggtatctgtttctgggtccatgtgtccatgtataaacccactatccttgtgtgcacctccctgtgactgtctatgtggacattctgggcatctatgcatatatttgcgtgaatgcctgtgggtgttgttggcttatgtgtctgggcacattttccctgggaaataagagtataattgcctttgtcacaaaatttgattggttaaaaagcagcggctataaagaggttgaaaaaaaatctcccttttgtgtaaagtctcatgccgagggctgagggagatttaggagagtgaaaagaatcagcctttaaacttaggaaatgcatagtcacctgggtcaaacacttgcctaggaaaactgagctcctgctcctaggaatgtttgtgcaggacctaggacaagatgtcaaggaatggcggtcactgtggtcgaggttacctgagacatcagcctggggcaggttgggatggggagaagagagttgcatggcaacgatttattcttttctccaagtattgaccccctttgataaatacagaaatgttgtttcttcctttcataacatcaaaatccaaggtattttaaaaatgcctcaaagcagtagggtgaaatgtttttgttgttactgttgctgctgttgttccccacctctggcaaaatcacacagactagtaacactaagatgggacatcctggcatatggtccttccggctccctcgtgggtctcctccttccgacctggtggtgcttgctggtgtctgagaatgctgctcagattcagtgtgggatggaatcaggcagcctcccacttgggctaagccatcacgggcccctgctctgaaaaaggtggatatgacttaagagaaagcccctcaactgcaaatgaggaattcaggactcagagaacgggagtcactgaggattaacaggaagtttagagaataaaatgagatacttgtgaagactccttgaagaaaggaagaaggataaaaatagggaggaagagggaaagaaaagagaaagagacagagaaagagaaagaacaaataacaccagatagtactctgatgacacatctggagaaagggcttgggaccgctttctgtatctcaagttactctgtaggccccctaatcaacttggcttgcacagcctgtggtgtctcatctgtctgcttagcacccaatccaataatgataaattcattaccagagcaataacagccccacccctggtgcaccctctgttgttctctgataaacaccaagaacaggcaagagcctatgttcactttattcaccactccaaaaaaacttgagaaattcccttgaggtctacctcttagatattgaatggaattttacatctgttacacagggagtttccggagaggcactcaaagtgtcccttgtggaaccagacacagaaccttggatcccaaatgtactcagtgaatacttaataaatgcatgatcacttaaggcatcccacctagagaactgccactttagcctgacaactcttatagattaaaagtaaggccccagatagaacccaggaaccactgccacaagattgaccctggcattgagggtgttcaacatggcatatttccaactctaatacaactgctgtaagccccagggctgtgtatttagtgcatgggcacctgcagaaatagcagggctctccttactcttttcacatactgtgctcagtcatcttcagtgagcatttgactcttggtttagtttagaagatataaaagtaatacaactaagcatatggtcctcctagtgacccacattccatggtgtgtaacagtaccttgggcttggtgtggacaggccattaaaatttcaggaaggtcgaatcacatgtgggctccatcagattaatgagggaaagtctcccatcttctgttagacatggtttcatgacactcacagaaaatgcaggaaacacctatcactctgtggccatctgcataacagagcaacccaactctcttgaccatttgttgatgggtgagtagagaacaggcttggtgttctctggccaccatggttaaaataggaaacctccctgtacatttagaccaagcttctggaacccgatagaacaaaatggtgccaagaacttagcaaagagagattgcctaaagctccccagcttcttagaaagcaaaaccgcctatcaccatctatcaccataaatggcctgcctgaactgctggtgcctcagcctgcaccataatattttattcaactaccaattcattacacacacatcctgaaagcaaataatgttaatgtaaataatttgggaagcattgttccatctgttgaaaatgtgcagtagttgctttgccccttgtctaaactggggcggctactttcaggcaagtttgggaggtaaatgaactgtctggatgcttttcttggcagtctttcttattagtgggaggtggcagtaacgagaacatgaggaagacggaaagtgtttacttaaagtcatggccaaatggctagggagagttaagataaatcataagctgtcaatgatgacaacttcagactgctactagttcactcctgtttatggagtttcagatgctacatttagaatgttgaggagtttattaaagtcgtactggtagaagttgctgattgtttagacgtcaatgtttgaggcaagaggcagcacctaccgagactaggaatgatgagtgtacaaagcccttatccagccattccaggtgaccctctgcttggtgaatgggtaacactgactcaaatttcccttcagaactcaaactatgggccaggtgcagtggctcatgtttgtaatcccagcactttgagaggttgaggcaggtggatcacgaggtcaggagatcgagaccatcctggctaacaaggtgaaaccccgtctctactaaaattacaaaaaatcagccaggcgtggtggcaggcacctgtagtcccagctactcgggaggctgaggcaggagaatggcgtgaacctgggaggcggagcttgcagtgagccgagattgcaccactgcactccagcctgggcaacagagcgagcgagactccgtctcaaaaaaaaaaaaaaaactcaaactatggatcagcttgggctttcactaccaaaaaatattgaagggccaaagccaaatggataaaagagcctggttctttgcttttctaattgcattttttgtttgtttctttttcttttgagatggagtcttgctctgtcacccaggctggagtgcagtggtgcaattttggctcaatacaacctctgcctcccaggttcaagggattcccctgccttagcctcccaagtagctgggactacaggcatgtgccaccacatccggctaatttttatatttttagtagagatggggttggccaagctggtctcgaactcctgacctcatgtgatccaaccaccttggcctcccaaaatgctgggattacagatgtgagccactgtgcctggcctctaactgcatttcttatccaaggcagtcttgcttgggtgttgactcttgaattgcagcttcgaggttggtgaacgtgaacaaaaggccagattcttctgaggttagctagtgtcctcaatcaacagtttttcctcaaactcctctctgaatatatacccaatccaaagatttggctcttgtgaaccttcagtgtttattttacgaaactgcaatgtctttctctgttctttgaactccctcatagaaagactgtatgatcagtggcaaatgcagagaacgtgtacttcttttgcacacaagggcaatgaagagctgtaaagtgctcctccatgacttgcatattccttttctgtaagtgtctctcaaacttgtattaaatgctggccagggcccagaagggtcaaaacaatcacagcaaaaaatggtgaagctgtgatgatagaagcttgtataaattattgaaaagggtgaaggtggagagagttcaaatctctgaggaatttgggaaagatggcacttaattgagattttggaggttgggtaggagttttccagatgaacaagggaggtatggttattccagacagaggaaatggcatgtgaaaaggaaacaaaaaacatgctctggttggagaattgcttagtaacttagtgtgcttcgagaatgatttacaatggacagtggtagaaagtgaatatgataattgattgtaggtttttaagaatgggaataatgggcaaaaggaacaacaaaacagcagcatggaaaacaaaataactttctacctcttccttttgtctgcaccagaatactgcctttctttcaaacattttggaaaagacaaaatcacccagaatttcaaatcgtagattctttggaaagagaagattgatttctttcttcagaaggaaatcaaactaaaataatctggggtgttttatcaatagggttaaaattctgtgttttcaagtaggagagatgaggtttgaaaagaaaacaggaggtttcagacataaccagtagcatgaaaagttaacgtgggaaatcataatgaagggggtgggaagagttagttagatgtatcttcagtacgcacctccctcatcccacctgttttgagttgcaccaaatctccttaaaagattatagttctaaccgccagaacctgtaaatgtgacctcatttggaaacagggtctttgcagagatcaagttaagatgagatcattagggtgagccctaatccagtatgaatgtgtcctaagaaaaggaaaaatctggacacagagacacacccacacagggagaatgccatgtgaaaatgaaggcagaaattatggtgatacttctacaaaccaaggaacgccaaagtttgccagcaaccaccagaagccaggaaagaggcacagaacagacccttcctcatggccctcagaggaaaccaacactgccgacaccttgatttcagatttatagcctccagcagtttaagaaagtgaatttctcttaagcttcccagtttgtggcactcagacccagacaactaatacagcatcagactgtggactcagctttgaaacagccttgctgatggggagagaattcaagacagatgggaaataagcatccaggagccaagaagcatggggccctggatggttctgcgcagcataaggtgactgtacagaccatggctgtctatgttaggccagtacatggctatttgatactattcaaaggaaaattgattttgtgatgatgaacctgaaagggttttagatggatgagtactgtagagttcaaataagtgtttcatcagggatcaaaataagttcttttttgactgaaaagaaatatatacatatatatataatttttaatacacacacatatttattttaatatagctatccgaggaaatacatggcatagaattttaaggtgtgtgcctcaaaagagaaggaatgattatccacttttttccctaaaagtttagtcaccaatattaacactgaggagactgtagagggttttaaacagatgtgttcataagtcataaggcatcagccttataaaacatagctacaaaacaaggcattgtttcaatatccatgttaaagcatgaaccctgtctggccatctgctggaagtgctctctcccctcaaaatatctgcaggcatttctcagactttcaccttttcttcaacaatccccttgcctctgctctgacccttctctgcgctggtatgttcttagtgtccttccttaataacagctgttgagagtgttattctgctggcactgtcatctccatgcatgtccacctggaattccctcttccctccaggctcagaaagtgaatgctcctttctttggctctcccagctccactgatagcagactaagattttaacaatacttgccaaaagtctaggggaaagagtagttcaacttacaaaataatgcaggtattcaaaccccaatcttgtcttgatggcacacctcagagtcaaagccagactcctctctggttctgtatggatgtccttccttggttcagttctaaggtggccctaaagttgttacccccaggagaaatccttctccctgttcaccagtgagtatctcttagatctctgtggaacagacgtggcaagacacataatcaaccacatatttaacattcattccgtcattcagcaaatatatattagatgctgacaacaaggaacaagagagacaaacctccgttcttgtgagacttatgttctagtgggagaagaaaaagcacaaggaaacaaagggaaaacattagggaatgtggttagtgctgcaaaggaaatggaaaggtggatacgtacaggcacagtatcctaggatggaacaggaagggggaaaatgaataacattttctaaattaacaaaatgacaacattacatggtagcacaagtatcacaagtatcacaagaaaggtactgatggggatggaaagaaagagagttctccccgctgttttactgtgaagctgtgattctacgcagacctgctcccactggcctttctcagtgtcttgtgagattttgtgctcatttaacataaaatattgtggtccaaggataacagtgcttattgtgcttctgccctccctcccttccctatagattaaggatcattttcctttgtggagaggaaatagaggagagttcagtcctaaaccacaagggatactttaagatgttgaccaatcgtttttgccagtgcccagtggcacatagagtatgtgcttctataaacatggatctagatgtatgcacttacacacacacacacacacacacacacacacacacacatttagagtgtaaaataacataaaagctagaaagcacatttatatacatttatgcataactaaggaaaccctcattttctggaacctgttaatgagatcagttataataaatacataatatatttaatacaaaatgtaagtacatatccctacaattgtttcaactcaatagttgttttaactcaggtatctagctacttggggtgatcaagcatatgattaaggtgattataaattttcataagaaagaatgttttctttagaaggcagaagaatgtctcactgtgaagaagctcctgatcttgacaattataagaaaacttttagaccgtggtctcctatatttcaaaataaatgtgagagtaatttttttttttgagacagtgttttgctctgtcgcccaggctggagtgcagtggcacaatcatggctcactgcagctttgccctaccatcctcaagcaatcctcctgcctcagtctcctgagtagctggaactacaggcgcacaccaccaaacccgactaattatttttacttttctttgtagcgatggggtctcactatgttgcccaggctggtctcaaactacagtggctcaaacaatccttccagtactgcctcccgaggtgctgggattataagcgtgagccacagcacctggccacagagtacattttaaatgtcttaataaaacgtgacaggtaagtgaagtgatagatacgttaaattgcttgatttaatcattctatattgtatacataaatcaaaacatcatgttgtacctcacaaatgtatacaatcatggtttgtcaatcaaaaataatattgaaagaaaaattatttagagaatgctacaaagaacatggtgaacaatgcttgcttggctccgtttgtatacagaaaacatagagtaattcagtgtctactttgaatatttttatgcaggccaaattgcaatggctaatgagacaaaaaaaatcaagtgatttccaaaacctgttgtaattaattgtacaattctggtatgagaatctcagattttttttttttttttttaatgactgtagcatagactctggacttagcccaagatcacatttattagctatgagatagatatgatttggctctgtgtccccacccaaatctcaccttgaaatataataatccccgcgtgccaagggcaggaccagatgcagataattgaatcatgggggcagtttccatcatgccgttctcacgataatgagtgggtctcatgagatctgatgggtttataagaggcatcccccttcgctcggcactcattctctctcctgctgccctgtgaaagggcaccttctgccatgattgtaagttttctgaggcctccccacccctgcagaactgtgagtcaattaaacctctttcctttataaattacccagtgtcgggtatttcttcgtagcagcgtgagaacagactaatacagagatcttggtcaaattaatctttctgaggctcctttttgatacctgcatagctgtcactgtgattcttgcttggattctcacaccctgggagggtcaggattgctaggcaaaggttaacaagggttagtattattattatttttttaacttgaaccattcaatgtatgggctgggacctgtgggcttcttgcaatatcttactctaaaaaaagatgtacatgtgatggttgcaggagttcccgtataaattcccctccaaggtgcaagggactcacaactctagtattaatgacgacaataaaacaacaacctcaaaataaataaaagcctttctttctcttttaaccaatctttgacttgtacggggttggggaaacagtttcttcaccctcttgccctgttcttcactttttcctaagaaactgaggtactaaactatgttggattctctgctgctggggtggtccatattcactagtgggaagttcatcataggctaaaatttactttctcctttaatcttatggctagattggtgacagggccttagtttag

SEQ ID NO: 5632 - DNA, 231979 bp, Homo sapiens
  FSHR gene - 49101303 - 49293281 of chr2; NCBI Entrez Gene ID: 2492; Build 35; sequence includes 20,000 bases upstream of initiation codon and 20,000 bases downstream of termination codon of the gene
aaaccttggtcctggagtcacctctcaaacacatgccgaggctccattctcagcacctttcccctggaacctaaacataggcccacactcctgtttctgtgtaacccacccacagatatagaaccatctatttcccagcacccatatttccccaagagaggttcaccagtaagtaaagtaatggctctgagtcctacattgaattgttttattttaccctgtgagaagacaaactcatcaccccctctgaatagataaggaaactgtagcccaaatatttttgtccaaaatcatggggagaagttacggatctcccaatttatgcttttctcattaaaacactctgcttcatctgagtaagatatgtagaagcaggggattctcacattatacgtatgattagaaagggaatagggtacacaagaacagggaagaatcaagagccatttttcttctctattaagatgaaatactgccacttcctattttcaaatgacaacagcaacaataacatgctaatgatgcagaattttagaggaatttctctagcctttaccatttgctctatttgccattgtttgagaagcaattattaagagtaagcttttttttaatcacaagattctaaaatccatttaattcaataaacacttacacaatggggtaccaatcaagacaaactttaaatgttgtaattgtactttaatgacaaaactgctatttgggaatctgaaactattgacaccaacttcctcagttctggagaaatcaacaggattacatagaaatcatgtaaataccaacgattgttctcagagaaagctgtgattcccccacaaatgtgactgcaggtggtgtaggctgaagtttgcatttattagttgggtaaatttgatccatccatggtaagccaggatgtacccttaaagattttgataactgttctaaaaagcaagtttaataattaatgctccttatatggcattatttaaataagaatactgtagacttgggaaaatatattgttgactattgccactgacttttctagagttcccttgaaacaaatggaagttcatattgaagaggaaataaaacattctcaggctcacagattagtgtctgtgggttgcagaagcagccactgctgcgacaatgcacattatacttggggtggtgcttctattacttcatcagcaatccataaatgaatctggccttagctgtacttttgaagaggagactgtgcccaccagcagccaggagaaatgaattataagataatgtgataatgtggcattgggggaaaacaatgctttagagctgagttggtggacaggataacaagtgactactaagattagtttgaagaacctctaaggcttccttggggagcccctctggaagagaaaactaggagaaagatggattttcaaaaaaaagttattcatgaaacatttagtacccattttaggaagaaaataaggggggctttccagttacatttaccatttatatgataaatgtgccagacacatgcttggaattagagacacaaaggtaaataaaacacggccccttctctcaaagcagttaaaatctactgggtggccatttgtgggtgaatgttgtgagtgtgtaggggaggtgctaggcaggttgggagggttgcattttaacagcaggatgtcaaagtatgagtagtcatttccaggttcataatctgtctgtataagaggaaagtttttggtgcctcaaattgctccttctctggaataagctagtggttaacctagagcaactgggttaacaaacaaggacatagcaaaagccactcctcagtcaccagctctgcgggaggaagagattgctccatggaaactgtagcttatcccactctttacaaactaaatagatagatttttagaaaggaaaaagaccaaattaacatttgttaatttaacatttgttaaaaatgtcaggagaacgcaaatcataaagtgaatttctgtgaactcaataattaacttcatctaggatgtttatcctctggtgtaagcctctgtggtcttattaatatggtgaagtttcttcttcagggtcacctgggttgagggcaggtgcctatgagtcctacagcggagagagcaatggagaatcaccccatgcatggcctcatgaacgatgatgatggctcactcagagaatcaaaaaactatttctgactaaagaggtcgagacaaagcaagcttcagatttaggaaaagacatctcttttcccacctctctccatcatcattcaatttactgacaagctattaaaggttttaaatggctggccacatatacaagtcagaattgagttcttttgagggcaataggtcagaggaaaaggaggcttctaagacctcgatcagcctctttggacttgtgattgagaaaagttaactggttgccggagctaagggtgttgtgttcccttaactgcagagattcgctgtatttacaatgcaattttctcaagagtttccatgtccagaaggctagtgaagaataataaaacaaatacaacaggaactacttcacctatggtcaccaatgatatctacatggttgaaaaagaatgggcagttctctatcctcctaatttccttacactattgaccacttccctctgttaaagttctcccctccctttgttcccactcttttctgattctccttcaaattctctgacctctccttctcagcattttgcacaaatttcatgcttcagcccatcatagggtaacattccctctttctcttctgtccctcttcctctctgtcagtgatgtttgcattttgttttaatttggactgatgtaacaggcttcttcttggcccccctgattttaattttgattatctaccattcagcctctatatagctgccagagaaattttccaaagtaaacttcatcgatctcttacttacttcaaaccacttcaagatcccccattgtccataaaacacagactccctggtcaggcataaaataattttatgatctgcctcctgtgtaacctctccaaacttaactctcacaacacctctccacatgtgtctcgtgatctggtcacacagaattatttgcagctccacaaggttggattactgtattaatccattttcatgctgctgataaagacctacccaggactgggcaatttacaaaagaaagaggtttaattggacttacagttccacatggctggagaggcctcacaatcatggtggaaggcaaggaggaaaaagtcccatcttacatggatggtggcaggcaaagagagagcttgtgcagggcaagtcccgttctttaaaaccatcagatctcatgagacccattcactatcataagaacagcacaggaaagacccaccccataattcaatcatctcccactgggtacctcccacaagacgtggggattatgggagctgcaagatgagattttgggtgggaacacagagccaaaccatatcattctgcccctggcccctcccaaatctcatgtcttcacatttcaaaaccaatcatgcctccccaactgtcccataaactcattaactcaaaagtccacagtccaaagtctcatccaagacaatgcaagttctttctgcctaggagcctataaaatcaaaagcaagttagttacttcctagatacaatggaggtacagccattgggtaaatacagccattccaaatgggagaaattggccaaaacaaaggggctacaggccccatgcaagtcccaaatccagcagggcagtcaaatcttaaagctccaaaatgatctcctttgactccatggctcacattcaggtcacactgatgcaaaacgtaggttcccatagttttgggcagctccacctttgtggctttacagggtaaagcctccctcccagctgccttcacaggctggcgttgagtgtctgtggcttttccaggcgcacagtgcaagctgtcaatggatcggtagatccattggggtcttgaggacagtggccctcttctcacagctccactaggtggtgccccagtaggtactctgtgtggagactctgaccccacatttcctctgaaatctaagcagaagtcccaaaacctcaattcttgacttctgtggactcaaaggcttaacacgacgtagaagctgccaaggcttgaggcttgcaccctctaaagtcacagcctgagctctgtgttggtccctttcagtcatgactggagtgactgagatgcagggcaccaagtccctaggctgcacacatcacagggacccttggccagccgttgaaactactttttccacttaaacctctgaggctatgatgggaggggctgccacaaaggtctctgactcgccctggagacattttccccattgtcttggtgattaatattcagctgcttgttacttatgcaaatgtttgcagccagtttaaatttctcctcagaaaatgggattttcttttctactgcattgtcaggctacaaattttccaaacatttatgttctgtttcccttttaaaactgaatgcctttaacagcacccaagtcacctcttgaatgctttactgcttagaaatttcttccaccagatacccgaaatcatctctctcaagttcaaatttccacacatctctaggaaaggggcaaaatgctgccagtgtctttgctaaaggcctcacaatcatagtggaaggcaaggaggagcaagtgacatttaacatggatggcagcaggcagagagagagcttgtacagggcaactcccattttttaaaactatcagatctcatgagacccatttgctatcacaagaacagcatgggaaagactcacccccataattcaaccatctcataccaggtcccttccacaacacatgggaattacgggagctacacgatgagatttgggtggggacacagagccaaatcatatcacatagcatctctctggaatgcccttaccagctttgccaggcctgcctcacctagtcccagaagccttccctgatcaggttcgtgacaccacccaatatgggtgagatgtcattcctttctgatcttccttaatgctcactacttgtcttcattataacattctcttgtaagggtttgtataggattcagacagaaaattagatttaccataagtgttatgggaataaaaaattgattgtaggtgttagcccttataaaaatatgggaggagctgaggaaaagaaaatttggaagggagagttggatggtaaaaaaaaattagtcactagccaggtgccctgaagcaaaggcacgggtcaaccagcaggagcttgaaatgaaattgaaaaagccaccaaagtgaaaccacaaaaaaggagagcttatgaagtctacaaaaattgtttttcctgggaagagttgcctgtgcagagatgcagttttggtgtgtccccagccaagaacctggtggtaggcctggggccactgagtgaagacaagttggaggggaagaggaggagcccatcgggcacctctgcatctgtctatcaccatggtcgatggtgacaaccttctgagagtaatgaattctacttcatttctgtaagcaaattgcaagcaagttctttcaaaaaaccagtcagagaaggttattgtcccgggaaataaaatttccagctttggccaagttcacctaacagaatacagcacaccttcactgtctgtactctagactgtgagataagaagacaggcagtacgttctatccattttaatttattcagcatcaagcacagtgcctaagacatagcagagactcaatagagatctggacagtgaatgaagagcattaaaaacgcagatatggcctttgtgttttcaatcattcccaaagcatatggtggaaatggtgctacgcattcttgggaccaaatcttcacgtgtcaagcaagaccagactccagtgactaaatgattgtaaaagaatttcactgtgaaaataaatgtaattacatacatcaacacacttacttgaaatttcaaaaagtaagacaatgttaaaatcaagtttgcctttttcctttaatgttatcaacatcttcagttttactgtgttttgttttggctttaaggtagtcattcgtttttggttttctgtttgttgctgctgttgtttttaggatgctgacagtaatgtgtaatgaagaaccatattatgtcaacagatttatactgaggttaattgttcttatcagaaaatcaatatgtttgaaagtacatctgttttctgttttaagtctactccatgaatgccaaagttcatactcatctgcctttacctcagaaataaaagcaagtctccagcaaaaagaagggtaaattcagagttattaagagtcctcagctgggtgtggtggctcaaacctgtaatcctagcattttgggaggccaaggtgggagaatcatttgaggccaggagttcaagaccagcctgggcaacacgggaagaccttatctctactaaacatttgaaaactagctgggtctggtggcacatgcctgtagtcctagctacttgggaggctgaggcaggaggatcacttaagcctgtgagttggaggctgcagtgagcagcactgtacttcagcccaccagcctgggcaatagagtgagacttcatctcaaaaaaaaaaaaaaaaatcttcacatacagttttatgacttcatttcacttctacttatcctgaagttcaaaattgtaaattatctttctgataaaaaccaagggaacacttatggataatggaatattttgggagaaaagagtcactacaggttttatttggtccgtacaaagactttagtagactatttttctctgtatatcctctacctgtctttcttgtcagctaaaatgtgtaataatatcatcagagtaacttctttattcaatactgtgcttctagtttaataaactatttttaaagctttgaaataaattagtatttccagattcacagttgacttttatcatcaaaaatctatgtttataacttttaaaataattaactcttcccttctgtcagctgctctggggtggtttcatccccacattctgagaatgaagggcctggaatgatgccaaagggaaacatgaagctgcagaataaaaatggctcatcttttcatctctgcacatacctcttactaaaaatattttgagaaatttgatagtaaaataaacatgactctattgtaaaagagaatgtaaaatttgcatacatttataatataaaataagagacaccaaagaaatgttgaccttattgaggctctctttggaaaactccactctcattggggtggtttgatgaaaattgttgacgaccctctcatctcaaagtaagcattattttcagcattagtaatgaaaaacaccttggttttagataaatggaatttgttttcattcccagagagatttaggactggaagttactatctaaactgacactgtctagttattccaagaagcatttttatgtctttttttttattactagacataatacaagacaacgtgtcatttgatcaatgatgctgtcataaaccaacacccatttgtcaacctgaaaagaacaaatgacaagagggtcagggattgaaaagagaagccttgtgttagaaggccactgtcacattggaagatgttcctggatcatgttggtttaaagtcacctagactgtcctctctccctcccttcctcctccaatcctcccattcttccctcctcatgcctcacctcctttctttcttttggagcccagcttgtcagtatgtgatttctttcagattcttgccagaatttctatgtgggtaaacttcagtatttgcggttgcagtccaatttgtaaactttaagcagaaaagaggtaaaaggccttcaaggattagaagttatttaaatcctgtaagttagaacggtgcaaattcactaactttggcagtaggcaagaggtttccacaaaacaatgtcaccctgacacagtaaatcagggctgccttggcttagtaaggggtgggtgaaggttgaggactacgctgcccaaatttgtaccctaacatcaggcagcagataaccactactgctgtcaatggagttcacttccatttggctgctcgatgccctaaagatgttcttgtctgaataatgtgggtctcatttccatgttaactatatcctttgatcccatattggtagaatgattttaagtcctggatgccttggatagtcctggcagtaattactaacagagtctcctttcactctcaaaattgttctggtttacaaggtaagttaaatcatttctttagaaacctcactctcaaaactagcattaaaactgagctatttcccattatgtcagagccacagaaataaaaatatagaactaaggcaggtaatttagctacaatgaggtgggaatgattcagcaggaccatctggcagaaacgaaagagggaccatagtcttcctgggtcaccaaggcaaccgagggagggactcttctccccaggaagggtggctgtgtagtcctgcagaagtcagtgtcagcctgagagtcaaccagcctcagcctccttcttcccggtccctcagtccatctccctgctgccctggctttctaggacagagctgtccccaaggagtgggtgctggcttgaaaaccatcacacctgtgtttgaagcctgggcttatcacttaccagctgtgtgaactagggcacattcacttcatctctctaagcctcaccctttccgtccataaaatgagaataatcagagctgcgttgtagggttggtatgaggatcagagattatgtaagatatttagcctgatgtctagcacaaaattagcacaaaataagtagaagctgtttcatagcctaaatctgaattctgaagaatttaggtatgtgactctccatatcttataaatgggctcctctttttatacacattgctctcaactctcctgtgagtcagtaaattccttgaggacaaagtctccattttatacctcagctgtgcctgcaacccttcaatacatttctgatcaattaatcggttgcctcccaagctcagtgaacactcccagccagagcccaccagctctctttccccttccccagcaggagccaagatttcacaccaccagggttgcctgaggtacccacagggaaggggagattatgaggaaaggttagaggccccgtgtggaataaaaataaattattctttgaaagcagtgaaatttcgctgcttctctctttttttaaccgtgttcataaataatggaaacacagtattatttttcttcattccaaagtataaaaatagaaaataggccttggattttcagcttgcagtgctgtgttgctgacaactgacactcctgctttcataaacaatgaccctaccctgagatgttgttatgtgttgaatatgtgtatatgctgcatatatatacatatttaaaatattttgtttaactaggagtttgattgagaggtttaagtgagtgcaagaaccagatcagctagaaaattgccaaatctatttatcttcactgccagctcagcttaaaatcagtgtttcctcaagcaccacagcatacatagttagctactaagtatgctgctacactttaatttgattatatgcctgtgaaataaagaatgttatatgattcagtcatgttatcatggctaaatgtttgagttttccaagggaaggggcagtatcctagactgacacacatcaactcctagggccagacttcttttgcagctattgggtatagatttatattaatactggtcttaccataagtattcctgagaacatttatctgccctgagatttttagaaaactctccctggtcaaatctggaactactgctccccattttcccactggctccttatgtcaaaacataagacatatgatttccatattagtgtaccccaattcccaaacatgccccccttcaatttctgcttactctgaaatctagacatgtggggataaaaacagtcacctatagatcatttgctacaactaaaatgtgatgcaaatttactccattttatttttaaaagagaccaagacttctctctacaaaaaattaaactaatacgagaatttcagaatccactttgttcatctaaaagcagcactaaattccccaacaagcttacaattacatttttcccccacctgtgataagttttcacagtaacatttttgttgtgtaaattggcccatacacttcacttgttatccaaagtggtcaaggacaagtcaaagaaggcgaatcttcactctgccggcaacaggtcagccctgacctcctcaagtcctgagtgggagaatgggttcaaaaggggaagtgcaggtgagtgaaggtatgtgttgccaatggcagaattgtggcagacagctcaggcatggtcagtggcgtggaggtccaaatatccatatagtcagagttgtctgtacaccccttcaccatgtaagcaaactgaaaaattgccatgaaaaaggcccacttttgcagtgatgagcagtctacttctccctttcatgacaacagctgtgaggagaatattatcatacattcacaccagtctctcttacagtatttccacatgcttctctcattttgtcttcgtgagaaccctgtaagtgttcacacccccattttggagaagaagaaatacacctccagataattgcaatgtcctgagattctacaataatgacaaagctatgactggagcccagatctccaactccagcatactgttccttcctttgctggttgttgacctcctcccaacactctgagtactctgtcaagtgcctctcctcagcctccactgccagtatccagtgagcttaccctccacaggtccagcactcatcaccagcagacagccaggtgcaattgtgtaggtcgtgcactgctcagcccaagagggttcattaacattatggcttacatgactgtcctgtctcagtaagctaaaggtgtgccatgccccaacaggccaggtgtggctggttgtagagctggtatgctagcctcctatataatatcctggtacatttacataatcccatctaattctatctatatgctctatccttaatttgtattatacggcataatataaaaatttacattatgtggtataatttatatggtataatatataaattatatgataaagcaataaaatatgaaagcttaatgtgtaaaagagcaaggttctaatattaataataatgcgaatttaaggatgctaactggaaatatttagtattcaaagatgatcatgttgtactaaaaattcacaagctacatctttatggtctcaccatattacaaggaatttttattcctgccataaatctcatagtatacattttaaagcctataatattatagtatgcctacactacattcacagaaacaatcaaaaataaaggataatgtgttaaatagaaaaggaatttgttttttaaaataaatataaacctaccaaataagaatttctgaatggcgaataaatgtctttggtcccgtcataacgacagatttttaaaaagaccaacctacattattttccctcttgggacagcaacatgcttagtcagtaattgaacaaatttctaaaggctaaagatgagtcttcaacatcattgttgtcagtctctctattggttggcctaacttgtactttgaaaaacaataataaagaaagcaagtattaccaagcatggacaaggatgtcctctaagtgcttgggtacctgtggtaaattgttggcagaagtggctgtctttatttctacctttgtttgcacaccactttgcaatgtgacattgtgtttctctcctcaagaggtggggtcaacagaatctggttgactccttgaatctggtctggactttgtgacttggtatgaccaatagaccacagcaaaattatgtatggtatggcagttctgagcctcttggaatgccatcagatgaataccaccaaggcagtctgctggggaatgtgaagcacagctaagttatcccgggtgaagtcatctggcaccagccagatcccagctgactcaatagctaatcccagtcaagtctaaaactgctcaactgaacccagaccaaactgctggcccccagaatcacaaataaaatgaatactggttgttttcagacatgatgatttggtgttgtttgttaagtataaaaatctaactgtttcaatacataagaaagaaaacaacatcatcttacattctttttttcttcgagatggagtcttgctctgtcccccaggctggagtgcagtggcgcaatctcggctcactgcaagctccgcctcccaggttcacgccattctcctgcctcagcctcctgagtagctgggactacaggcgtccgccaccatacccagctaatttttttgtatttttagtagagacggggtttcaccatgttagccaggatggtctcgatctcctgaccttgtgatccgcccacctcagcctcccaaagtgctgggattacaggcgtgacatcatcttatattctttagattaagtttccttttgacagaaaagtcatcagtacaaatgttcctacctcaactcattctacactcctacttgtaagattttattttttatatagcaactttcaccactgttaggatggctttctttccagccaaatagatacacaggtgttttccaattgaccccagagaccttaccttcacatgactaccctaaaaaggaaaaaaaaaattgacccggaaattaatttcacagatttgtttataaaccagttcaattatctaaccggtgacaaatcttctctgattaagaattatatacagttccatgaaaccatgaaagtccaagaaataaaatctgcctgaaagatctatttagtcctctagccttgtggtgtaaaaatgtgctactgcctcattgttgagatttgagatctttgagatttaggaaactttaagttataaaatcatgaagttaaaatggaccttgactttccaatacaattcctaacagatagattcctaagatgtgaatcataatcataaccatcataatcatcactacctaatgtttgcatagttcttaatccctatggaagtctgagcaacctgaaggcagtgccaaatgcaaagggtcctctgaaataaggaataactagaaaataacctcaaaagaaagttcttcataaagtagaataaccgtgaggacacgcaaggagtgctagtgataagtttaaaagaataaaggtggtcaggtgggagatttacagaggtagaaaaaggttctgtattccacataatttttaagggatgaacacttagtaataaggcatttaattccagtttatcaccactaatctcctgctaagatgttaaagcctcgttttctatacatgattcccttttatatcagaggagttattttttcccccttttgcatctaatactgcagccaaacgttgttgccacaactgctatgcccaattctctaattctagtatgagtagcctttctcctcactctggaagaagaatgcaactccagatagctgcttcagagagcaggccgtatatattcacgccctaaaacactttctgtctggccagactctcataaagctcatataacttaagatagagttaaacaacccagaacaacactgtaagttctagtccctgaggtaaagcaactgaggttggaggttattctagaatgaaaatccagacaaaatgcagcacatttaaaactatgtcagataaggaatggctgaaggaattggagattgcctcaacaagtaaaaaagatgattcaaaaagtacaaaatagctggtgatgtgctggaaccagctcctaccagctcacaagaacagattgctaaatgggaattttgcaggctggttggcatcacatgggtagcttgatataagctgcagagggagaggttacaccatggaaattaacgaatgctacaaatgagtttttttttttttttctggagagctggttgttgagcatttactagcatatctgtgaagttagctgtcttcaattacttgggtcctttttttggaatgagattatacttggttatacacaatgcttctcaaggctttgcaatacagtatctgcaaaggcaaaggaaaataaacccctaggagctccagtgacatggtgcagagtggcaaggaatctaagcaaatattgaaggtataaaataatgagggtatataatactgtaaaactaagatcctagacaacaatgaatgcatgttacctaaccagcaaataaccttaacaatgtaaagtttatgtatttgttagaaggggagttagaatactgataaaattaaactgcattaagtaaaaggtataagtatacagtaaaagcataatgtcaaagataaaaatttgagattaaccataaacatttataaagaaagtataaaacttgcaaaagagtaaatgaaacaaaataaaacaagaaaacaaaaagcaatttaaaaaaacagcacacaaaaactcaacaaataaaacaaaaagcataaaaggaaaaaaaagcatgtaaaactagaacaaatagaaagcatgttgcatagtagaaaaacaagcatttatatagatcaatattatatagagcaataaaatgtaaatgactaagctcacctgttaaaagaatgagattgtagaaatggattaaaacacaaaattcagttaggtgattatgaaagacatgcctagaacataaagacacagaaaggttgaaagtacaaaggtagaaaaagctggtatatctatattagtatcacataaaatagacttcaagataaaaggcagtattatgagtaaagtaagatgtgacaaaagatagaaggtttaattcaccaggtataccattctaaatgttcatggcccaaagaaaatagccttgaaatatataaagaaaaactaaaactgacagaactgtagagacttggatcatccgaatcatgtgaaatttcaacagaaatacttcaattagtttaagtaaaacttaaaatgttagtaaatatatagattttaggaaaataagctgaatttatggggcaaaaatagaacctggaaacaagtaaacagagaatgttgattcttctcaaactcacattaagtatttgtaaaaattaacttgtgtcctaagccataaaacacatctcaacatgtttgggggaaaaatacaatcaacacagacaacattctctgaccattatgcaattaagttggaggtcagtaacaaaaaaagataaatttaaatatttctgaagtttgtaagtttcaaaaccacacctctcaattatctatgtgccaaagaagaaattgtaatgggaaattgagaaatatttaaaaataaattgtaatgaaagatctacctatcaatacttgtagaagagggccaaggcagaaatcacagaaaaatttacagctttagtatattattagaaaggaagaaaggctgaaaactaataatctgacatataaataaaacgttttagaaaggaacaacaaaaaaggaaaaaataagcgcaaaaatcatggaaacaaaacataaagatagaattggatcagcaaagggtaaaggcaaaagttcgttctttgaaagaacaagaaaaataaagagaattttggaaaggttgattaatgaaaagaaactagacagaaataaacaagactagaaattgtttagaatagatttaaaaagagaatactaaaaatctttgtgacagtaaattttaaaacttaactaaaataaaaaattcctagaaaaaatataatttaataaatttaagaagaaatagaaagcctgaatcatctaataacaattaaagaagttgaatcaatatgtttaaattttcatacatacactgacacacacaaacatgcacacagacacacatatatacacacaaatatgaaccgaggctcaaatggttttttaggcaaatacaggcatactttaaaggaatagattactttaatctgaaacagtttttttttccctaagaataaaatgagggggattataccccaattcagactataaggcaaacgtaacaatgccaccaaactatacaaggacaacatgagaaagaaaacttaggaattaattatgcactaaaaattactcataattaagttacaaataacttacgaacatagatgcaaaatttctaaataaagtattaggaaatgtgtagtttaatagcatataatcattattgtagcccaggggtggtggctcacacccataatcccagaactttgggaggccaaggtgggcagatcacctgaggtcaggagttcgagaccagcctggccaacatggtaaaacctgtctctactaaaaatacaaacattagctgggcatggtggtgggtgcctgtaatcccagctactcaggacactgaggcaggagaatcacttgaacccatgaggcagaggttgcagtgagccgaggtcacatcagtgtactccactctgggtgacaagaatgaaactccatgtcaaaaacaaaaaaaaaattattattgtaaagaaagagtagaaagagaggaagaaggagagagagaagaaaaggaagttggagtcagggaagaaaaggaggaagggaggaaggaattgaaaagaaagaaactctctacacatacacacacacatacacagaattatttagatatggataattgtttgcatagaaaatgtaataagtggctgggcatggtggctcacgcctgtaatcccagcactttgggaggccgaggcaggtggatcatgaggtcaggagatcgagaccatcctggctaacacggtgaagccccgcctctactaaaaaatacaaaaaattagccaggcgtggtggcgggcacctgtagttccagctactcaggaggctgaggcaggagaatggcatgaacctaggaggcagagcttgcagtgagccaatatcgagccactgcactccagcctgggtgacagagcaagagtctgtctcaaaaaaaaaaaaaaaaaaaaagaaaatgtaataaggtaatttagatataagataaatattccaaaattaactgcatttttacagtatgacaacaaacataaaatgtgactttaaatattgatttcatttataacagcataaaacaggatgtcatcaggaaacacatttaagatattaggacatatatggaagaaagtataaagctttatttaaagacatcaaagaagggcttaaataacatggtgctataccatattcatggataagaagacttgttatcttaaaggtgataatttctgcccaaattaatctatataatcaatataattccaaacaaaattataccagggtgttttcaaggagtgtaataatctgattctaaaatttattcataggtccaaaataggcaagatactcctataggaaataagatagaagtgttttcttactgtatatcaaggcttactttaaagttgtagtaattaagacagtataacattggtgtaatgtagaaaaaagaatagtggaatataaaaaagcttagacacaaacccatgcaaaatagttacttgagatatgagaaaggtagttttacaagtgagaaaagaaaagagggaccattcaataaatggttttgggacaaatgtttatccatgtggataaaaccattatgccatcagataaaaaacaaattgagtcctttactcacacccataaatctcaatgccaaatagatcaaaggccaaaatgtacagagcaaaactaaaaaattttagagaagatataaaataatattttcacaacctcaggattttaaaaattacaggagaatgaaaacataaattatggtatatttatgcaatggaatatcatacagtagtataatattaataaactacaggtatacctaacaggtacaaaattaataaactgcaggtacacataacaacatggttatttctttaaaatgtctagttagtgtaaaatagtaagcagcaaaatactactaaaagactgatagactttgtaaaaatgtaaaaacacgcaagaaattaaataatatattccttggagatacattttgtgacaagattaattttacaaaacaaatgaaataataaccacaaaattcagattaatggtcaccttgggcataggaacacaagaaggtaataaaggaaaatcaactaagtagatgcaacaggactggctatgtcctttattctccagcccgcaattgtttgttgcattattatgcttaataaattacatttatgttacctataagttgtgaatacgacatagcatttaaaataaaaatctcaattttaaaaagatttctgcttattatactaagactaattacagagctctccaaaagctagaaggggacttatggggcagaggaattgggtaaaaggtttaattggtagtgagtttcttgtcactggagttattcaagtacagatgagaaaatccgtttaaattaatatgaatacttaaacttaagcattagttggttgattgaattaacttccttctacatctgaaagactataattccttggatcagttgttgaacaaactaatttaaccattcatgttagccaatttgttaaaaatatgaagtccatatagatactgcctttgtctgccaattccagaattagaataaaccagttgctcccagaaaaaatctagggatcaactttgccccccaaatcacttgcttctgtttttttcttaataatttaatcattctttacatggttttccttggtaaggcaggggagagggaaggaggggtgggataagtaggtatttttaacattttcatgaagctcaattttatgcaactaattatctaaagatagtattgaaactaattttagcaggtaataagttgtgggcaggatcttagagaatattctgccttttaatcttcatagattctacaattgaaagtagaaagccacttttctaaaagtgttgccaaacgttcctcagatccctcaccatcgaggaggggaatgccaacaaaagtgctgggctgtcacctcagggaacttttaaaagtaagttaaaagcgtagattaaataaattcatttatgccaattgccaaaaggcaagggcaatcttcagagcctggaaatgcgagaaggcaggcaggatatgcacgagggggtggatgtgctggcatttactaaatccccactggaaacatagcacatttcttagatcactcagttcagtcaattatcgctacagataaccctatcagaagtacctcccacctacggaaatctgcctaaggtttgctaacccacctgcctgtttctgaatagtgccatttttggcataattacagcaaaaaaagaggatcattgaatgcaacccagaagggctggttttctctcaggtgggctggttgaagaaattgatgctgaagactgaaggtcccagcccttcacttattagtacccctcttagtgatgtgtcatattgtgggttgtgtcttttttggagaaagtcaatcatgtcactctgttgagaagagaatggtgaacagcaaggagacttttgcaatgaaataatgcaaactattccagacatgcctaatggttctatttgctgtgtgccttaggtcagggtgtaagaaacccaatcttgaaggaaaacagagtagcttatcttgcctggaagtaacaaaaaaaaaaaaaaaaagcatcccttggtgggtcacatgaccctaccagttctcaagtcagatctcttctcataagggcactgtgtggagcttctgagatctgtggaggtttttctctgcaaatgcaggaagaaatcaggtggatggatgcataattatggccctgctcctggtctctttgctggcattcctgagcttgggctcaggatgtcatcatcggatctgtcactgctctaacagggtttttctctgccaagagagcaaggtgacagagattccttctgacctcccgaggaatgccattgaactgtgagtatcagagggagggggaacaactgcatggctggcatttgtgcattgcgtactattattatttttacattaggctgatatctgttagactgaaatatttctgccccttgaccgaagtcctgaataaaacaactaactccccagcccaaccctcctgcctgtggctttccaagaatcttagatgagagtttgtatcagcatttgtcagagaacggcagtgtcagagaaccggaatccaaaggcaaagggaaaagttttgtcttttcaatgcatttgctcttgggtttcatactctctttagtggaaccagaaaaggaaaatgaaggcaaagtagaaacttaggagacccagaattggaggcagaaaggcagctttgatctaagcagaatacacaaggtatgtctcccgaggacactgaatctaaaaggccatagtctttgtcgttttgaaggcagcagcaaataattcctgaactgagattctgcttttgggtgtaaaaaggaggtggtagagaagagaaaaggtgtgaagaaagaaagaaagataggaaagacacagagagagggagaaatacaggataatcttttacacaactggaaaaaaatgtgattaataagttagaaatttacttaactattttaacaggaagtagactcctagagttggccaagaatttagacaccatcctactctctctttcttttgcaaattaggaatctggtgtctgaagagtaaagaggattttccaaactctcgtgatgagttgagatggagccaaaagtagaaatcgggccttttgactcacagtctactgttttgttttgttttgttttgttttcccaacccactgtgactgactccattagagcaacagtgagggaagcctgaagtaattgttcagttactgcttcccctgagaactggcaagttgggactcagggattttagatactctctgtgtttttattgcaaggattttaaacagaagcctgtttcaacctttgtcacttaaagctgtggatgatttgcatttaattgaagaaggtggtcatctctttagttcaccaattgccatattgacactgaaacatgttggtgttgcatttcagattttcactcagggacaatgagttgcagccttgcagacctgattgattctgtttgccacatttccccttaacatctcaagtcttcagtccttatccagaggcagctgcagaggcagggaaaataactggccagctctgtgttttggctacactgtctcagattagacagctactcctgattatgctgaagaatgtgcccatgcacaaagacagtctgatttattaggtaaatataagcacaggagaaggccaatgtacctgagctcctataagtcatttggtcctaagtgactttcagtgattacttaaccccttctgagcctcaagttcctcatttctgaagccattttagtacaacctgcttggttgaattgttgtgaacactaaaagatatagatgacccctacaccctaatttccacctctcctggacctactccactttttccaatgtttccatgtgggtcaagcagtgtcatccagttgataaaacaaacagacccaaacaagttttaattttagggtgatttcacactagcctgtctgctttctgaaatctccttatcagaagagagattttcttttttcattctgcagagaaaacataggccaaaaaagagaaaagatggagggaaaaagggaaaaagagaaagaaaagaaagaggaaagaaaagaaaatccacccccacaccctaaagcttcagggagtatatttgtatgaattactatgagaggatatgaatttttgaaaaaaagtaatgctaaggtataaatgactaaaacacatctctggccaagagcattttgcaactaaggaaagagagcatgagatgttgagatagtatggaaagagactgtgtgagagagtgtgatgaacagagcaccagaaacaaatttcacattcttgacaaaggctagctctaggtcaattccttacttcagtgtacgtattagaggacaaagttgcataaaactaagaaaaggaaagaaagttcctgccaggtgttaggattttcctccacctaaggaatgagtatagttaagagctttagaagctctctcaaatacccagtcttaagaagattctgtcttctgcacactcattggtagggcttgacttggaccatcttagagtttggctttgcaatcttcttggaaaggtgtactgaggtgagaagagaaatgttgctttgtctattagattttaaaaaaggaaaattatttcaggtcagtgtgttaatcactgaagagtagataaaatgtcaagtgaattacaactcacatactgttagaatgagagagcaattacctttatttttgcttccttaaaaagactgaatcaaggttatctaagtaaatggcagaacagggatgaaatggactgttcaactaagtatctctaattcaccttacaatcttccaagtttgcgtattaactttaatgattacatgaggtgtaggtggatggattattggacttcattgactgcaattgcttaatccatcaacatgtcaaagcttcattgttactcaggctcaccgggtggaaaacaattcctacattttactatgtacatttttatcctatcattccattcaccttgcagcagtttcatttcatttgatacatctgccagctatcacgaaagattgctaatttcctatgatctgcacatgctgatattaatgctaaaagaacagaagcaccatcaacaggcaagtagatttcatttactaaggggctcctactatttgctttatgcagtatgttttgtacatactacttcattaaaacttcaccaaaaactgcaagtttggaattattgctctgtttttcaaataagacaaaccaaagcacaaaaaagttgagtagctctggcaattatccctgcagctcctggatggcagagctgggatccaaatttgaatcttttatatctcctctgcatgccatgtgaaatgaacatcatctgactctatacctttcttattctgaaaaaaaaaaaaaaaaaagagtaatcctttacattttaaaccagaagtcagctttatgggctataccacttcttgcaactactcacttctatcacagtagcagaaaagcagccataaacaacatgtaaattaatgaacatggacatgttccaagaaaactttatttatgaacacagaaatttgaatttcatataattgtcatgtcacacaaaaaagcattattttgatttttttcaaccatgtgaaaaggtgagaaagatttttagcttactggccatagaaaaacatggggcaagccaaatttggcccatggactatgtattgcccacttctgatttagactatagctgagagagtgggttaagtattactagtttgagtggggtttaggcagcctgaggcaccatggcaccatggagaaagtactaaactaggggagcaggttcactcacgggcagcctttagctggttctgatgagtcagagatggtggagtatagtgtttagaatctgagagacctgagtttaaacccaggatgttccattaaattttagctctgttatctggacctttggctgtataatggaaatcaccatgtgtgcctaactgacagagatgctatgaggattacatgagacaatgtgggtgaaacactttgcacaatatctctcatgttgttattgttgttgatgataataatgttgctctcaactgtaaaatattaggcaaaaattatctaccacagagggctttcgtgaggaccaagtcagtcaagagatatgagactgattttggaaaattgatataaagatctttataactctgaggtagtttacaacctcccatttgtttaagaataatctcctcccagggtatctagcacttaatctccatggacttactttctgggtaagaaaatgtgtcccttaacgctgtccatatttgtcaagaactcagggagcaggttcattctgactatagtcaaaggaattttggtttctgacttatcttagaaactcagcttcacctagaggcagtcagtggatctagaaaagtgcctttgatcttactttattcttcctgcagttagaattcctaaggagaatgcaaacacccattctacatctgaaatttgaagtctaggcaacagtatggacgtaatgatgtttttcttcagcagggtcagatgattataatactaaagaagaaaagggtctattgatggtcattcttgtcttaaggaaacctgtcctgggattatattataggctgcctgtgttaaaccttgtccttatagcaagttcccatatctcattgcaatctcttttcactagcatttacttctaattatcaaattatcttttcctctttttattttctttctttggcttacattccttattttttcatcctggtttagatctccatattccataaccacagattattattaggaattttaaagtgtgtctaggttagtctttgtttaataggtccttagttcagagggatgtatcaatcgtgtacaaaaagggtagcctttgctataccaaggcgttctgtgatgtcttaagagtgaaacagagtttttgatgtttgcaaactgagccacttttctaagagtattctgaggattaacattccacagaggtcactttgggaaaggctggtctatccaaccccagccatcaggataaattccttctaaagtctgaaccacaacccaggcctcttgactctcagattcagtgttcaatatcacatctagaaaaggactcttggattcgtttttattgctttgtgcctgacaagtaggtattttaaagtgtgctgtgttctcatgaaggagatggttctgaagtatagactataggtaaccatgaggtaaccaggtattacctgttctgaggtgaagaaagagaagataaaacaatggattacaaaactataaaaaccattcctaacttcctcatttgttgaatgttgacagtttacttctcctcatcatataggtttcaaacttttctggttacccatctaatcagtttacaagttcctttcatatttctgctactaataataatattttttttaaaaaaattaccattatctttgcttcggccctggcaatctaaatcctggattatataattacttcctaatttatgtctttcttatcaatccctcttttctccaaactagcctgcacaccgtcattctattttctccataaaacaccactgccaccatgttgtgatttcccagttcaaaaacattcaatagctcatctttctgactttacctctctttattctccaacaggagcctactccacagggctcaagcatagtttgtgcatttctacctctttgtgtctttacgttatgcctcctgtttgtactattctcagtttattctttgtttcttgaaattcagccttattataatcttgctcaaaggttgcctctttcatgaagtcttcccttaccactccgtctttatttaaacttgctttcattcaaacactggtgcagttcatttcacacttaatcttgccttgcgtttaatttttcatgtgtgtcttatttcctcaactgtagtgaaaatttcctttgtacaccttagtgtgtctggttcaatacgatgtgtattctggacgctcaattacaggtagtacaaatgattcgataaatcaggaggaattacatctgtttatttgctctgctcctcagtattgaataaagaattcttataaaagatgattattactttctcctgcagtgaactagtataggatcggatagctttcttattttccttgcttttttatgtgtttgttttaagaaaattcctgtgtgtcattccagaatccattaatttatacagaaagaaagagacgttgactagaaacaaggtctactgagttaaaagttgaatattctatactctaggcacatcattcaattctcttgacttacgtgataatacttgcctctctatacctaacaaaaatatcgaaaagaggaaagtgattttgcccaaacaaaatcactttaaaccagacagaagtgttcaaaaaatataatttttgccaattaaggtcagattctagaccctgaattttaagttttctatattcctcagatgtactttgattgtcgtagttctctctgattatcaaaactgaacaccccactgtgcaaattgccctgagtgcccatgtttggagtctcctatagccttgtttaggtacttctttgacagaaacaaacagcacagcgttcacactaatatatacataatcctttctcttgacataaaatcctgcacctacttttgtgagaaatgatatgtctatgtccaacatttggaatttaattgggctgggggaagggaggtttatattccctgcagaagaataaaaaaaaaaatgactaaaggaacagctatagaatgcagtaccttgaaagagaaaaagtggaaattacattgcagggaaagaatcctttaaagtagaagatgaactctatcctgagaattggctaagagctataatttacagagtcattattagcaattgaagagtaggggtttgatagcagagaactgcacttgcttggtgatgataaaacccccttgtttacctaaaggtgcatgctatccttcctcacccaagtcctctactctaagaagcctatgcttcagaaataggacattgtggcagcaaatgggaaattcatttaacttttgattatctttctccaaagccactaattgggttatctagccactgtggttgattggactatactttttctttaggcgcttagatttagactctccaatttagctttgtttagactagattttagcttatatagcccacaaggtcagctaggaaagagagtaattatttttaattgcctaggatctgattataatgagatatggatgtttgttcttaatctgacctctccctggagtatctcagagcatgttttgtatctctgacctgaacatgccattaccttgttctttcgtatgaaataggctggctgatctgaaaatcttcaaaggatatgtaaaataatatttgaataaagcagccaaacacgtgctatgcacttgaattcaattatacttttagtcttcagagtgacatgagcccttttttgcatctcatctctcagacctttttcagcaagagtcaacataaagttatcacagagtcctgtgtcagaaaccatcaagaatgcacagctgagcccatttttgtatctttctaatggcaagcttgatgaaaacttctaagaaatagggacctcaaaagtttaactgtttcgatgcaacagaaagatccacaaattgaggatattgagagaaaactcatcagtagattgctgaaagtttgatgtaaaatgacgctgagatgttttcaattctcaaatgctttgattttacaagcatcttcaggcaccaaacttccccaaaccaataggctttctctaggcgtcagattccagcagctgtgtaatccttgcgctcctctgatctcacttgtgggatttagagagtgagcatgtttcccttgggctgaatagttctgttattttgagatgcagcatggaaaaaccccacacaaacatctctttctcttgatattttcaacttgttgaggggttttaaacaaagaatttatgagggatcctatctccagcaatgatttcataactaaacagggggacaggtctctgagcactgcatccctcctgaattctcttggaataaggacttgagaaagaaaggccccttatatgaaagggccacatccttgagcactagactttctgaagtggcttcggtttcaaatattctgtccctttaagaaagcttacaaaatgttggttcataagataggattacatccctagaagatggcattgcctcttgtggttcctcgtcttctcacaatagtagcctctgaattggtctttgagctttccatcttcttccctcccagatccctgctctgagatcttgtcctggtttaattcctctgtgggtacacatgcccaaattcagaacaaaaatccagtcacaagtttggcattaagatcctctgtattttggcctcaaattaactcttctatctcatctcttctcttacatcctctcaaccctatgctctatgtgctattttctactccccagcttccaaatatgttttatattcccctactcaagtactactattttctccagcctgaatatattctcctactccaatattactcacctttgataccaaagaaaagatgctcatttttcatgaagttttctttgaacagcaaatatttattaattatatatgttcaaggttctatattaggcactggagagaaaacaatcaataggaaaggcaagatccctgtcctcatgaagttgccaaaaaagaactcaaacaagcagtgacaatgtttttccttgctcttacttgcaactatcagtatctctctcagaactcagaatagtcattgtcgaaatcactaatttgacaactaattgcatgttgctttgtgcaatctgaaatcatagattgtgagagctagaaggaatggatacctgcctgcctgatgccagaacagagatgataagaagacagccattggcctgtcccatctagatttgccttcttgaccaccgtgggatgatttcaggggctatatagggccacttccaaaatactccattgctttaaagctagcaaatccttgttttattttataagaagggcacagacctgaactaaaatataatgaacaatcagcaaattaatgatagggttcaatggaaaggtgtccaaatatttaagtttgactaaaagtttacaaattgtcaaaatacaagagactcaatcttttcagtttggataaaggaggttaacacagaaggtagaaaagagcaccaaagggaaacgtaggctgcattgttttctttgccaacttcaccgtttttccaaaactacttgtattgataaatactattttatgcctgttgggtaaaagtttacccgtcaatgggctgtgtatgccagcttcccccaaagcagctgggatgatcctgaatctagtaaaagaccagagctaatcttaacaaaggccatagccctccaaaaatgacagaccttaagacattttgctttggcatgagggggacagtaataaggaattacagaatgctcttgaacttataagtaatttccttgtcctctaaatttcaaactatttggcatggttatattagctttagggtagaaaaacaaattaaatgcaaaagaatgatcactgtctaccatcagatcacagcctgagcaggtacccacagtcaacaacaaacccttgccactaccatgtacccatcaaagctaatttctcgtcagggcaggaaaggaagaaaccttcattgaattgctgtttgttttgtgggcaagcagtgcagcatttctctaagtaaatacattggagaggacattagaaaatgcaacaagaaacattattttaagttagaaaacaaactggaaaagcaatgaaataaaatatgacaattatgatgaacagcaaagaggtcatctggaatcctgcaaacagtagcaaaattgcttatcatgcccctgattgtgaaaatctgctgaactcctttaataagaacacacagtctttgaatggcatctcattcccccaaacaaatactagaaataaggggaaagaagtgcaaatagttatgctagtcagataggaaaattacaaagtggctctggaagcagatgtttggggtaagattctggaggaagaagagcaacaatagccgcagcagcagatttaagaacctcagccaaagaaacagctaggctgtttgttggggaattgctgcatcagaatctttatgtcttgacttgggctggttgaatttcctggagaagattcttccaaattcctactggaggatgaagtcctgactaccagcattctggtggttgggaaaagaactagggtctcagcatccaacagtcgtaagtggcacctggcatcctcaagtccaaaaactccctattttatgctctctaaagaataattctttggggttttgcttgggtgggtaggggcactcccatgactgttctgaggggaaagtctggctgccttttaaatatactttccaccaatcctctttattttatccattttacccgatttccacccctgccccactcctagagataccagtgcctccagtccctgagtgttttagggatggtgcagtataaatcactttggcttccattttctagagtcaaccaagtaacacttctcaaactttaatgtgcttgcaaagtagaggaatatattgtggaatgcagattttaattcagctttctgggatgctgtcagtactagttccagaaccacatttctccatctttgcaatcctaaaattttcttgctcttgttcttctgtccttgttgctttattcatttaaaaaacaaattcccttattgtcttctcagtggagtttcaggaggaaacaaatagttgtttatttaatatgccatttctacccaggaattcccattcattattcacccactcaatctggctctgtctccatagttccactgagctgaaaattcttcttgtcacaggtaccaaaaaatttctctttatcttccatatgttttgtacagtgattatattacattttacaactctgaatataagaggaatgtgctgaattcatatggcagattctgtggtcacttatctgttcacattacacacctctcaggaacactccatgcagtgaccattcgagtacttgacacatgttccttttttgactttcagtgtctgtgataccacactagttttcctcctatagctcaggcaaaactttgatctcctctgctgacttctctattgcttctcagcctctagatgttggagttcccaggcttcctcctgaaccttcttctgttgtgcatctgttctctctgtatggtgagctcatccagacagctttaaatatcacctacattcagaatatgtgtgccatttctgactgccttatggagcccaagacatataatattcaactgaaaccttgacttctccacttgacttttacaagcatctcaaaaccaacaaatagaaaatagtaacacttaattgccttcctttaagccccacagaatctcttctcccagccttcatcatctgtataaacgcacatgtcaccaaactgtcactcccaaatccaatccatcaacaggtgctggggatttgacacataaactatagctccaaactcttcatttatccgtatctcccctaccaccactatagcttaattcaccatcatccctcacctgggctactgcaatgtcccctaccttttccatttccttgtttcacttgaattaacagtctatcccctatgcagcagctagaggcatttcaaaagcatatgacatccaattacatagaacttcatttagaataaaatttattacactcatgttttatgactgcctactatgacaggcactgtttgaggtgccagagagtcaggagtgagcaaaacagacaaaatatctttccttgtggagctaatgtgctttgccatgactacaaagcaccccatgatttgacctcttcctgtcaccctggacccctttctactctttagaaacactaggctctttcctaccttagatctatttttctctttcctcttcacatctttcagcatgatgagatgacacgagatgacttttcatcttttcagtctctacccaaatgccacctccttagaagggtctttttgaccactccactataatagcacataaacttactacaacttgaatgttttcatttctttactttcctccccaccactagaaactagaactaaagttgaatgatggcaaagatttcaacatgttgaatagtccccagcacagagtaaacactcaatacatatatgagttgaaagaataaatgaaagggcttctcaagcaaataataactagaaggaaagactgaatgtaacaaacatctaataagtcctactgtgtcactatgctgcatgccacctatagcatcttgcccaacaattttgcactgtagctattactgtccctattttggaaataaggaaactaaaatttaagaattagcccaaagtcactcagcttctcagtatcagaattgaaattgacatctcttatatacctgattttaacatgcccattctttgtatgaacaaggaaaaaaagacacagtgggcctctttttactctgaactcctaaagtaaagtctaaactcttcatctgagcacttacatatgtaaaatgctggactcatctttaatacagaacttatgtattattttgtctcccatatatagtaagctgaagattagcactgcactcttctcctgtacccagtcagggttggcgacatagtttggatgtgtgtcccctctaaatctcacatggaaacataatccccattgttggaggtggggcctggtgggaggtatttggatcattggggtggatccttcatggcttggtgctgttctcttgatagtcagtgacttcccgtgaactcctgttgttgtaaagtgtggtatctccccactaccttgctcctgctctgccacgtgggattcctgttcctccttcaactttcattatgagtaaaagctccctgaggcctccgcagaagccaagcagatgccagcaccacacacttcctgtagagcctgcagaaccatgacccaattaaacctcttttccttataaattacccagtcttaggtattttttaatagcaatgcaagaacagcctaacacagatgggtacaagcaactactccatgaggagagagaaagagagattcaatcagtggggttgtgaataaatagaaggactaaaaagtaaatgcgatgacaatttccagaaataaattacaaagtaatcagaagctggctaatgtcaaggagctgtttgagcaatatgtatgcctatctatagagtgggtggtatcagggctggctccaactttattttgccttttacacatttcttatgaagatggtgcccagaagtaactgactctcagcaggttgagtagctgatcttctgcagatgtagaggcttagcagaagtgaatgccatgtgaaaatggagtacttaatggaggctcaggaatcactgtaaatgctccctaaatgctcctcactgaattagatgaaccttgatgatagtattttaaaaatcccatagagttcaggaaaaaaaaattattgatctatcatgacctcatagccttttctaagatttatttctagatgtggggaactgtacctttttttttttctctctttttttgagatggagtctcactctgtcgcccaggctggatggagtgcaatggtgcaatctcagctcactgcaacctctgcctcttgggttcaagtgattctcctgcctcagcctctagagtagctgggattacaggcacgcaccatcatgcctggctaatttttgtagtgttaggccattcttgcagtactataaataaatacctgagactgggtaatttatgatgaaaagaggtttaattggctcatagttcagcaggctgtgcagaaagcatagagctgatatcactcagtttctggggagacctcagggagcttttactcatgacagaaaacaaagtgggagcttgtacatcacatggcaaaagcaggagcaagagagagaatgggtggggggtggtgcgggggcaatgccacacactttcaaacgaccagatttgtgtgaactcaagccaacagctcacttatcaccaaggggatgaccaagccattcatgagggatccacccccatgacccaaacacctcccaccaggccctagctccaaaattggggattatattttaacatgagcgttgggtgtggacaaatgtccaaactacgtcagatgtgatgtcctatttaggccaaagctgccctaacaaatccatagttccctaagtaatacaatctgagaagcactaagctggctcagttgcccccagatatatcctctgctacttgtcacaataccaccattaataaatcaattcttggagccttaaagattgccctaatttcaaatactctgcatttgaaacataaaatttcttggggctgggtgcggtggctcacgcctgtaatctcagcactttgggaggccgaggcaggctgatcacgaggtcaggagatcaagaccaccctggctaacatggtggaaacctgtctctactaaaaaatacaaaaagttagccgggcatggtcaggggtgcctgtagtcccagctactcaggaggctgaggcaggagaatggcgtgaacccaggagacggagcttgcagtgagccgtgatcatgccactgcactccagcctgggcgacagagtgagactccatctcaaaaaaaaaaaaaaaaattcttggaagttaaaaatctttacctttaaaggctggcactttagcatttctccaagtatatgcctcacaaccctaatttcatgacactccataaaaagtaaatttttaaaaggtcttccatggtcagcttggtttggaaaatgctgcgtgctataccctcattctagagattcacatgcatatacataataaaggctctcagaggcagtccaattttgtataactcataagtattctaccttccacacttcaggaaactctcatttagtaaaatgtagctaactgaaaataggctttggcaaatgggtctccatatacacccaaaggaactgaagggttgagaaaggtactatgtacaacccaaaatagatggtagacaccaaaatccctttttaaagttctatgtgggccaagtctcctgtgaaaacctgcattgttcttcaaattagaaaacattgccagatgagcttgagacagtatatactacctccttccccttgttttagaaatgtaaaatgaagcccagtgaaatgaaatgatttgtctaagatcatgtgggtagttaaatgtattgtttgtccgttattgacaaagcctacaattttaagcttgctattgcacagacgacctcccactaccacctttatctcataccccacacacccaagggaacaccttccagaaattacgagcattagaattccactggtatttttacttttgcattattaaaaaaaaacagctttgagctataactcacatacaatacaatcttctcatttgaagtgtgcatttgaatggcttttagtatattcacagatatgtgcaaccatcaccgtcaattttaaaacatttttatcatctgaaaagaaaaactcatacatgttagctatcatcctccattcatccctgagcaagcactaatctactttctgtctctatagatttctctattctggactttcttatgagtgggatcatacaatatgaagtcttttgttactgtattctttcacttaggataatattttcaaggttaattcaaattataatgtatcagtactctattattttaagggtcgaaaaatatttaattgtatggatatgccacatttcgtttatccattcatctgttgatggacatttgggttgttttcacttttgggctatgatgaatgatgctgttttaaacatttgtgtacaagttttagtgctgacatatgttttcagttttcttggtgtatacctaggagtgcaatagctgagtcgtgtttaatcctttagggtatcaccagactatttttccaaagtggctgagccattttacattcccacgaacagtgtatgaggtttactattttttcacatcattgtaattgcttaatatctgacttcttgattccagcaatcctcttgagtataaagtgctatttcattgtggtttttatttgcctttccctgatggctaatgatgccaagcatctttcatgggcttattggacatttatatctctcccctaaatttctattagatataaatcccttatcacatgtataatttacaaatatttttgtcccattatgtgagccttttcacttttttgaaggtgtcctttgaagcataaaggttttaaattttgataacattcaaagtatttttttattctttttttgtgcttttggtgtcatatccaataatcctttgccaaatccaagattaagaagatttatatctttatgcattcttctgagagttttataattttagctcttacctgtgggtttttatccatttttagttaattcttgtatatgatgcttgataagtatccaacttcaatcttgcatgtgaatatttaattgtcccttactaaacaattgggaccatattgaaaatcagttgaagatagatatataggtttatttctggactctcattgtttctgttccatttacttatatatctatccttgtgtcagtatcacactttcttcattactatttctttctactaagttttgaagtcagaagtacaatcctccaactttgttctccttcaggatggtagctatttagagtctcttgcaattccatatatattttagaatcagcctgtcaatttcttcaaagaaatcagctgggatactaacagggattgcactcaacctatagactagtttagggagtattgccatcttaacaatattaagtcttctgacctatgaatatgtaatactttcccatctattttaattttctttcaataattattttatagttttcaagacataagttttgtactccttttgttaaatctattcctaagttcattttttataatactatcatgaatgaaatttttctcttatttttaatttgttcattgcaagtacagagaactacaattgattttggtatattgattttgtattctggagacttgctgaactcatttattagttctaataattttttagtggattccataggactttccatatacaggaatatatcatctgtgaatagaattactttaacttctttctagtctgtatgccttttattactttttcttgtctaattactttagccagaaccttcagtacagtgttgaatggaagtagtgggagtgcacatcgttgtcttggtcctgatcttaaggaaaatcatccagtctctcaccaatacgtgtgatgttagtggtggttttttcattgatgactttttatcagactgcggaagtttccttctatttttgttaagtattcttaccaagaaaaggtgttaggttttgtcagaagctttacatgtgtcaattgagacaattatgtgatttttgtttttatttatattgatgtaatatattacattaattgatttttggatattaaaccaactttgccacccctggaataaaactcaattaattaaacatgatatataattatttttatatgttgctagattcagttttcaagcattttattgaggacttttgaatttacattcataagagatactagtctgtagttttacttgcttgtgatgttttgtctgcttttggtatctgagtaacactggcctcatagaatgagtgcaaaagtattttctttttacttttgggaagagtttgtgaataattggtatttattcttcattaaatatttggtagaattcaacagtgaagccatctgggtctggcattttctttgcaagtagttttttggcttctaattctaatctctccagttgacacaatctatttatattatatatttcttcttgagtcagtttcagtggtttgtgtctttccagtgattttccaaatttatctaagttataaattatctaacttattggtgtgcatttgtaaaaatattcctttatttttctttctttaaggtgagtagtaataccatatcttgcatttctgattctactaatttgagtctactatcttttcttcttggtcattctatctaaagtttgtcttctttttttaatcttttcaaagaactagctttgggagtcttttttttattccttattttattaatttctgttgacacttgaccatagaacaacatggattaaactatgtggggcgacttttatgtagattttcttccacctctgccagccccccaagacaaccccttgtcttcctcctcccctcagcctactcaatgtgaagatgacaaggataaagacctttatgatgatccatttcacttaataaatagtaaacatatcccatctttcttaaaagttttcaataatattttattttctctagcttactttattgtaagaatacagtatacaatacacatacagaatgtgttaattgtttatgttattagtaaggcttttggttgacagtaggctattagtagttaagttttagaggattcgaagttatgcgtgaatttttttattgcatgggggttggtaaacctaacctccacattgttcaagggtcaactacaatctttactatttccttccttcagcttgctttagatttaatttgctcttcttttcccaggatcttatgatgaaggttgggttattaatttgaaatatttttttcaaatacagctatttatagctataaacttttctataagcatgaccttagctggattccataagtttagtatgttatgtcttaattttcattcatctcaaagtgttttctgttttccttttttaaaaaatgtatccatttgttattgagtattgtgctggttaattttgacatatttgtgagttcccaaattttttcctaatatttatttttcattccatttcattgtagttggaacacatactttgtattatttctattcaatcaaaaatattgaagtttttttttaatggcttagcatatggtctatcctggagaatgttccatgtgaacttaagaagaatgtgtatctcctattgttgaattaactcttctatatacatgtctgttaggtctagttgatttataacattgctcaagtcttttatatacttgatattctgtctagattgatagtttagggtacatgtgcacattgtgcaggttagttacatatgtatacatgtgccatgctgctgtgctgcacccactaactcgtcatctagcattaggtatatctcccaatgctatccctcccccatcctcccaccccacaacagtccccagagtgtgatgttccccttcctgtgtccatgtgatctcattgttcaattcccacctatgagtgagaatatgcggtgtttggttttttgttcttgcgatagtttactgagaatgatggtttccaatttcatccatgtccatacaaaggacatgaacgcatcattttttatgtctgcatagtattccatggtgtatatgtgtcacattttcttaatccagtctatcactgatggacatttgggttggttccaagtctttgctattgtgaatagtgccacaataaacatatgtgtgcatgtgtcttgatagcagtatgatttataatcctttgggtatatacccagtaatgagatggctgggtcaaatggtatttctagttctagatccctgaggaatcaccacactgtcttccacaatggttgaactagtttacagtcccaccaacagtgtaaaagcattcctatttctccacatcctctccagcacctgttgtttcctgactttttaatgatcgccattttaactggtgtgagatggtatctcattgtggtttcgatttgcatttctctgatggccagtgatgatgagcatttcttcttgtgtctgttggctgcataaatgtcttcttttgagaagtgtctgttcatatcctttgcccactttttgatggggttgattttttcttgtaaatttgtttaagttcttggtagattctggatattagcactttatcagatgggtagattgtaaaaattttctcccattctgtaggttgcctgttcactctgatggtagtttcttttgctatgcagaagctctttagtctaattagatcccatttgtcaattttggcttttgttgccatcgcttttggtgttttagtcatgaagcccttgcccatgcctgtggtcttaatggtattgcctaggtttccttctagggtttttaggttttacatctaacatttaagcctttaatccatcttgaattaacttttgtataaggtgtaaggaaggaatccagtttcagctttctacatatggctagccaattttcccagtaccatttattaaatagggaatcctttccccattgcttttttttgtcaggtttgtcaaagatcagatggttgtagatgtatggtattatttctgagggctctgttatgttccattggtctatatctctgttttggtatcagtaccgtgctgttttggttattgtagccttatagtatagtttgaagtcaggtagtgtgatgcctccagctttgttccttttgcttaggattgttttggcaatgagggctcttttttggttccatatgaactttaaagtagttttttccaattctgtgaagaaagtcattggtagcttgatggggatggcattgaatctataaattacctcgggcagcatggccattttgatgatattgattctttctatgtatgagcatggaatgttcttccatttgtttgtgtcctctttatttcgttgagcagtggtttgtagttaagtggtttgtagcttgagatcttataacttcactctcctgacatggattcactgcctcatgaactgggacaagagctatcagagacccatattctcaacaggtcatggtcaaggtagagccttgcttgcacaactgtggcttggtcagaagaaggggaccccaacctgttaaatgctgttgcacaggacttagcctcagcaacgggcagctgggataaggatgagaaatgctgaagtcctccttatcttgggaagaaagtcctatagttaggagctagggaagagggaactctgtgttctttactgcagcagtctggagtggggtctccacccgctctgagatgagaggagagggagcaagcggtcttggttcaaataccacaaacttgcctttttttttttttttttttttttttttactgagttttaataaatgttcttgaataaatgtgttcttatttactcttttgcccttaggaccatttcaagaaactctgaatagtttttgtttggtttttataatttttatcagtttcaccgtggaacaggacagcagagctccttaaactgtcatgctggaagtcaattccacaactatgtttttgaccaggcaaagcagagagtaagtgggttgtggttgaaagaagcaaagcagttaggtacccaggattatcatctttgaagttcttggtgtgcccttgaacaaaagagaacagttgggcaagccaggaggaaataaatgttattgcaatgaagttacttatcccattttttactttaatgtgtcccatgtgcattattagtgttaaataattcagtatgcatgtcctaaatactggtctggtgaatggtaatggctctatcacctgcaaaataaggccaataactgttctttttggcagacataacagtttcttaaacagtgtgacatggtgagcaaaacatcgaaataaaattacaactgaaaagatgctttccagtgctcctttgatttattagattaaagggaaagaagagatttattttcttctgagcaggatagaaacaaaaatgaccttttccctgagtatttacagtcctgaacattgactgaagtaatttcaccaacagagtgcatgcagttgtgccaaacggaaaacaagccaaaagttatatcaaagtcctgagttcagcatcttcacagcaaatcactgagaccctaaacaaagcagtacatcatccagaacatgtaactacaggcaacacatctttactaaacacttaaacagtgtatacagccacttgctgggatttaagagccaaggatgcagccctgacacatagactcttttaatgcagctaaagacacacatgcacaaacacagaaaaatagaataaggcttttcaagttgtcacgtgataacataaggataggatgggcagagcaatatttgagtcctcagaagttctttaaaagaagaggtaactacacttgaataaacaaaggatggggaacttcctttaaagggtgaggcatgtgctgggtataaaaaaggatttaaatatatggtagtaagagagaagccatagttggtagaaagaacttctggagaactagtcaaacaggagcaaatcaaagaaattgttcttgttcctgaaggaaataatattttctctgaattatctattttatttctagaaatgtgccaagtacagtgcttgagtaggggagagggtagttgaagcatttccatgtcagatctttacattcaagataatacagcaagaaataatgcagttcttttaaaaatttgtggaggtttaggtagaaagaaacaaaatgtggtacagagaaacttagtgacgtaaaataaacggcttctcaaatctccgtaaactgaatatagactctgccttagtttgcaattgagaaataatgtatttcagcaaataattgattatttatttatttgtttttattgcctgcagtatggactagctcagatcacactatgcttagagggtctttggattcaacatcctatgtttctgacttacttaaacatggtgttaacttagtcttttatgcataaaagcaaataggctccaattagatataaataacttttcctagaattaacttgaatttatcatcttgtttgttggtcttcaactcgtctttcttttaaagaaagaaaatagcaaatgaataaaggactgagtataaataataaatattaccaaaatgttttaaataacctatctccccatttattgtatttttctaactcttcatttaaggtgagcagtccaccagctactgatacatggctcatctaattttatttttgcatcactctgttaagctgtcttccttccaataatcattatggtataagtaacactcccagagaaatcaatttatcaatttttttgtactaaatagagaagcccatttacctccccggaatcataattggggctttgtttattttgctgtagtttgaactctataacagcccccttcttgtttttacctaagttgagtagcttgtctcctacaccctccagggaaggttggccagcctcgaggaatgtccctcaccagtagggaataattagaaccatttagaaatcagaagtacatttcagagcaactgggtgaatgtcattttcctaaagattgtttaaaggaggagacccttaagcccctgagggataaagtatcttattttctctccactaagaaagatgtaaagctacaaaagtcattcagatttgtaggagcataggtctgaaactgttatgcatgtcttaaacctcaagagatatctttgaataaatgaaattaatgacttgcactaaattcaatagatgagttgaactgaattggattgtattgaactaaattaaatttacttctctaggctgacagaatggctatcatgagagcagaatgaaggccagagtattccattcaccagataatcaaggccagaacttggaatgatcagggagtccaggccttcctggctattgaggacactgagattaagcgatttaccccaggacagatagcaaaatgggagcagagcagagattccacacatgataacaatacaggcaaataactgggctcacccatgttaagtatgtactgtgtgtcaggcacagctctaagtgctttcttgtactaccttatttattcctcctagcaaaacatcagggcagacccctctattatcctctttctcagaaaaagctactgaggcacaaagtaattaagtaacttgcctaagtggtacatccaggatttgaacccaggaagtaagatctcaagacatttatcatatccatttaaagacgtcacagtcctttgagaaagagagtttataacatagcacaaataagatttaaaacaaaacaaaataaaacatgttaaggaaattgagaaatagaaaaattttctccctctgaaaaacctgaaattataaattgtcctaatttcctgaactcaaacattttaaaataatcaagttttacaactctaagtttcctgaagttcaacctcagtagggtctgccagaccatatggtacagaattttgaaggcgcgtcaggattctaatttatgagaatactatataaactaaaggtttttgagataacacattatctcatatttatatttatgtatcctttatatttgaaaacacagctctataatgttgaaaatgttcagttagtatcttgagatttggagcccccagtcagtgatggacaccatgctacatcttcagctccagaatgaccaggaatcctaacactgtgttatttccctgtcttgtacacaaaaaggcccatctgtctctggatctgctgctcacatcagtgaggactgattgagtgcttccaatagccctgcacacagagaagcacttatcatcctatcagaatcagaaatacacaaatgattctgattattgactattctagtactgaagatctgcattccatagagttctgagcacatggaagtcatcctgtggatgggttaattagcagcccctactgactagaaactaaatagaaatcaggctatctggcctggctgtgagggcagggaggcaagggatgactcagaatcaataggtgttgatgggtgacgtgaggtgtgaggaacagggcagcttcaaggaaaacacccaactgtgacatgagcaattcagtggaaggcagtggtatttactgggctgtgtgaggagcaagacaggcaggggaaagagatagtgaaaacaaaagtaccatttgggacataaattttaaatgaatttgaaacatataactgaaaaaaaaaaaaacaagaaaacagataaacaatctggatgattcatatgctttaacgaccttcaaagatgaggatgtgaaattaggattgtgagaaaataatagagtgatgttaaattttctggtctaaaatttctaaaatctgttttctaccttctgaaaaattgaaccattacatgttattctcctgtcttctgatatcagttctatttttcgtcattcttcaaagattaaggagtttcctatccacatgtccgagtttttccagagctttgagatgccactcatctgtgtctgaatcagagactcatttaaagcagctagctgtttctgtcctctcttctcccacatattgaacttcatttttatagaaaaaaaaaaaagactattcaacaccttcctggacaattctccctgcttaagaaggtagaagtcaaacagaagacaggtactttagtgttgttatctgtgagtgttacagtagcagcaggctgatcatcccttgcttttcttcttgacctgaataaagatgaaaagtcagctttgtaggtgttagcatttttttttttccaggccacagctcactgtaaggtttaggttcctgttactcttttgtctttactcttaatattatgttcctttattttgtgcatggtatagctttcttagtaaaatctttttcaagcttttttctcagtattgctcaatttgtgtgtgtgatatcagttataaatgcttataattttactttattagtttaagaaaatcctcccattcattcactcatttattcaacaagtgtctgttcagtatgcactgaggcagtcactgtgaagcacagaaaaactaaccagacagagatttgagttcaagcataaattggctgggcacggtggatcatgcctgcaatcctagcacttgggaggctgaggcaggtggatcacttcagatcaggagttcaagaccagcctggccaacatggtgaaaccccatctctactaaaaatagaaaaattagccaggtatcatgtaatcccagctacttgggaggctgaggcctgagaattgcttgaacctgggaagcagaggttgcggtgagtggagattgcgccactgcactccagcctagggaacagagtaagactccgtctcaaaaaaaaaaaagaagaagaagaagaagaagaagaagaagaagaagaagaagaagaagaagaagaagaagaagaagaagaggaagaagaagaagaagaagaagaagaagaagaagaagaagaagaagaagaagaagaagaagaagaagaagaagaagaaagaagaagaagaaatcatgcacaaatcaatgtgccacaagagatacacaagtcttaggggaattcagacaagacaggtagcagaggcaggattggcaagatgagagtgtgtatcagagaaggaaagcttcatcgtgcggatgtcagtagacctgtgccttggatgatttagataagggaagagatgtatttgtgtgtacatggggtgtgtgtgtgtgtgtgtgtgtgtgtgtattgtggtggtcattgagaaagaaacagggtatttcagaagaaggaaagaaaggacacgttcaatttctttttcctttttctccatgatgcacttttcttgctacttctcatctactcttttatatgctcagatatttcacttattttgctactggaagaatctttttctgtttttctttttttttttttcttagacaaagtcttgctctgttgtccagggtggagtgcagtggtacaatctcagttcactgcaatctctgcctcccaggttcaagcgattctcctgcctcagcctcccaagtagctgggattacaggtgcacaccaccacgcccagctaatttttgtatttttagtagagacggggtttcgccatgttggccaggccggtctcaaactcctgacctcaggtgatccaccagcctcggtctcccaaacggctgggatttcaggcatgagccactgcacctgagtctttcatccaaggttattattctatctttcccacatgcctccctttctttccactgagttttcccaaatccctccttggttgcccactctttctctaccagcttacagaagtgaatactctttctgtctgatgaatttaggaagcagagatattgcatggatggttccttgtgagggaggcctgcaaaccatctctgtaactttcacattctatcttgagaggtgtgtcctaggacaaggagtgagcccaagattagaagtgaaaagacctgggctgtggttgcagtacgaagagcacatcattacataacctaagaaaagcatctaattctctgggcttcagtttattcctctatacagtgacagaattgaacatagtgatccccagtcccttccaatcccactaaacagaaggaaaacttgagccctgaaaattactataactgaggtcattcaaccatttgatattaccatcagcttcatgtctagtttactcttctcttgctattacttgaatatgtcccccaaagtttatgtgttggaaacttaatccccagtgcaacaatggtataaagtggggcctaatgggaagtgtctaggtcatgagggcagagaaccctcataaatggattaatattgttatattatgcattattgcaggaatggtgtttgttatcaaagtgagttcaatcccttcttgccccctctctctctccccccctcttccttttgtgtgtgcacgcgcatgtgctctcttgcctttccaccctcccccatgggataaggaagcacaaaggcccttgacagacatgggaccctcactcttggacttttcagcttccaaaactgtaacaaataaacctctgttctttttaaattacccagtctcagatattctgttataacaccacaaaagagattaagacaccttcccaacttaccattccacggatcctttactgctttgtcatttgtgattctaggaatcccacatgggtagtggaaattctgcttctcctaccagactctttcttctggcttgttatgattaagcggcagcaggagtaagctagaagacccagtgtctatttatggacagtttgccctctagaccctgctccaggaggagaaatagcagaggttcactgaactcatcagccatccacagtttcctagtctttaggtctgttagcaactgacatttcatctgtaccacgacagctagtggcaagactgtggagttaggaacacctcaaatttaagtgtatagctggtcctggctttccttatctaagtccaatatttacaaacaacaacagtcctgcaaattcgaggcagtgatggattttagattcctcaggtaattggatgttatttcctaaggcaagaagaaagcagagactgtatatcatcaattcattcgtgaattcaacaaatacttattgattgcctactgtgtgcgagacagtgctctatatgctggagatgcagcagagaacagaactgactgcaggaagaggtgatcagctctcatggactttatattctatagcagatgactgataatgaacacaaaaaataggtaataagatatataatatgctagatcaagtgttcaacctgcagctcacaggctgcatgaggcccaggatggctttgaatgcagcccaacacaaacttgtaaactttcttaaaacattatgagatttttttgtgattttttttttagctcaccagctattgttaatgttagtgtagtttacgtgtggcccaagacaattcctcttgttccaatgcaatccaagaaagccaaaagattgagcatccctatgctagatgatgatgtatgctactaaaaaagtaacgaaacaaagaaaggcaatagggaggatcagacatggtagatacactgtccaggaagcccatcagaaaaagaaccaattgagtaaagactatatatgttgaaggaccaaaccatgtgggtatccgagggatgacaaacaagcaagagcagtgactctgggacaggaacacatctgtttgtacaaggaacaacaaacaagttagtgacaggtgacaggaatggatgagtggacagggattagtgtaagataaggtcagagagtaacagagaaggttgcatgtaatgaggggccagtggacccctgtaaggacaccagttttctttcaggatgaggcaagaagcaattgaaaggatgtgatctgattaaagctttaagaaaattactgttgactaaaggaggtcaaaggagaaacaggaagatgatttaggagactattaaaataatccatttgagaggagttgatggatcacatacatgtggtaacagagaaggtgatgagaaggggtcggattctgggcatagtttgaaggttgtgacaacaagactactgacaagtctaattggggacatgagagaaaatagtgtcaaaattgttatagggttataaacctgaacaattgaaaaaaaaatggagctacagtttcccaggttgagaaaagaacacaggagaaacaaggcagggaggatgaagatcatgagataggcgtaaaactaggaaagacagctctttatacttttaaaaataattctatagcctaaagattgtgatttggatatgaatgtaatattaattatatttttgttttctgataccacctaggataaacttttgcccatcccttgcccttagaatactacactaaaaacttacacttaaagaaaactcggccgggtgtggtggctcatggctgtaatcccagcactttgagaggccgaggtgggtggatcacgaggtcaggagttcaagatcagcctggccaagatagtgaaaccccttctctacttaaaaaaaaaaaaaaaattagccggacgtggtggtgggtgcctgtaatcccagctactcgggaggctgagacagagaattgcctaaacccgggaggtgcaggaggtggaggatgcagtgagccgagatcatgccactgcactccagcctgggtgatagagcgaaattccgtctcaaaaaaaaaaagaaagaaaaactcaagagctcttgaagagttacattatacctcagtaatagctttaaaaaaccctcctaatagctaagcaagatccctacagctacagacttaagccacataccctagtatgtctagtgaagacgcaaagagaaccctccctcccctgatgataactactcatttgattgtcaacattctgcattgttcttccttgctttgtcctctcccagtgcttctactgaatcccttctctctctctcccctggggagaaacactgaatggaagtctctgttatctgaatcttgcatgaagggcatgattccttttattttaaagttgtattttatttttaattgacaaacaatcattatataaatgtatggggaacaatgtgaggcttcaatacatgtatacactgtggaattatcaaatcaagctaattaacatattcatcacctcaaatatttgccatttctttgtgatgagaacatttgattatttttttaaaatttgagacagggtctcaccctgtcatccaggctggagtgcagtgatgcgatcatggctcactgcaacctgaacctcctgggctcaagcgatactcctacctcagcctccctagtagctggtactaccagcgtgagccaccgtgcctggctaattattgcatttcttgtagagacagggttttgccatgttgcccagactggtctcgagcaatctgcccgcctcagcctcccaaagtgctaggattatagatgtgaaccaccgcgcctggctgaaaacattttaaattctcacttttagctattttgagacatgaaatcatgattccttttaaaacagagtttatagacctgatagggaaaatagactctatatgactcaggtatataagtctcttaaattctttatgccttggatgtttctcatctcaaaccaaaatgtggaggaaaggaaggaaggaggcgaggaaggataaaggaaaggagggagggaggaaagcaagggaagaggaacactacagttcttggagaagaggatgatagagggctaggcagatagactccagtatatcttcataaccataagacacccttcatttaataaatgtagaagttgagatttagaaaggtgacatgaccttcccaaagacagagtcaggatttggcaaggccaagaatggaacccaagatcctgggtgttaatcttagcagaagtgagccagccctcttcaccaggagggactttaaaagtgaggcagagaataatagcttccatataatagacaatggaaagctattgcacaccctggagtaggagttggaaatcatgtttctggagtgttctcttgaaggtaagtgtccaagacaaattggaaaagggagagacttgtaacagggaggagacagaatgcaggccattatggttagtcatgaggtatacaacactctcagccaggataaaactagaaatgaggaagaaagagtgtatccaagacacaatttcaaggaagaagtgatcagacttttgggtaatgagaattgagagcaagagacaagtgtaagaagaccccgactgtagtaaccatggaagctggttcactgtttcataagcttgttgtcactccgtgaatccattcatagagaaggctagagccatcccccctctatgcattaggaagatgacagttctgtcagcaaaatcagtaaggctccagctcattcccgtgtaagccaagaatatgcccgtgtaggtctgtcagtctgttttcagctctttctttccatcatgaaagtacaaaggaaaatgctcagaacatgctttaggcaaagcatattttatcctaaagttgagaaaggaaaagttcacctctctcaccaccaatgccaggatttggaaagcaccaaaaagtggataaaagaaaataagctacagcaagggctctgattctttagttatgagcaatttgtagtggcatgcatgttgcctgactgagcggttatcaggaggtaaatacaaaaggagattttattgaagtgctttggatgacaattttctcaaataaataaataactggaaaaacatcctgtcaaaagaaagggtgtttgtttatttttgtcctgaagatacagatcacgaaaggatgaggcagagaagaaacactaccttatggatatttttcttaaggaaaaaaaaaaatctttgctattaaaaatgaaagactcagggactttgatgcggtggcaaccagtttttgggtgacaaactccgatgttggagttaaggttgctatgcacacagctcttccttgagctgctgtctatataagcaccaaggtatccagaatgacaactgcaaggcaaaggaagtcattaagtcatatagaagtctgtcactgatacacagaacctcagctaggtatgggaaagcccctaaagaatacctggaatctagtagacacctaataaacaattaacccacttcccacactgctttcaactctagagatgcacaggactagggacttttagagacatcaatacaggccagatttctgttcctgagagctcttttaattcataatagctaccatttacagggtactttacagtttacaaaacactttggcattatcttatttggttccacaaaggaaaatagaggttattattttgtactgaagagaacactgaaggtcagggaggttaaatgacttgcccaaatgtatgcacttcataaataatgaaatagattctgatccaaagttgtcaaactttgaagcccaaaggtaggttatggaaatcactcagcagtgtctggcacatagaagctgctcaataagtggcagcacattattccctaacacacaataacttcactgaccacatattatccaaaacagcttgtcacgtggtttagcaatttttctttcaaaggatgaccatgttaggtgaataatttggtttatcatcacttgctatctgaaagtctctacaggacttctaattcctgataatttattaagctatgaagaaaaaccccaaatcactagtgttctcctggtatatcacaatgcatcttactctcatattctaatatttgttcaacctgtacggatataatattggtttacacctaaaaatatgaaagcaaagtggaaaagaagcagagatatactcagcatctactacaggtcagcaaatgtggtaagctcttttaaaacaacttttcaaagagctggccttgtagcctcttttcctggaagagagtgaggccagagaggttgtataatatgtccaaagtataattggtatgataatgagccaggatttgaacccagaaagtgtgtctagctccaggtctgccctatttcaactagagcacaatatctcttgattctagagattgctagagtgctatggagtgcaacttacaccaacaaattccagctctttcaaggacataatattatatcactgtatcaatacaattcgaagtgctagattcttccctgacttattttaaagtgtcatccaactacaaaagaccatcctgtccagcaacagaaagcagaattcatcagtattatccacagggaaacataacacattttcctcaaattttgatttataatgaatttcactaccatcctgacttaggagatgaaattctgtacctaaagcataaggttgcaacagtttcctttcctttttgtttttttgtctgagatggagtctcactctcttgcccaggctggagtgcagtggcatgatctcagctcactgcaaccttcgcctctctggccccggcgattctcctgcctcagcctcctgagtagctgagattacaggcaggcaccaccatgcccagataattttttgtatttttagtagagatggggcgtcaccatgttggccaggtgggtctggtactcctaacctcaagtgatccacctgccctggcctcccaaagtgctgggattacaggtgtgagccacgatgcccagcctcctcccactttaaagagccgtcatagagcccactatgtgcctgccactgccacttgctgtactcacattctctcattgatttctcacggtaaccctacaatgtagagactattattagtcccagtttgcagatgggcaaactgaggttcagccaggttgtgcaacatgctggctcacacagctctaagtgtgaaatcagacacaaactctgagtctggattcctttgttcgtttttgtatttctgtccacttgttttatgttgaaaattgcaatcataaccactgcaaagggagcgtgtccaagggtgatatatgttacctgggatttcagtggtaatctgttctaagtgtttgtataatattggtacaaaaatcctgcaagataattcagtgataacagattttgtcaaagaaagcgaaacaaaccaaggatctaaaatgcgccattgcaaaaaaggaaagaaaaaaatttttcaggtgctggataaattgaattgatgggcttaaaagggaaattaagaaaatattttaggtttccagcatgtaactttctagagaggaaaaaatgactaggatgaaaaaacaaaaacaaaaacaaaaaaaaaacaaagatgatccttcttgtctcagcatttggccaaagtatgtattgtttgcctatcgaacactgcttaccaatatatgtaaccgaaatttgcccacactcacaagcacagtaacaaaaaatcactttgaagtaacagtgaaatacaaaggctctagcttcttgcctttggggatattgccccactatcacattccccaataatatcagtcttcattcttaaaggatctctgaattacactggaaatttccggggtccacgtcatgtgtccataagtagtcttatcctactcactgatgtccactgcccatgtaacgtggaggtccccaaacgctggtaggacctggatcctgttggtgtctaggctcttgacaccatcacaagaaggaatgcaaggacaagtgggaaaatagtgaaagtacagacagttattgcaaagcaaaaagtacatagtcaagaaaggggagtgcaggtatactcaagagaggatcccatgcaaaggtttttggctctttatgggtttctttaaaaccaaggggtggaatatttataaagatttctggaaaaaggtgaagatttcttggaactgtggtgccacccacttttacaccaaatatgggtgttcctggaacggatatggtgctggtgggtgtgtgattgggtatgttaatgagcatataatgaggtcctaggtgaaacctaagtcaaatctagtatcacattgggtctagttgttcttggccaatgtgacccacatcctggttttcagggtcttatcagcctctagcttatgcaactatttcagcagtttcttttttgctggtcatttgaaactgctgcctggaattttctattctcccatgaccaccctgtattattcctgtctcacatgaagccacttcacatgacacctctccggtcccactgctgccatgtgaaagccacaggggtccaaaagccactgtttctcaaggtgcaactagtgccggcacccctttgtgaatgagctcactagttgagttgaggagggggagaaagcatcttttctcccctttggccccattcagccatccactcacagaagcctcttgccttggctgtgtctctgaaacctctgtgctccctccccctccttgctcctttcctcctttcctccttgggaatacatctctcaactcctgctgggagcccctcttgcagaatgctcaggcacaagtccaccaccttggagtggatagatacctttttagcttttactctttccccccaaccatccatcaaattaacattttcaaagagatgcctcagagccatcggctacacctactcatcaggtaggcccagacacctttaaatcatctgaatcccatacaccagtttgtagttcagggctcagcaatatttgctaagtgattaaactgtggagctcctttataattccctaaaataattctataattctcctttatgttgggttttctatccctttgctacaatgggtgagcatcactgtcacgcaaaatcgagcttatggaggtacatacaaatgataacatgatctcagtgaaacaattgaaataattccctttcaagaatggtcaagcaaattaaacagcaaagagcacatagaaaagaaatttgaaaaacggaaagcgaggcaggagtgaagaggttaaaatatttctccttggtcctgctatacttaacctaacttattggtacacagttactgggcttttgatatcattgacccttttttattctccttcagcttcattgcacagtgcttccaaaaaggacactccatttacctggaataaaaccccagtcttcggaactcttatagctcctcagcataaacaggagcagctgctaatttttatgagtcagattgaattccagaaaagcaaaagataaaatgactatccacttagaaactaacttttctttgtgtccaacttttcatcagtacactattattatcctgatagtagagccaaagcaagctctatcacattaaatatgtatgatatgtcccattcactagagaggttccccctaatgacaccgatgacataccagagatgcaaagatgtgtgtggcagtcagggcaaggattgctttgatttggaaagtgcagctgagaagtctggaagggtgaatattaaacacagaagctagatattccgtagttgtcctcagtgatttgttttgtaatctaaaacagaagtagacttctcctgtgaacctttttttcttgacctgctcttgagatggccaaactctaaccaggcctataacaattctagctaacactaactgggctcacaaagtgctggggccatgttttacacaatggtaggcaaagaaggggaagaatgcttccctctcccaagcttggtttttcctcttagagctagctggattgaaaatgtttccattcatatcaaagtctcaaacagaaatagaatggggtaggaagtaaatgctcctttattttcgttttgccttctaattgagccaacaaagcagaatgttgggaaaagagaccagaatcttgaaataacagagttacactaagaaccctgatttgaccattctacaatgtacatgtgcatcaaactatcatattgtaccccattatttgtcaattaaaaataaaatttaaatctgaaaaaatttaaagaataatggtagcaaactgtgggtacataaaaagctattggctacatacatggaggttaagaaacattctagctgacatcttcaactatcatttatcaagtacttagccatgtgttaggcacagtgctgagaactgtatgtgcatttacattacctcatttaatcctcacaacagctttattaggaagtcctatttttattctcattttacaggggagaaaactaaggttcagagaacacatagcttacaagtagcctaacaaagactaaaactctcatctgcctaaggctgaagcccacatcctccaccttacccccttgcctctaagtaacgcaagtgtcagagccttcaaactcctaggtcagccgttatctcatccccaccatatggcagtggagaaaacttcagacactcaagtttgatgactttagtcccttgcttaaaacctctcagggttccctattttcctccaggacaaagtccaaatttcccaatatggcttaataaaagccttcctgatttgactcctgctcacatatcagattcagttgtcacaaattcctcacccctctgctctacccatgatgactctgctacaattactaaaaaaaatgccaagatcttgcttacttgcaggtttgcttacccaaaatagtctcctcgctctcttctctgccctgatgacatgtttcattctgaatcaaacgcaggattaggattccccatagagccacctcctctcagaaagcttcaagtccccacaaggcccttttgctgggtttcaataacccacccttcacttatgtcatgcacatatcacaccaaattgcagtattccctcttgcccctagattgaggtccttgacagtaacatttatatcatattcatcattttagctccagcactttgcactataactggaccttcatcagtcagcaaaatgaatgaagacaccttggcactacagctgattcttactaatgatgcaacagagccagtagatcatgacagcatgatttctttacccttgtcatgatacaatagagcatgatttaagaagactgtctctagcagcatgtggcacctaggttcaaatcccagctccatcactaaaaaaattacctaaaataagccacatccaagagaaacttttccttacagtttcctcctcttctcacaaacagctccatatttgtttttaccctagcacttattccgaattaacaactattggtttacgagattacacagtctataaaaatcatgaccacactggccgtttttccatctttccacaaagctagaatagtgtctgctccatagaaggtgttcaataaacatgtgttgaatgaccttgaccttggtgtgagataatagtaagcatcacaaggacatgtttcacatctaaaaaatgctgtgttcggagtttgtgttccaaacatttccagaggtattaaggtagtgtgtccaaatgcgacaatctctctctgctccggtgcctccaggtggcctggttggatcctgtaaagggtcatacagtggccaagtccttctttctccccttcatcttgtatgccaggttttctccacataccactctaaggtttaagtgagccagctcctttccatgcacatcttgtccaccacaactgggctttcattggatcatgttctaagggcaggaatggggccaaacaaacttttcaaccaaatggtttaaaccaaattctagcattttggttttagcactgggcaatgattgctttttctgtatatcttcttacctttcaaaggatcctcatttcctcataccacattgattctaccacaaaggttgtatgatcattgtaacaatattcatctctgagcccagtaagcttttattgtcccctcccccaacaatttctgctttatttgaattctgggtgcctcagtttccctaaggcagagtgagagagaaaccatcccaacttctggcatcttcaatagtataaaagtactgtgattgttgctattgtctttactacactctccaaggtattttcacacatattgtcccttttgagtaccacagtaatgctacgagggttcttactctttttatttttcatagttgaggcaactaagattcagaaacagtagttcacttactcaaggttatatggctgtttagtattacagccagtctgaagatggaacttccagttaatgtgaaaaccttctcattcattctttttttctctgaagcacttccacaatggccaagactgtggtttataaacaaaggaaatcatggcaagctggttctgacatgttatgtaaaagcaatgcattgggagagtattgctttggtctagaatgaatgtgtgcatccacagaagctccccaggatgtagaggtgatcagcccccagtcaccatgttcagcatttggataatgctcagccctgtggtgtgaaagccagcaaaggctccctaagtgcaggtgattgtactggcgatgtggtgatgctggggtgccaaagttatttgtttgcacagtggtctctgtgtcatcctgtggtaacgaaggaggggagtaagatgatggattttctgggaagcaagtcttcagtgagagaggctgggagtataaccatcctgccaggtggagaaggagcatgctttgctggtgtgacctggaagctggaaaaatgagctcttgataaactgccacttctctaagccttgattattccatgttcttaatgggggtgacaaggctcacttgagacaactctgaagtctcttgaggatgacaggaggcaatgggcatgaaaacatttaaggagcttttcttataatcaatagagggggagagtttactgccaacatatctggcatctgtggggatctatgtacctgggtgccaagacctccccacaagtgtcctttttggcacagtttaaattcagaaaccactgtctacaaaagtcactgtcaaaatagaaaaccagatgctacgtctctaataggattattcaattcaattaaaactaattgtttagggggaaaataaaaaatgaagaaaatgttgttctcacgggttaaagtaaaagagaaaaatgcatttgggcaaaagaaaaaacaaaaacaaaaaagatttgaatggttttttatttaaatcttgtttcctaacctgctgagctaaccttagctctcttcttgactgtgcaaatgcacagcttcctagaacataaggtgagtatgtggctggattaacaattttcataaataatcatccttttaaattcctgcaccaaggatctaagaactcataggagcttagaatttagcttttttagggctcagcctctcacccctggtgcctaccacacttgcacagagctgcatacagccatctgccagagatttccaatccctgttttggcgatgagataagcaatgtgttaaaatggttcagccctgtctggcagaactagctctggggacttggagccccacatgtctggaggtgctgtgccatctgctcaaggtcactggtagtcaaggctggtagtgaagagtacccttaccacattgtctccatcttcacctctttagtcataacctctagagcgctgccctggctcccatcctgcctgttcctcatacatggtctattaagtggcccgttttctttcccttccacactcatggaggcttttcttttcccttccacattcatggaggcttttcttttccctccagttgcttcctcccacctgggcatttgggacttgtgtcaggaataaaagttctcaggactggatctctaatggcccattttgcactaatgtaactttcaaatacgcagcatggccagctcataaaaatatcttggtgcaacttaaaaacttaataaagcattgttcacaaaagtttataggggcaagatggtcttactgtctttgttacttagttaactattaggaaatttttctctccaaaataaaaattaaatagcagtcagcaatggttcaagtggttgcagggatcttcacatctaacactctctttaatatactcacaaagtgatctgctacttctgcttaaagacttcaaagacatgggtttctctacctatcaatgcatctttataggtttagcattttgttttgaaatttttaacatattaaaaaatgtacagcaaataacataataaccccaatgtacctaagacccagcttcaataattatcagtaaatggttaaacttgtttcatctaggtttaccaactttccccaaatcctcctctactgcattattttaaaacaagtcctagacattattgtttcatcataaatatttccgtgttctattgtgtgtgtattctattgtgtgtgttatatttgtgtattctactagggaaaaaaatggcatttcccttacacaacttcactgtcttataataatgcatatacattaccctgaagcactttggtcacacctagttgcagttttgtgaatggaaatgtaatagttaggctgggatttttctctttgctgagttttaggactccaattaaaggaagttcacatacataaccgaagcattaatttcgtattccataagaagtgacaccatgaggtgaaaaaaaatgtgtaagagatcctagttgctactctgcagcttggaagctgtgttaccttgagtaaattattttatttttcctcagttccctcttctataaattacgggcaatattgtcagccctacttccttcaccaagattttgtgagaatcccatgggatgatccacatggaatcactttgtaaagacaatgtactgtttgagagtaagaaataattactgaggggtgataaagatacattgcagaagcagagctcagtaggaaagtataaagaatatggagattttccctgccaactaagccattatggttcccagagccttctgtgaaaactcataatagacacttgctgaggagccgtggggagcaccagctgcagagctatgtcaagagaggccccgtcatatatgatctcaatcaataaacccgccgtccaggcaacaacggctccttccagcactgtgcagactgttcagacaaaagccaccaggaaaagtatatttttcaccttcttttgagacctgaacagaggaacaaatcactgctctttccccttagagagaagaaaaattgtctaataataatactttcctcggcccgctggagaaatgaagtgaccagctgagctgcaagtagatgattattcttttggcaaaaactataatcggtctgaattcaaagaccaaaagcattttaaaggcgaaaacacctggggagaagaatggacagtggattaaaacaaaaatttccctcacctgtttccctcacagggcaggccaaaaaagagctcaggaggcagaacagttactgggaaggaataaagtaatgcctggttatacaatggccctttgtctgtcaaagaaggggtctggggctgccattctctccaacatatagaacatggctctcatatgtcctaatggcttaataaggacaagatagtgacaactgaactaatccagacaaagacaagtccccagaggggtttctgcctccagtcaagccacatggccacaggccatacataaagcaggactccagttttccatttaaagaactgattccattaataaggttccatttgaagaaccttattaaccactgtgtgttaataagggtaggctagctgctgtaagaatcagtccccttaaattacagtagcatcatgtaacaaaaattaattttccttccaaaaaaatctctatttgtctgggtgactcttcgacccaattccattgccagagttctgaacagccccagcaggaacaagggggctggaaatgttgtccttggctgggcagctattccccagcagcaactccacaccatgggaggaattgcagcttgctgagtctgacaagagtgggaaattgtgaaaaattgactaacaggcatttataaggcacctactttttgcaaaatcctttaccagctgtcacagggaaacagaagaaataggatccttgatcctcaagaggctgaaaacatgatgagggtgacaaatatgtagtcaactaacaactagatgttgaaactccatcccttccttttccctgaactgtgccagttgatttacttttatggaatatcggtggatgtagtatccccacctagaaataaatgatttacaattcaagtgttcttcacataaagtcttactgaactttagtatgcagagacagtatattaagtagttaaaagagtcagcattagggccagacagcccatgtttaaatcttgagaccaccacttcccaggatttatctgctatgggcctcagtttttgtacttataaaatgtggatggagattgttcctacttcatggaatactgagaggattaaataagctaataaaggtaaaaacacttagtaccatgcttggcatataggaagcaccatgttaatgttggctgttgtcactgggtaatgacatattaaatatgaagggcataagcaacataaaaacatgagaattcctgcatgactcagtttacaaaatatcaacatgcaaaccctgctcccaaatgcactcttcttggcctcctcatgcaactgttctgaccctgcctctcaggtgctctcacattatctgacacctgcatagccccaactctcattctggatggcatttttcttactctttatctctagtcccatcaaaacagatttgtcttgatttcttagaagtggaaagaatttacccttttttacagaaggatatcttatccttttcctaatttaaaattttattttcacgttcctaatttagcagagttgcttcccatctccccatcataatggcataaaggaaaaagcaatttctgagatactggagaagatttttagaagatgtgatgttgaactatgcaggcttgtggtagatgcaggaaaagttccatggcaggtggctgcctctttatttgaccagctctcagtatgtctggtccacatagctaaaacaggagatgccctgtttcaccacactgtccccccagtccactcccctttctatgaacagaacaaccactatgtcctccatgcgcttgacctcaggggaggctctctcaccattcaactttgcccactacagtctatctctacattgtagtcagaattatctgtatgaaagagcataaatctggccatggcacctcctctctccccaacccagataaaacacttaaatgagacttcatctctcatggcatttctccacatttttcgatgggcataaaaggcagctcttcacaccaactcccctctcaagtgtctctttcctctgtcccccacccactctgctcctgcaacaccaagccgctcactcttcccagtctcatcaaagttcttaactttgcccttggcctagaacacactgctcatctttctggatagggaatttctgctcatccttttatgcacagccaaatatactcaaatttatctgtggagatctccaagatattccctgcataccttttcctgtctcattcccagaatcccaggcagatttgcttcctctgctctccccggtgaagacatctcctctgacattttaagcccagcaggcgtgcttaatgccatctgcttttctgaactatgagcaccaaaaaggcaggattttggtcctaactgtccctttgttcccttcatgacacatattaggttatatattttagagaatgaatatataaaggattctttaaagcctcgtacctaattagatatctaaaacttttgactcatttttaactatccctcaaacatatcctctcatccccattcattttcgttgcctccaggccacaattcacccctcctctcctgctcagtctaaatgttctcaaaagccaccctgcactaatgcaagtctctttattctccctttacaaacatgccttgttctgctttgcttccatttttgaaaactcccatgctcagtttttccatgagaggctcttggcaggagaattataggtgaaacaatcgagaactcagtgggccctcagccttctgcctagtttgcagccagatccaaaggtagcagaactctaagctgagcttggttggccagagtagggaaaaataaggagtgagaggggcaaaagacacgctagagacagagggcaaataaacccaggtatggatatgtatctgtattaggtcagggttctccagagaaaccaaagcaatagaatatacatataggaagagatgtattgtaagaaattagctcacatgatcatggaggctgagaagtctcacaatctacaatctgccagctggagacccaggaaagccagtagtgcagttccagtttgaatctgaagacctgagaagcaggggattcgatggtgtaaatctcagttaaaagttaagagaagaccagtgtctcagcttaagcaggcaggcaggaagcaaaagggatgaatttatcctcctcaacatttttgttctattcaggacctcgacagattagatgatgcccattcacgttagagaaggcaatctactgaacccactgagtccaatgttagtcttatccagaaacatcctcacagaaacacccagaaacaatgtttgcactgggcatctcttggttgacagaaaaccttcatgatcatactattgatgtgtccaggtaaggaatgtgtactcaaaatatatttcaatattcatttgaaagccatgggttgggaggagaaagagatctagcattagagtcaggaatactttgtccaaacttcatctctgctgttaagaaattgtgtgaatttgtgaaagtcaccaggtctctttcaacctcattttcctcacctataaaattgggaatagtagttcttactttgtagtgttatcaaaaggactacaacataagaatataaagcctaccaatagtttttgccaaggggtagattaccaataaaaggtaatggctattaatattaattttgtgattaaccattgttaatcagttttcattctataaccaaattgtttctctttaccatcatagatggattaattattttccagtaagtactcattaaacacctgtaatttttaagacacaagatgagtgaaatatagagcctgctttcctggggctaattataacagagtgaaacagccaggtcagcctagagtcacagtagtaagataagtgctataagataggtgtgtgcaagacagcatggtgatcttagcagagcctaagcaggtctgaggcacttgcccagaggagatcatatggaagacaaatttcaaaagaagagaggaaatccccatgagaactaggaaaaaaaggccatttcaaggagagggaacagcatgtaaaaaaaaagtggaactaagaataaaatagtgcaatcaagaaacagcaagtagcttaaggtgatcagaagacaggactaggggctaaagcaggagccagatcatacaggaattgttcataaatggcgaggagtttgaattttattctacaggtgataaggagtcattgaaaggtaatgatgaaatgtgattttcatttagaaagttgtctttagatattgtagaaaacaaattacaataatgctttccaacttattttttcacacaatggcacaagtaaattagtataataaaggtatggctcattatggtcagtaataggatgcttaaggcgagaggctgctccagaccccacagagctgcagagagctgagggacttgccatcttgcacatatgtagccttctcgcagaccaccattgtgaagcggtacaggggttaggaagctctggattagagggaaccacaaccatcaggcaagcaatgctttgaagacttaaccacactgaatttatttgtctggatgagtcctaaagagcaaaatgtaggtaacagccagtgacacagattcggtgtcaagaacattgctccatgctcatgagcctgcagtttggttgaatttaataagctgtctctttacatggtataaaagtaaagaacagaatagggtaaaatatgtctttcttctcgcttaattgatttcaatctgtacctctgaagaaaatccctgaatggcaggaaccatctccagccaaactgtaaaattattgaaggttattctggaatttaagcttttccctatcattgccttcccccatgcactcatatcctctatctgttggccaactgcaggagctctctttctctctctctctttttctttctttctatctctctctctccttcctccatcaaacttggctaccagagacatcgctgatatagtcactcactcctaggtataagtgtgcccttgcatatcttctccctgcagtgtttgcacttcaaatgtcatcttgttgttaagcattaaggcttgcctccttttaaaggtatttcaggcctgaggtctcaggaaggagagataggcaggtagagagtcttctcttcatactcctgacattgcacttgaaagttgtccctaatacctcttaaatattccctcctttggccttcctaataagctgctcagaaggcagagcagatagtcatatgcccattttacagaggagaaaactgagatccagagggattgagtgattttcttatgactgcccagtttgcttttgggagtaaggtctagcttgctgattgggagggatgaggagaaccctcaccttgccatgaaactcttgtctgagtcagtgttcttcaacttccatcaacttggaacatacagccagcctcacatggtggagagaggtcaaaacatccagatgcacctcttcctaaagctttgtttgtctgctcagtggccttgagtggggcagcttgcaggcagctggcagtagagcacggctcacaaagacagcactgctttgtcctgaaagactgaatgtatcaatgtggagactgggatgggcctttgggaaatgagagccaacagggcacattgatgagaatcagcttgcagagcctgatctttctgagaaagcagaaacttagttgtttttctcatttaaatcttttccatttatttttgcccagcctcacgactcttgaagtttaattgccaacctttgttttttaagcacaaaaggggaggggcctgactttctaaggcattaagaaacttaaagtaagcttccttggaaccctcaccttgcccttgaactgaagaaacaggtatccaggctcaggagaaactggtgaggcagcaggtggtggagaaaactaaggaggggagtttatcagtgcaacatgattgagatataccaatgcaagcagcactccccaagcacaccaaggcaaaggggagaaaactgccccttgttttcaacataggctccctttctcacttttcaaggctgttcctaatattcagataacctagattacactggtgaaaacacacttaaactttgtgatttgtgtttgtgtttgtttgaaaagtacaaagtgtgattggtctcagtacccactccctgccctcaccctgtccagaattgatggtatgagccccttcccccaaagttttgatatctacggatttctcaactcaaaagagttattttcgttgcctggatattcttacctttaattcacaagtctccattgccaagcccttctcattctctacatgccctcaaaagtttttagaagggtggtctcctctctgtcacaggtgagttctgtgcccgccccccctccccccatctctttcccaccccataccaagagggggcactggggctaagcagaactggtggaaatactgggctgggatggggctgactactcccttctctctctaccctgctgtattgaggatggcaatcagagatagagaagaaccaaaaaacaacacccagctgaagcaacttcggtcctctttacattcttgtcatcttccaatctctttctcatgccactctacatgccctttggaacacgatatctttctgcaaaccatttttcacttaatttcgcaagtcaacctgattctgtcaagaatacagcttgactagaatgcaaagaaaagactgaacaagaacattttcttaagcttttctttctatctaaaagaaaagccttgatggacataaaacagaaaggaaacagaatggctctccgaacaactttccatggtgaattgttttgaactctgaccgaacaaaggaaactcttcccccttcacaaagagttcgggttcagggggcctctctgtggcatcacctatttccacccaacacatagcaatcctccacctgtgctgaggaagtggcaatggctgaccagaaagtcaaggtgtgccttttaatctaatcagactgctgagaggctgaagaaaagcaacttgccagcttcaaggattacccgttttcttcccaaggccattgggcctggggtcagcatttcgcaaagattaaatctactctaatcttcctccaggtaagagtttgctagataatgacctttcctatactcttactggcatgattactgatactatcatctcccccaagcctttacaaactgaaattgcagtgataatagtgaattctttcaatgtctttttagaggataaaaaaaaaaaacatagcccacctagtcacaataatccatgacatttgagctttggggaaaaccaatggggcagcaaggcacactaaaagaaaaccaaacaaagcacctgttgtcctctattcacaatgcaataaaatgatctgtctttatcccaaatttcatccagggcatagatagagtcatgactgtagtctttcttatccctgaacatcatgagaggaaaaccctgacccttatgtaggttattccagtaaggccaagagaatcagatacactctttagagacttttcccctctctttcctgccatttttgccctcaatttaaaagatagggataggtcctcactgtaccaatgagccagccgttagaggcaggccatcggttctgtagggatgccatctcagaatgtgccctttgacatccttggatgtcagttattggctgccccctgcccctagatctgtgctgaggatcacaactatgcacaaggggttctgcaaggcaaattctgagttcttggcttggaagaagacaagcagaggaggcctctgtagttctacctgaaataggccttacgtttgtttctaaatcttgtcttatgactgactgtgttgtgagagatttgccagtgccactttttgatgtgagcctgagtttatttacaatcctttaatttctacagaagagaggatctttcaaattataagaggagccacaccagcatttctgtatcagtcccttcctagatatcctcaggggctcctatttccttccaagtaatgtccaaacctaggacgtttcttctcaatagagcaatactgctcccaaggaggcaaaaattgttttggggaggggaggagagataagacagttcttactccttttattataaagaacagatatacatacaatacataaacagatatacaatataactgtggtattaaattttcatgggggaaggcggggaagattagagaaaaaatgtctatctaaaaagtgccttagggaagcaataatgggagaaaaaaatcgagaaacactgagatagaataaaagcttttacaatccgatttcaaggatgcctttccatccttgatctcactctacctttatgccaaagaataacaaaccgtggcagaaatcctgaaaatcatggagattttggtagaaatatttacatgttggaattaaagaaacaaatctataatattttattatttcggatacaactcaataatagattatgtactatcccagattatacatcatcctagatttcaatgtccatgaagctaatccattcaaaaattgactttctatttactggactatgttaactctattaaagactatcactttactgaacttcagcactcactttcagagcacatcattctatttattgcccagtactggtccaccctagtgagcatttgactgcacttgtctgttctatgatctgcacctcctaacttaccaagtctcacatttttgtaaacaccatacgtcttgattttgacctcctggctgaactccaaccccatagtgtcttagttgtcttccaggctgtcacatgcctcttggccttcctcccttttatagatttagactcccttgatgaacttctgctttattgtctcatcagcattatcaaattttttgtatttctgtgctgcccccacaccttcccagcaaagtcccaaaggaggatgactatagatcattgccacagctcaacttcttctcctcatgcccaggtcactattcactgctggtagaaatgcacacatctgggcaaatagccagaaatataaaaaggtatgtataatcctggactatatgtggccctctgcactgcccatcatgcttagcttcccttgattagcttctttgttgattccctttgctattttgaatatctgtcccctccaaaactcatgctgaaatttaatccccaatgtggtagtattgagaagtagggcctttaaaaggtgactaggtcatgagggctctgatgggagcttcaatgggactgatgactttagaagaagaggaagagacacctgagctagcacactcagtcctattgccatataataccctgtgccaccttcggactctacagagtccccaccagcaagaaggccctcatcagatgtggccccttgaccttggacttctcagaccccataaatgtaagaagtaaatttcttttctttatagatttctgattccttcagattgtttatggatttttcagattcctgaaacctataaagaaaagtttcagatatttggttcagatattctgttataagcaacagacaatggacaaagacccccttcaactaggagctaaatccctactactctcctcatatgttattctgaaccatacccccacacttggagtaaatgttcttgccttctttgtaatttagaaaattgtgccctttgacataatctttctctcttcattttctgctttcttatcattagaattagctataatcgtacccttgtctatttaattttctctagtctcagtggacaagagtctttcagtcctgttcaagattagtgtctcttctaatctccttaaccccatctactcccagttctggagggactccaccctattatacttccctactctcctaacttgctctttctttcccagcctataaacatgtttgagtctctcacaactgggcaggaaataaagtttttctttgactttctctccctctagctaccctccaacatctcttccctggttcatccaaaatttttggaaggttattttacatttgctgtttttatttccttaacttttccacatctttcctcaatacagtgcaatcaaatgtcttccccaacaatgcacagaaattttttctaataaagtcaccaatgacctctcaatgattacaccattgcatatgtttcagtttttatcttattacatctctttgatgcacttgccatttttatcactaggcttttaaaaattctctacttcctttgatttcttaacacaacactttccagttctccttgaagctccctgatcattctttctcaatctccttccctggttttcttccctggtcccttcctttgggtcagctttcctcagtgcttctttcactataaatactctctcaatgtatcagttggaattgccttcaggtacaagtgatagaaacctagaataataatgatttagattgatagtgctacattcttcttacataacaaaaggcccggctgtagacagccagagctaactatttaaggatctgatcagggatctgggatctatccctctctctgctccacttttacttagtatttgtcttccatcttcacgaccacaggatgggtgctgcatgcatgcatctcatccaggtaggaagattgggtaagggttttgggagaaacacaaagactttctagtcttgagactttccttttttccagaatgaaaattcttttccaaggctttccataagaaatgtctcacatggccatctgagctgcaaggatgactgaacagttgagtattttattttatttaaattgaagaaatcaaaggagaaagtactgtgaatttctggagtttgactagctaatactcattatctacctctgggtataatcccaccttctttttggtaccagttcacacttacaagcaggaaagcaaaatgccaagagcatggatgctagagcaagcatgttcctagaactgaattatggcactaccaccttctatatagctatgcaactttacacaagtcatttcagtgctctgtgcttaggcctcctcatctagaaacttggaatgattatagtacctatgtaataggtttgttgtgaagattacatgagttaatacgtgtaaaagagcctgcaatggagtaagctctacgaaagtgagctattaccattattattattagtgctcacaaatatgcatttatagctcatttcccttccttagctttggatttatacagccaactgctcattatacattatattaatagcctagagatgccacaataaagtaccacaaactgggtggattaaaacaacagaaatgtattctctcacagttctggaggttagaacgctaaacttagggttagcatagattcctcctgacggttctaagggaacaacagttccatgcctctttcttagcttctggtgatggccagcaatctttggcattccatgttttacagacgcatcactccaatctcttccatttccatatggccgtctttctttgtgtctctgtgtcttcacatggcattcttttccctgtatgtctattttctatttttatatagacatcagtcatattggattagggcccaccctaatcaagtatgacataatcttaactttataatatttgcaaacaccctattttcaaataaggtcatgttcacaggtatgggagcttagaactgtattaatctgttctcacactgctaataaagacatacctgagactgggtaatttataaagaaaaagaggtttaatggacttacagttccacatggctggggaggcctcacgatcatggcggaagggaaaaggcatgtcttacatggcagcagcaagagagagaatgagagccaagcaaaagaggaaaccctttataaaaccaccagatctcatgagacctattcaatactgtgagaacagtatggggaaaccacccccatgattcaattatcttccactgggtctctcccacaacatgtgggaattgtgggagctgcaattcaagatgagatttgggtaggaacacatttaaaccatgtcaaagacttcaacatattttgggggaaaaatacaattcaccctaccacagacacccatcacagatctcacagaggtaccttacatatgatactggagatgtgtgattcttctttcttccacacttaccatattcaaatgaatcgccaagtcctgctagttctaatgtgtgtatgtgtgggatgtgtgtgtgtgtgtgtgtttgtgtgttgcagatatatatgtatacatacatacacttatataagtataatatatggataatataagtatatattatatataaagtatatataatataatatataatatataataatatataagtatacatattataaatatatattattataagtatataatataaatacatattattatataataatatatataagtatatatgggtaatatatggataatatatatagatatatgtacacatacacacacatacacacattattcccttttcttaatatgttctttctctgctacctcaggccttcctctccattcaagtagcaagatcaaatctctgtaacctggcatagagattctccaaaatctggtacctatctttcactgaagacaatatagtggctgccacctcccacagatagttcccttaactttaaatgtcttttttcattcctccctttcacatggtcaaattctatttacactttatgatttaatccaagcatcacttcttctaggaaactatctctatatcaccccattctatcctctaagattgaatcaagtgtccagccttcagtttttctatatctttacttatctctatcactaaatttatcatgtgcctttataattatttttatgcatgtttactccactagcctgtgaatccattaaggacagagaatacagcttgtttttctttgtattttagtacttgccagatttagcaaataaaaaaagtacacccaattacaaatttaaatttcaaaccaatcaggaatcatttttaatgtaagtatgccccattaaatatctgtgcacacttaaactaaaataaattatttgggataatctttattttatttcgtaaccctactagccatatagttgtcaaaacttgcatttctataaatgtttattggatgaatgaatgataatatagatatataatggtagataccaaatatttttaaaacttaataaaaatttgggcagagagtataaatttataagataaaaatccatgtgtgcaaataaaaagacttcaaatttttcttaaaactaaatttcttctctattatgaattaaatctaacaacaaaacactaacttagatcaatccagcagtttatcaattaaaatttaaaattaagtttaaaacttacttttctagtttccttctttcctttccccttcaggaccgatgttaaacttcagaaaccagtacctctcacagtgcaggggtgatctgcctcagaacttttttctctgtcctaacgttattctattccagcccttgctcagagatacattttccaagttggttcttcattcaggcaatgcacagccctccctcaggggtttgaaaatcttcacttcattccttcttagctctctagcacagtagttcatccaagataaattatgttctcctctcatccttgaatgagataattcatttcttgttctctgctgtggaaacctttcatcttggccttgcactgaaaaatacaaaagccaaaattgtgaagttccctagtgggctcaacagaataataaacatgacagaaaaaaggtcagtgaacttgaagatgtatcactagaaattctacaattctcatatctaatgaaagacatagacccacagattcacctacagcttagaaaatctcaaatgaaaaaaaattcaaagaaatctatgcccagtacaacacaatcaaactgatggaaactgaacagaaaaaaagaatttactgaaagcagaaaagcagaacattttatataagaaaacaataaagcaaatgaccatggattcctcatcagaaatcatgtgaattaggtcattcttgcattgctataaagcaataactgagactggataatttataaagaaaagagatttaattggctcatagttctgcaggctttacaagaggcacagtgctggctattgcttggcttctggggctggggagaccttgggaaacttataatcatggcagaaggtaaagtgggagtaggcatatcacatggccagagcaggagcaagaaagtggtgccacccacctttagacagtcagatctcatgagaacttactcactatcacaaggacagcactaaggggatggtgctaaaccattcataagaaattcaccagtgatccaggtacctcccaccaggccccatctccaatactggggattacaattcaacatgagattttggtaaggaaaaatacataaactatatcaccatggttgccagaaataaattgaacattttagtattagcagtagttgtaatattttactggagatattcatataccataaaattcactctttttaagtgaacaattaagtgattcttagtgcatttgctaggttttgcaaccatctctattatctaatcccaaaatattttcatcaccctgaaaagaaaccccatatcgttggcaatcaatgcctatttccttctccccctagccaatggcaaccagtaatttaccttttgtttctatatatttgcccattctgggcatttcatgtaaaataatcatatacaatatgttctattacctctgtttttcacttagcataatgtcttcaagtttcatctatgttatatcatttatcaggacttcattccttttaatggccaagtggtattccattgtatgaccgtactacattatgtttattcattcattcattgatgaatatttgggtgttttcaaattttgactattgtgaatgatgcttctatgaatatccatttttgtatggatgcatgtttttaatactcttgaataaatacatatgagtagtatttctggattatatgggaactcaatgtttaactttttgaggaactatcaaagtgtttgctaatgcagctacattaatttacatttctactaccaatgtgagagcattccaatttatcttcatcctcatcaacacttaatattgtctgtctttttaattacagtcatcctagtgaatgtaaagtggcatttcattgtgattattttatctgcatttccctaatgactaatgatattgagcatcttttcatatgtctattggctatttgtatatctttactggagaaatatattttcaaatcttcacccattttaaaactgggttgtccctttgttgttgggttgtaccagttcttcatatattcttgataaaagacctttctcagatacatgatttgcaaatattttattttgtgggttgtctttttgctttcttggtagtgtcttttgatgcacaaatatttttaattttgattaagtccaatgtatctactttttcttttgtttatgctttgggcatcatatttaagaaacaattgactaatccaaggtcacatatatttactttcatattttcttcaaaaagttttatagttttagctcttacaatttgatctttaatcaatttcgagttaatatttacaaacgatgtgaggtagggattcaatttccttcttctgaatgtgcctatttagttgtcccagcaccatttattcaaaagactattctttcccctattaaaatgtcatcacccttgtcaaaaatcagttacccataagtggatgggcttatttccggactctcaattctattccattgacttatatgtttgtctttgtgccactgctaccacatcttattactgtagctctgtagtgaattttgaaatcatgaagtatgagtcctcaactttgctctttttcaaaattattttgaccattatgggtttcttgcatatttttgtaaattttagaatcaacttctcaatttctgccaagaaaaataaaagcagctagcgttttgatagaaattgtattaaattctttctgggaatttgtccatttcatctaggttatctagtttgttggcatacaatactacatagtattcacataatcctttttgttctataagggataatatcccatcttttattcctgattttagtaatttgggtcttctctcttcatttcttagtcattctagctagttttatcaaagtgtccaataataatgattttttaaagaaccaccttttggttttattgattttttatattgtttttctattctctattttatttctcttctaatctttattgtttattgttatttcttctgtttctctaatttcttaaagtttaagttactgactggagatttttcttcttttttaacgtaggcatttgtagctatacattttcctcaaagcactgctctctctgaatcccataagtcaggatgttgtgtttttgtttccattcatggaacaacattttaaagttctaaatgaaaagatattttgactccaaattctatgtcctgtgaaaatagacttcaaaaatagaggtaaaataaggctttctcaaaataatgaaaactaataatttgttagctgggaaatcctgaagaaaaattttacaaaaaggaaacagaacataaataataaaggaaatgcaacagaaatggcaaaatgtctacaatatctgcgtaaagacagtaaactattcttctcccctcttaaattatttaaatatgtatttggcagttgaaagcaaaaagaataaccttatctgatgcaatttttaatgtttgcaaataaaatgcctatgacaattacaacatggagggaggagcttaatggtggtggcaaggtttctgtattaccattgaagtaataaaatattaattctaagtggattctaaaagtttaatccctagagcaactacttaaaaatttatttgaagatatgtagtcaaatacaatttgagagaaatatatttaaataatccaaaagaaggaagaaaggaggaaactaatgaaatatagagtaaacaaacaggaaacaaattagaaagcgatagacctaaatctaaagatattaataattatgtgtaaatgatctgaagacaccagttacaacaaagatattcaactatgtgctatgtaaaataaatccattttaaatataatgttttagaaagctttagccaggcacagtggctcatgcctataatcctagcaatttggaaggccaaggtggatggatcatctgaggtcaggagttcgagaccagcctggccaacatggtgaaactcggtctctactaaaaatatttaaaaattagccaggcgtggtggtgcacgcctgtaatcctagctgcttgggtggctgaggcgggaggatcgcttgaacccgggaggcagaggttgcagcgagctgcgatcgtaccaatgaactccagcctgggagacagagcaagactccgtctcaaaaaaaaaaaaaaaaagataaatataatgttttagaaaggctggaataaaaggatgaaaaaagagagactatgccatgccatgtaaacacaaatcaaaagatagctgtagtggctatattaatatcagataacacagacttcagagcaaggaaaaattaccatgaaaaaagagggacattgcagaatgacaaaaaggtcaagaagacaatgatttaaatgtgtatgcacctaacaacatttcttcgatatacatgaatcacaaactgatacaactgaaatgaggaatagacacatgtacacctctatttggacgttttaacactcctatctcagcaatcaaatgaacaagtagacaaagtcagtaaggatacagaagaatgaatcacattaccagccaactaaatctaattgatatttcccagttcatgttacaaagccggcattactctgatatcaaaattagacagaaatagtaaaacagaggaaaactatggacaaatattccttcatgaatatggatgaaaaatcactgaaatcttattagcaagattgaaggcaatccagcaacataaactaagaattattcacaatgatcaaatggggtttattccaagaatgcaagactgtgttgaaattcaaaaccaaagctgggtgtggtggctcatgcctgtaatccgagcactttgggagtctgaggcaggtggattagttaaggtcaggagttcgagaccagcctgcccaacatggtgaaaccccatctctactaaaaatagaaaaaatagctgcgcatggtggtgcgcatctgtaatcccagctatttgggaggctgaggcaggagaatcacttgaacccgggaggtgaaggttgcagtgagccgagatcacccactgcactccagcctgtgtgacagagggagactccgtctcaaaaatgaaaataaaaataaaataataaaataaagaaattcaaaagcaaacactataatttatacaatgtaattaaaagactaaagaaaaaagattaaatcaattaaagaagataaaacatttgaaaataatccaatatctattcttggttaaacattcagcagactagagatagaagcaaactttattagcttgataaagagcatttaccacaaacaccatacttaattgtgaaacataaaaagcaagaatgtccactttcacaacttctattcacatagtactagaagcctttgctagggtaataaggcaagaaagaaaaataaaaggcattcagattggaaacacaggaacaaaattgtctctgttcataaattacctgattgtctacatagaaaaaccacgcaatgggtctccaaaaaaacgctcttataactacaaagtgagtttaacaaattcataggatgcaaagtcaacatgtaaaaattctttttatttgtaatttagcagcgaacaattagaaaccaaaaataaaatctaacatcacttacagttgctcaaaaaattgaaatacttagttgtaaacctaataaaatagatacaggatctgtatcctgaaagctacaaaatgctgatgaaagaaatcaaataagacctaattaatggaaagccatactgtgttgtgttcataatcagaaaattcactatagttaattctcctcaaactgatctgtaggttaacataattacaaacaaaatccctgaaggattttttgtagatacagattagctgattctaaaatttatatgaaaaggtaaagggattaaaacagtcaaaataattttgacaaagaagaaccaaatcagagaactcatgttaaccaatttaaagacttactataaaactgcaataatcaagaaaacataacattggcaaaaagactcatagatctatccatttagcagaacagacccacaaaattatagctaattaatttttgacagaaatctaacgtaattcatcagcaaaaggatagtatttttaaacaaatagcactggagcatatgtttttaaaaaaattgttattggctgggcatgatggctcatgcctgtaatcccagcactttgggaggccaagttgggcagatcacttgaggtcaggagttgaagaccagactgggcaacatggtgagaccccatctctacaaaaaatatagccaggcatggtgacacacacctgtagtcccagctactaaagaggctgaggggaaaggatcacttgaacttgggaggtcaagactgcagagagccgtgatgatgctactgcactccagcctgagtgacagaacaagaccatgtctcaaaaatttttttttaatgttctaaacctcataccgtacacaaaaattctcccaaattgtatcataaatctaaatataaaacataaaagctataaaaaacttagacaaaaacactagagaaaatctccatgattttaggcaaagagttttaaaacatgacatcaaaaacacaatccattaaaaaaaaaatggtaagttggacttcatcgaaatgtaaaacttttgttctatgtaagctactatcaagagaatgaaggacaaactacagatagggagataatatttgtaaaccctatgtctaaaaaaggacttctatctagtatatatagagaattctcaaaactccagaaagaaaacaagaaaaaaaatttttttaatcatgggaaagaatcagtcacttcaccaaaaaaaatataagaatgacaaataagcacaacaaaacatgctcagcactaaggaaacaatgtagccattacgtaactaattaaaaccacagtgtgataaaactttatagctatcagaacagctcaaaacaaaactgactactgcatgctgacaaggatgtagagcacctggaactctcataaatacctcctgagaacccaatgtggtacagctgctctggaaaacaacttagcaactttttatgtagtcaaacatatttatcatgtgacccagtaatttcactactatatatttatcatgaaaaatgaaaagttctattcataagaaacctccacataagtgtttatagcagctctattcataatcatccccaaacaagaacaacccaaaggtacttcaacaggtgaataggtaaacaaactgtggtatattcatacagtggaatactactcagcagcaaaaaggaacaaactacttattgacctatacaactaaacagatgaatctcaagtgaactgaaagaagccagtctcacatgttatatactgtatgatagcatttatatgacattttagaaaagacaaagttatagtaacagagaacagattggtcattactagcagttaaaagtggagggacagtgtttcctcaaaatgtcagtccaagggagttttgtggtgatggagctgttccatatcccgattgtggtggttacatgaatctatgcacatgttcaaactcatagaattttacacacacacatgcacacacacacacacacacacacacacactcgattttactgtatgttagttaaaaaagaaaaaacttgctttgtttcactgtagtgagaactaaaagcaagatcatgtgataaacaaccctggaaaatgcctgtacatgatagggcttcaataaatgttagttcatttttcctggtctttttgccttttagccactggtaagtctttttcgagtggtcagcgtccctgctagctagaatgtacacgctttgcacacacagttcgggattagaaaagcctggtgcagactatgtaaatctgcatcatcactagcagtgactcagctctccactatcatttttcaggcttacattagtgcaaagaccccttttaacaggaatatttattttttagatcaatagctactgtcaaattaggaactgtcaaaaatcaagacacatatctcattcttagagtaacatgaaatatatcactgttttccagaaattggagacatactttctttgttaaatgcaaggttttgatcctattatatcattgttgcattgcagcctggatgagctgttgttttgttacacgcggttactctggagatgagcatttatagatttcagtattttttaatgaagagtctctgtgtttctgttggccaatgctatttatttttaccaagtaagtattataaaagccaaactgcctttcctctatttcaacatgtatgctatttattcaggacttgctctgttctaatagtatctaaagaagcagaatgtatccttgatattattttacgttcttctgatgcaaaacagttatttatcttgatttctggtaaaaatctctggttcatatttgaaagaaacaatgctgaaaagaaaatgctttcattccatccctacagaggaaattaaatttttcagggaatctttctccctgtcgaaatacatgttgttcttaaggaataggtgtagatataatccggttatcaccacgaagattaaataattaaataaatcattcctcaaactcatataaataaatattatattatattatattagaagtgaatttggatacacaattgcattctgagcactaagtcttcttcacttttctctgaatctattatagttttatgcataggttcttatttctaacagttcatttgaacgttcgacatttgcattttacacagtcagtaaaatataattactcaatgcatatgttttctgattaaatgtgtgaaacttttaaatagaatacagaaattagttttaagtgcattatgaaagacctaaatttatctttttggttcatggagtagtgatcagctttccttgtgacttcattctcagtgactgtcagtcagccagagttcatggactctaaaaggaagtttatccctagttaatcctcctatatctaagcagaagtagccccaaaccaacctttatgtgacagtcacctcacattattgcatcttgagctaaatattgtcaataaaattcacagttaaatcaggtggatattaactgagggcacctaaagaactgctttagaggcacaatgcgtttgtcattctgcctgaaactacagtgaatcattaaagtcgaattctgtttacccacactgacagagcaaaagtaagggcatcactgaattatcccaaccggggtgcagaatctagagtaacaaaagttcaattctgaattaattttataccagactgtctttctgaagaatttctggtaaaatttcttctttccccttcttggggcatctttgtgtttcctcaaagtcccagcacaacctcgcatgactgctgtctttttttaaattttcttacctggtcctactttttaaagaaacatctaagctccagaactgttttgttatcactcattctcctcgccctcattaaaactttaccagccctgggtcccattctcttatccctctgcaccacatacacacgcagacttgtgcgcatgggctttgggaccagacaggcttcagaactacatctgccactttctaactgtgtccttgatcaagtaaataaaccatgctcagctcagggccctcatctataagtggacacaagtatggatagttacctatttcacaagatgattttgaagattatattagatactgcaaatgaaatatttagcacagtgcctgatacagctagtgctaaatgccaccactgtcatcatcaccacacactctatactatagttattagactacacatatctctctctcaatataattaaaattggtagagaaggaaatgtgtctgtcttatcactgtttttttcctaagaaacttagataatgtgtgtcacgtagatgttcaataaataatttgaaaatgcataacaggatatattagtcctctcccacatctttcgccttcccttgctccctccctctgtctccatccatccatctaccacccaactatgcatatgtatgtaatttttaaaggactgtttcttttttacctctattactttatgcatgattgatcctgttttcattccaagtaattgcctcatgactatacatgcttttattttttcaaactatttctgattgcctatttctctggctagaacataagctaattagggcagatacttcgtcttttttatcatatgtcctcagggcctagcgcagtgtcagacatatgaataggaacacagtgaatatttgtcaaaagaacaagtgaatgctctctggctctttcaatatctgcttctgattcttcatcttggactcccctctctggctttcttgtttcccttccatccaatgctcttcttctttactgttatatacactaccctcatttatgtactgtgtacacctgaggtagaagagtcctttccaccctgatctggccccagttaccaaaaagcctaacctccattgaacaaagaagaggatctccaatggaaagtgtatatatcctgtttatttgtgttgttattccaatgccttgacctgtgactgaaaggagagagatatgggatagaagtagctttgtaaaaaaaaaaaaaaaaaaaaaaaaaaaaccctgcccacagggtccctcaactactgagcagagcaacttgctgctggctctttatgctattctactaaagcaggtgttctcagtattgaccacacgtgaaaatcacatgagtatcttttaaaataaggatgcctgggccaggcacgctgcctcacacctgtaatcccaccactttgggaggccaaggcaggcagatcacctgagatcaggagtttgagaccagcctggccaaccatggccaacacggtgaaactaagaaaattagccagacatgatggcgggcacctgtaatcccagctacctgggaggctgaggtgggagaatcacttgaacctggcatgtggagtttgcaatgagccaagattgcaccactgcactccagcctcggcaaaagagcaagacttcatctcaaaaacacaaattaaaaaataagaaataaaataaggatgcctgatagcacacccacctccaggagagaggctcaggcatttatagtatgaaaaatcttccgcaggtgattataaaatgaagccagatgtgagaatcactgagttctgaagcccactcggactgcagcttttcaggtaccagaaatctcaaagtcttaagttacaagacagaagaacaaatcagcaaggactctgactcactgacaacttatgccatttataaggtgtcacccatcactcaattatagctaattgtgattatgtgagagtgtagctcagggttgctacatcttttctgtcttgaagagaagccataaatctgcaattttagatgaactctcacaatgtaaagtgctggcacctattcaaatttctctataatgtagtatgggctgaaataaaagcatatcttgggctggattacattcatgggccaatcatttgtagtttttactttataacaactgctctcccatatcctaagaaaacctttctatatttttattattatactttaagttttagggtacatgtgcacaatgtgcaggttagttacatatgtatacatgtgccatgttggtgtgctgcacccattaactcgtcatttagcattaggtatatctcctaatgctatccctccccactccccccccccacaacaggccccagtgtgtgatgttcccctccctgtgtccatgtgttctcattgttcaattcccacctatgagcgagaacacgcggtgtttggttttttgtccttgggatagtttgctgagaatgatggtttccagctttatccatgtccctacaaaggacatgaactcatccttttttatggctgcatagtattccatggtgtatatgtgccacattttcttaatccagtctatcattgttggacatttgggttggttccaagtctttgctattgtgaatagtgccccaataaacatacgtgtgcatgtgtctttatagcagcatgatttatagtcctttgggtatatacccagtaatgggatggctgggtcaaatggtatttctagttctagatccctgaggaatcaccacaccacacctattccaaaattgaccacatagttggaagtaaagctctgcctaattgccctggccagaacttccaacactatgttgaatagtagtggtgagagagggcatcccttcgttgtgccagttttcaaagggaatgcttccagtttttgcccattcagtatgatattggctgtgggtttgtcatagatagctcttattattttgagatacgtcccatcaatacctaatttattgagagtttttagcatgaaggttgttgaattttgtcaaaggccttttctgcatctatcgagataatcatgtgggttttgtctttggttctgtttatatgctggattacatttattgatttgcatatattgaaccagccttgcatcccagggatgaagcccacttgatcatggtggataagctttttgatgtgctgctggattcagtttgccagtattttattgaggatttttgcatcaatgttcatcaaagatattggtctaaaattctctttttttgttgtgtctctaccaggctttggtatcaggatgatgctggcctcataaaatgagttagggaggattccgtctttttctattgattggaatagtttcagaaggaatggtaccagttcctccttgtacctctggtagaattcagctgtgaatccatctggtcctggactctttttggttggtaagctattgattattgccacaatttcagatcctgttattggtctattcagagattcaacttcttcctggtttagtcttgggagagtgtatgtgtccagaaatttatccatttcttctagattttctagtttatttgcatagaggtgtttgtagtattctctgatggtagtttgtatttctgtgggatcggtgatgatatcccctttatcattttttattgcgtctactgaattcttctctctttttttctttattagtcttgctagcggtctatcaattttgttgatcctttcagaaaaccagctcctggattcattaattttttgaaaggtttttttgtctctatttccttcagttctgctctgattttagttatttcttgccttctgctagcttttgaatgtgtttgctcttgcttttctagttcctttaattgtgatgttagggtgtcaactgtgaatctttcctactttctcttgtgggcatttagtgctataaatttccctctacacactgctttgaatgcgtcccagagattctggtatgttgtgtctttgttctcgttggtttcaaagaacatctttatttctgccttcatttcgttatgtacccagtagtcattcaggggcaggttgttcagtttccatgtagttgagcggttttgagtgagattcttaatgctgagttctagtttgattgcactgtggtctgagagatagtttgttacaatttctgttcttctacatttgctgaggagagctttacttccaagtatgtggtcaattttggaataggtgtggtgtggtgctgaaaaaaatgtatattctgttgatttggggtggagagttctgtagatgtctattaggtctgcttggtgcagagctgagttcaattcctgggtatcctttttgactttctgtctcgttgatctgtctaatgttgacagtgggatgttaaagtctcccattattaatgtgtgggagtctaagtctctttgtaggtcactcaggacttgctttatgcatctgggtgctcctgtattgggtgcatatatatttaggatagttagctcttcttgttgaattgatccctttaccattatgtaatggccttctttgtctcttttgatctttgttggtttgaagtctgttttatcagagactaggattgcaacccctgcctttttttgtttttcatttgcttggtagagcttcctccatccttttattttgagcctatgtgtgtctctgcacgtgagatgggtttcctgaatacagcacactgatgggtcttgactctttatccaatttgccagtctgtgtcttttaattggagcatttagtccatttacatttaaagttaatattgttatgtgtgaatttgatcctgtcattatgatgttagctggttattttgctcatcagttgatgcagtttcttcctagtctcgatggtctttacatttggcatgattttgcagtggctggtaccggttgttcctttccatgtttagcgcttccttcaggagctcttttagggcaggcctggtggtgacaaaatctctcagcatttgcttgtctgtaaagtattttatttctccttcacttatgaagcttagtttggctggatatgaaattctgggttgaaaattcttttctttaagaatgtggaatattggcccccactctcttctggcttgtagagtttctgccgagagatctgctgttagtctgatgggcttccctttgagggtaacccgacctttctctctggctgcccttaacattttttccttcatttcaactttggtgaatctgacaattatgtatcttggagttgctcttctcgaggagtatctttgtggcgttctctgtatttcctgaatctgaatgttggcctgccttgctcgattggggaagttctcctggataatatcctgcagagtgttttccaacttggttccattctccccgtcactttcaggtacaccaatcagacgtagatttggtgttttcacatagtcccatatttcttggaggctttgctcgtttctttttattcttttttctctaaacttccctcctcgcttcatttcattcatttcatcttccatcgctgataccctttcttccagttgatcgcatcggctcctgaggcttctgcattcttcacgtagttcttgagccttggttttcagctccatcagctcctttaagcacttctctgtattggttatctagttatacattcttctaaatttttttcaaagttttcaacttctttgcctttggtttgaacgtcctcccgtatctcggagtaatttgatcgtctgaagcattcttctctcagctcgtcaaattcattctccgtccagctttgttccgttgctggtgaggaactgcgttcctttggaggaggagagtcgctctgctttttagagtttccagtttttctgctctgttttttccccatctttgtggttttatctacttttggtctttgatgatggtgatgtacagatgggtttttgatgtggatgtcctttctgtttgttagttttccttctaacagacaggaccctcagctgcaggtctgttggagtacccggctgtgtgaggtgtcagtctgcccctgctggggggtgcctcccagttaggctgctcaggggtcagggacccacttgaggaggcagtctggctgttctcagatctccagctgcgtgctgggagaaccactgctctcttcaaagctcagatggaaatgcagaaatcacccatcttctgtgtcgctcacgctgggagctgtagactggagctgttcctattcggccatcttggctcctccgcctaactttaacttttaaacttgtgtgaaattcaaagaacacagaacccagtatcatttacacttgggccatcataaaaaggcagctttctcaaaaagaatattggctgtcttccagactgccagaaagctttctatggaatcttttaaaccgttctcctttaagccacaaagggaaattaaatttggccaagtgtgaatggactgcccaaagtatgaaatatttctaacagagacagagtttaagagaatcataaagcttcccaatttcagggaagaaaacataaattccacccaccccatttatcatgtaagaaacattaagtaacctgcagtatagtgacaaaaaaattttttttagtgtcatagtggtgaattatttaatctttacagaaatcattcaggcactttatggggaggtaaaggtactatctgacaagaatggtgtgatgatacttttaaatagctgtttaaaaacaaatgaattaatagtgagttaataaatgatgcttgggatatgccctggtgagaatttcaatcttgaaaattaattatgaaatatttcaagcatgaagtatagagaatattataataaatgcccataagacaccacttagctttgccaaatcttaacacttggtcataattgcttagttttgtttttttttaatataagatactttagatacaattatgtacttcttgtcacagaagtgactatactgattttggtgttgatcatctccagaattttttaagagatatatatgcatctttaatcctgttttaaaatttagtctttattactattcctgtttaatggtgaggccaacagatcaagagacaactaccattgaaaagataatttgttatactcacagaacccaagagaaaggaatcacaccctggggcaggaggaggaacacaaagaaacagtagggtcaatcagaaggcagagaaagtaagggggaaatgtggataaaactcttattgtctttccataggaacgggcagccagagaccaggtaaacagcttaagattggctagtttgaataacttctcggcaaactctgcagtgtagtggatgtccctagttgtcagatacctggacctaggtaattagagtaggggaataatggcccagagtgttaagaaccctgtaaaggagatggctgggagtatggactttggattagttggtttgcatatgaaaggtgcattcacagaccagttgtttgctgtctctgggcattagccaccaccactgggaggggcagtttcttcagggtcagcaaagccagaagatgtcaaagcatcaaaaatacacaataaaaagacatgaatacaaaacaacatactatattattttgcatgttgttaacctttataaaaatatcattctgttcatgtttacatacatcttatcaactttttggtttttgctctcaacattatactttggaaatttttccagctggttgcatgcagctcagtttactccttttttcattttaaaatttggcattgtgtaaatataccacagtgcattaattgtatttatgttcatacttgagggtacttaagttgtttccagttttttggtttagtaatgatgcttccgtaattaatgttttgtctgaccccaggtgtacatgtggcagagagaaggacatggaataactgggtccaagggcattttgtatcttctactttaatgaatattaacaaatgactcttgaaagcagttgtagcaaattatccttccatcaagactgtagaaaatatcctactgttccactgcctcaccagcatggatactgtgggattttcctttcaatgttcaccaatataatggtgaataaaggtgtcaaagtattgtttacacttcttgattactactgaagatgaacatcttcttttttttacatgtttattgatcgtttgcattttatcttctataaattgcctgttcatatcttttgccaatttttctactgggttgtttgtatttctcttattatttagcaaatttctttatatactttactggcatgtgttgcaaatatctttctccagtctaacgcttacacataaactacagttcagtttatgtatctttgttttacagaaattttaagtttagtgtacttaaatttattaatttttcaattttagtgcgggatttttgtgtgtttttttaaaaaagtcttctgaacagacattttatttaaaagttttaaagtcttaatttttcctatttatatctttagtaaaattggaattgagatttaatgtggtaataagcaaaggtcttaggttactccacaaggaaaatcaatagtcttagcatcctttattgattagtccatattgtccaccactgatttttgatgatacactgtcatttatcatattcctttgtttgtggtttatttccgtgctctttattttcttccattggtctatttttttaaatccctgtcgatatcataatattttaatcactctaactttagaaaaatcatatttcctggtatgccaatcccctcaatcttgatctacttctttaaaattgctttagcttttctttaaaacttgctcttccatataactattaatcagccagttaatttccacatacccatacaaaaacaaacaaaaaaacaactgtgctttagatgggttttgccttcaatttatatactgatgtggattaaactgattatcttcacaacattgaaacttaccacttataaatgtgcttatttctgtttgtttagggtttttattttttttcaattaagtatttgattacttctcctaaatcctggagcctgtttttttcttagactaatttcttgatatggtataacttttgtggtcactgtaattgatatagtttaaaataatatgggggggttatttttgtccactaatcatacacccagctatctaactagactttcttatcagctgtcatagtgatgtcgtagactggttacagagtaggctttgtgtgtgtgtgtaaacaatgatgttttctgtgggtaatgatagtttttcatcagtaattctgacatatctttttcattttctattcttattgcgtagtaattatgacgtatctttttctttctctattcttattgtgtaggccagggtatccagcacaatatcaaatagaggaggtaacagcatcattgtctcattccaattttaagcggaatgtgtctaaaatttctccattcagtatatttattttagtgtttaatcgaattaccccttatcagattaagaatttttttcttaaaaacttttattgtgatagatttccatttttatcaaatacattttctatgtttattaagaaaatcatgtggctttttctcttttaatttatttatatgaaaattttctttgaaagagttgtctaatatttagcaactcttgaattctgtgacacattcaagctgataataatgtattatttatttagactctgctaaatgcacattgtccctatattatttccttttattgtccctgtctacttttgttaccaatgttacactaaccacataaaaagggttggagagcattacttcttttactagctgatatggtttggctagtatggcagggacctggtgggaggtaattgaatcatgagggcaggtctttcccgtgctgttctcatgatagtgaataagtctcacgagatcggatggttttaaaaagaggagttcccctgcacaagctctctctttgcctgccaccatccatttaagatgtgacttgctcctccttgctttccaccatgattgtgaggcctcctcagccacatggaactgtaagtccattaaatctctttcttttgtaaattgcccagtctcagaaatgtctttatcagcagcatgaaagtggactaaaacagtaaatttgtaccagtagagtggggcattgctgaaaacacacctgaaaatgtggaagtgactttggaactgggtaacaggcagaggttggaaacaggcagaagacaggaaaatgtgggaaagtttggaacttcctaaagacttgttgaatggctttgacaaaaatgctgatagtgatatgaacaataacgtttagactgaggtggtctcagatggagatgaggaacttgttggtaactggaacaaaggtgactattgttatgttttagcaaaaagactggtggcattttgcccctgccctagagatttgtgggactttcaacttgagagatgatgtagggtatctggtggaagaaatttctaagcagcaaagcactcaagacttgacttgggtgctgttgaagacattcagttttataaaataatcagagccaaaagttcagaaaatttgcagcctgacaatgcaatagaaaagaaaatcccaatttctgaggaaatagtcaagctggctgcgtaaatttgcgtaagtaacaagcagctgaatgttaatacccaagacaacatggggaaatgtctccagggcacgttagagatcttcacagcagctgctctcatcacagacccagaggtctagaaggaaaaagtggtttcaagggccaggaacaaggtccccatactgtgtgcagcctagggacttagcgccctgtgttccagctgctccagctgtggctgaaaggagccaacatagagctcgggccatagcttcagagggtgcaagccccaagccttggcagcttccacatgatgttgagcacaaaagtcaagatacacaaaagtcaagaattgaggttcggaaacctccacctagatttcagaagatgtatggaaacacctggatgcccaggcagaagtctgctgcaggggagaggcccttgtggagagcctctgctagggcagtatggaagggaaatatgtggtgggaccctgacacagagtccttactggagcactgcccagtggagctgtgagaagacggccaccatcctccagaccccagaatggtagatccaccgacagtttgcaccatgtggctggaagacacatgggagggaggctgtaccctgcaaagccacaggggcagagctgcccaagatcatggaacccacctcttacattactgtgacctggatgtgagaaatggagtcaaaacagatcattttggagttttaaagatttgactgtcccactggatttcaaccctgcatcggttggccaaaattggccaaatttgttttggccactttctctcatttggaatggctgtatttacccaatacctctaccccattgtatctaggtagtaactaacatgcttttgattctacaggctcataggcagaaggggctggccttgtctcagatgagactctggattgtggatttttgagttaatattgaaatgagttaagacttttggtagactgtagggaaggcataattagttttcaaatgtaaggacatgagatttgggaggggccaggggcagaatgatatggtttggctctgtgtccccactcaactcttatcttgaattcccatgtgttatgggaaggacccagtgggaggtaattgaatcaagggggcgggtttttcccgtgctgttttcacgatagtgactaagtctcatgacatctgatgattttaaaaagatgagttcccctgcacaagctctctttctttgcctgctgccatccatgtagaacatgacttgctcctcgccttctgtcatgattgtgaggcctccccagccacgtggaactgtaagtccattaaacctctttcttttgtaatttgcccagtcttgagtatgtctttatcagcagtgtgaaaatggactaatacactagtctgtggtatagtttatataagattgggattttttgttcctttgaaggggtggaatttacttctaacatcacatggtactgaccttatttttttaggggacagctgttaaattaccaacacaatttgttaataattataggtctattcacttttctgtatcttcatgaatcaatttttgtaagcatatatttctgtaaaaattatccatgttttctgatttttcaaatctactgttagtctagctgtggtgtctcatgcctgtaatcccagcactttgagaaatagagacaggtggttcactccagccaaggagttgaagaccagcctgggcaatatggtaaaaccctgtctctcccaaaaaaacccaaacaaaaacaaaagtcagccagatgtggtggtgcatgcctgcagtctcagctgtttgagaggttgagggggcaggatcaattaagcccaggaagtcaaggctgcaataagccatgattatgccactgcactccagcctgggtgacagagcaagactgtctcaaaagaaaaaaaaaagtaatgttataaaattgtagagttctctaatttaaatatgttatatctgtagttaagtgccatctttcatgcctctaattgtttgggtgctttttttctctctcagtttttattctttgctgattataaacaaatattctttctagtcttaatccttccaaagaattagcttttgctgttgttgatcttgtttattgttatttttaatgaatttttattcttctctttattctttctttccactcttttaggtttcctctctcaaggcaaatttaaatcttgcaatgtgatattttattttaattttttataatttacaaataataattgtacatatttatggggagcatagtgatgtttcaatgcatcagaacagagtgatcagaacagagtgattagcatacccatcatctcaaacattttccatttatttgtgttgggaacgtcaatatccttctttatgatttgcaactatatattattgttaactatagtcatcctacagtgatatagaacactagagattattcttcctatctagctataattttgtatcctttaacaaatctctccttatccttctcgtccccatacccttcccagcctctagtatcctctgttatactttttacgtctatgagatcaactttttctagcttccatatattagtgataatatacagtgttcaactttctgttcctagcttgtttcatttaacatcatgtcctccaattccacccatgttgctgcaaatgacaggattttattctttggctaaggattttattctatggctaaatagtattccattatgtatatataccgcatttgctttatccatttatctgttggacaactaggttgattccataccttagctattggagtagtgctgcaataaaaacatggaagtgtagatgtctctttgatatagtaatttcctttcctttgggataaattctaagtagtaggattgctggatcatatgatagctccttttgatgaaccttcatactgatgaaacttcatactgttttttatagtgtctgtactagtttattttcccagcaacagtatttatgtgttcccttttctcttcatcctcaccaacatttgttattttgttgtccttttgaggatagccatcctaactggcgagacaatatcttgttgtggttttaatttgaattttcctgatgatcagggaacctgttttatgtatttgttgttttcttttgggaaatgtctgttcagatcatttgcttattttcttaatcaacttttttgttggtggtgatttgttgtttttttgctgttgagatgtttgagttaatcttctgtcaaatgggtagttggcaaatattttcttccattctataggttatcttttcattctgttttttgttttctttgctgtgaagaagctttttggtttgacataatcccatttgtttatttttccttttgtttcctgtgcttctgaagtcttactcataaaaccttttcccagaccaatgctctgaagcacttctacattttcttctagtagttttatcatttcaggtcttatatttaggtctctgagtcattttgtggtcatttctatatagaatgagaggtggaagtatagtttcactcttctgcctagggatctacaattttcccagcagaatttattgaagagactgtcctttccccagtgagtgttcttgacacctttgtcaaaaattagttgaatgtcaatacatggattattttctgggttctctagtctgttcttctggtctatgtttctattttcatgccaataccttgttgttttggttactatagctttgtagtatattttgaagtctgagaatgtgatgcatataattttgttctttttgcttagaatgctttggttattcagtatcttttgtggttccacaaaattttaagtttttttatttctataaagaatgtcattgccattttgatagggattgcattgaatctgtagattgctttgggtggtatagtcattttaacaatattaattattctgatccatgaacatgggatgtctttacatttgtatcttctttaatttcttttattagtgttctgtagtttcccttgtgaaggtctttcacatccttggttaaatttattcctgggtatttttttgtagctattgtaaatgaggttgccttcttgaattctctttcagccagcatgttgtttatgtattgaaatgctactgattttgtatattaatttatcccacaactttacttaattcatttatcagttctaagagtttgttggtagagtctttaggttcttctgtatataagatcatgtaatctgcaagtaggaacaatttgccttcctcttttccaatttggatgacctttatttctttctcttgcctaattgctctggctagagcttccagtataattatgaataaaagtggtaagagtgggcatccttgtcgtgttctagttctcagagggaaatgtgaaagcatccataagatgttaattgtgatgcaaaatattctaaactttattatattctcacttactttatttctaaaatgaaaatttatcaaatataatgcctttatctatatttctgatttaaaggaaatgtgcacataccttttgaatttgttaattagaactagatcaacaaggtcataatgaattgtcagaaggttggtggttaaaataagccttctataataagcagagtttacaatgttaagtggtaaatccagctttcttcagtaaacattcaaacaggtgtagttctctgtaataatcattttcagtgttgaaattataaatcgagtccatgaaaccattttagtaaaccttttgctactagtagaaagctccttacccatgttaccaataaactcaaagagaaacttaaccttataattgcaaaattgcaagttagtgtagattaaactttatctaatatgaaattataatgtctaccttagtgtttaccttctcaaacatttctatcaacagtctttcattttaccaatgtttcttattaaacaactttcaagtttcactttaagttctagcaaaaaatggaataaaaattattgggttcataattttctgtttccacaattctatttttcttttagtagtttattgtattggaagcttggctcattaatttttaatctaattttttgtttccttttctggtacaataatttaaatctacaaatttctgctagaggtagcaatttacctatatccaatgagtttgacatgttgtattttcattataggtcaatccaaataattcctaattataattgcgatgtcttctttgacccatgtatgacttaaaagggtgcttgtttgtttgtttgtttggttggttggttggtttgctttgcttttggttttgttctttccacatgggtctatgtgtattgggggagaagagttaattatatttattactgatttctaagtaatttaatagcatcatcatcaaagaaagtaattttttaatactaattttcttcgtaacctagttcttggtcaatatgtttttagtgttctttattgacttggtggggtttccagccattatgacaacccacttatatttccttcctgcaaatctcatattgaaatatccattgttggagatgtgacctagtgggaggtgactgtgtcacgggggcagatccctcatgagcagcttggtgccatccttgcagtaatgagtgaattcccactctattagttttcacaagagctgattgttgaaaagagcctagcatctcccttcccttcctcatccttcatccgttgccacgtgatgcctgtcctccttcccctactgccatgagtggaagatttctgaggccctcaccagaagcagatgctgatgccgtgtttcttgtacagcctgcagaactatgagtgaaataaactttttctttataaattacttagtttcaagtattcctttatagcaacacaaatgaactaaaacattcacctattcaatacaaaacactaatttcttcattcactattccttcttgtgttttgtgccttcctcctggattaaattttcttatcctttaaagatattctttttctagaagtttattcatagctaattaaatttgttcagaagtaattttattttatcctcacatttgaatgattttctacattatagaattttaaattggcagttattttctctaataattttgaagatatttttacaaggttttctaattattttttatttgaagatagtctatatttttccctccacttgcatttaaaatatcttctttaatggctctacagttttaatttataggtttctggaagtggatttgtgttttcctccctgggatttgttgagatctctgaatctgaggatttatatcttttataagttatgaaagatttctggatgttatttcattgtaatttaaattgccagttctccatattctatacttttctagaatgtgtatgagatgaaaatgtatctttacattccatcttccacatctcatctcatgtgccagtttcgtaccaaaatgtaaatcccttagcctccaagttcagaaactcccccagggttccttggttttagtttaccctcttagaattctggtttgcattcaccactgctcagggttccatctggtattcagctgctttactttgagcccctggggatttctcatatccttgcaagctctactatgcatttaaaataatatttgtaatgttttatagaagacttctgggtaatttttcgtgaaaatgtcttcagattatcttgtttataacatttcaggaaatagaggtcagtgaagattttaagcatcaaaaatatttaattatgttaataagtttgaactacttaatacagacatagtccttgaaaattttagaaaaacatgcacactactggggctgaatcaaaaaatgctttgtagttgacattattaaatagaagagttcgttattcaagacctcactctccatgcatctcgttaattaatattttactttaatgtttcaatttccttaaaacttttagagtgttgcgtagtttaaaacaattttattatcttcatttattggtttattttcatcattcttctgtcttgtgttaaataggaacaaaaggaacttgtatgtattaactaaggttaagtgagtacaattaaggtagggtgttgagctaactttgattaattttagatagatattctagaagtagataatctttgatcttaaattagatcaccttttatttaaatggcttaataaagacaatgcttttagtatgatctaatatttttgaggcttgggttcaaaactcatctactcttgacaatatttctgttatatatttgtgtattttggaatctttctcatcttaatccttgtaaagcatttattgctattacaacaactatagccctcaactgtttcctggcaatttcaaggtttctggtattgccttcccagcaagtatataaactgctccagggcagcaacagcacacagggttctctctcatgattcatcaccacagggttggtacacctagcagccaagcacaaacaaggtgaaagaaaagacctgattgcctgagtagcagctctatctgaaacagaaatttcactaacaccaatatataacagaaggctaaagcaataaaatatttatgaaactatccaagtccatggtgtttgattacaattcctgctcacagactgccttgtaaaaggacgtgttaaagatgaaagaaaaccaaatccctattaatcagttacaaagctagaaaaagccagagagaagaaggctggggaaagaataatattcttattataaacattttcaaagggtcacttgtaacttcaacctcaaacctagaattttcagagggctcaataagccatttaattcagtcattcaaatatttattgactacctatcatgttaagcactgttctaggcatttggtatacaatcataacaaatcaggcaaacatttttgccctcatggaacttgaattctagttaggaggaagaaacaaacaaatggatacacaaatagataaatgaagatataacatgtcagaattgctatgaagaaaaattaaagcagcaggaaagagggtctgggccaagtttgggagattatcattttaaatagatggttagcgaaagcttcactgaaatggtaacatttgagcaaatgggggtctgagataacaagccatgaggatatctgagagagaaatgttccaaacagagagaaccgcaaatgtggaaacattaagccagaaggaacctggcttgtccgaggaatttttagaggataccacggcaagaccaggatgatcaaagggtagttgtcaaaactgagaatacagggtctatggaaataaagaagagaaagctcttgtagggcactgaaggcctttgtaaacaactttgatttttcccctagtgagatgaggagccattggaaggaattttgaggcaagcgtgagacaattatttcgagcagaagaaaacggcaaaagctgaagtcagctgaggttaagagaagactttttttagatgagatgagagacattatggcatgcttttatatcagtaagcagaatccaggaaagaaggggaaaaaggtgaatgaaatgtgtctaagaaagtggaaaactgtcatagtggttactgggactagcagagagggaaacagacctagtgtatattggagaagctattcttaggaccctggagagttcactcacagtaccaggagagaaggcaatgtgtataaagcacaggtacaggcaggttgatcaggcagtgagccctgagagggtataaggacattttcttctattggtttcattttcatcttggaatagaaggcaaggtcagctgagaatgacaataaaggaagaggtaatgggggttggagtagaggaagagaacaggcctcacacagggctgcagaaggcaacatacggtagtgggaacaagcaaggttcatattccatctctgtcatgtatcagccatgtgaccctgggtaaattttttgttctccctaaactctagtttccttatgcaaaatggaaagactaatagtttcagtatcactagttgtagacaggatgaaaagagagaatgtaaaagcaatttcaacattactttatggcaagcacttagtatatggtaactgtttgctgatatgaatacattagcaactcaattacttattaatggataggttgtgatattttatttctactctctttgcaggaggtttgtcctcaccaagcttcgagtcatccaaaaaggtgcattttcaggatttggggacctggagaaaatgtatgtacctagcactgctgtgagtgaatgcctcaagggggctatagggagcaacctcagaccacatctagtatgactatctgcacttagtagccgaactgacatggtcagccaaactttctgcatctcctcacattttactgtgttaccatggttcctaaatgatagtgtggagtctttcactgaggccattgaaatgagcaaaagagcaatccaagcaattttcatcatttctcaaataaggggttgctcccagagtaccggtgaatggaattttcataaaccaaagcctcttcttttctgcagacatccactctctttcagagatactttctaccatttatgattaatttttaattgacagcaggacttaacatctatgctgtagagattctctagacttcttgtttccaaagtattcatgcaggcaagtagtaattgatatataagcatttcaaagtactaggaaagtttacagcactgattaagatttcctttgaaaagagaagcctcttttgttactgcaaacattcagttcacattgcgctagtctaatttagagttttcccaagacatggttttctcaaagtggggtgcaatagtaaaagagcaaatcctcctatacttaaagtaatcctccctccctttgaaagctcttggtatcacctcctgggcattcagggccagggaaatatgttcttctctgcagtgagacagccaggattcaggactttaatgccagtaagtatagcaatgaatagacagagtatatacagaagggaatgaaagcaaggcaagaaagaaaacctttagttcatgtgtttctttcttgaagtcattaactttatctttttggttcttttatatccctttaagaatagtacttcctgaagtctgaagaagcaagaaaggaatccaataacaaaagaatcacaaagtatagaagatgtcattatgttccagcaattaagccacctgcttaaaagagggtggtcagaatcctggtttcagtgctagttttaatataaaattactgcataacctcgattaaagcattttatctttcagggccctggtttcctcatctgtgtattaagagaggagttttaaaaaggggcttacgtgatttccaatttctatctccatgttgcaggagagcccgatttaagacctgtaatcttccgggtttacctcattgaggacattcaactatcacagggattagaagatggggatactaaagctgaacagagttcacaaaggaaaccagggagacagtagagtgggagagctttatgctcaagatgtattcgcgattcccttgcctggagctaacatagactaaatgactactggatatccctgtgtccctaaacatcactataattacatagaattctaaagacaggcatttcagatgtcacaaataagctactttaatcaagtttaatccagcaagtgtgaatgacccctcattgggtattcagtatcaggcaaaccttcctgtggcaatacgaatggttgagctgagctgacatatcaacaatccaagaaccacagcagctggctcagtaactcaacttgttcagacacagcttgtacatttttacctcatgtcttcattaatcatcctgaactggcacagcgatacaccaaaataaaattgatcttgtttttttaccctttttataccataaggcttcaaagcattttctagcagagggcccagcactgaactgaacctgaggagacttgcgtattcctcagtctccgtgctcacctttgtccattgtcttaccttacactcttggtcaccaagaaattctcatctcctttccagacctatctccttcacttgtgttcttccagttgttaatcagtttcctgaacttaataaatattggccttttcttcagtatctccccctccacaaatcacaaagtccttttcattcattctgcacatgtgaccaactttcacctatccatgttggaaagaataaaagaaaagtattctgtataaattccaccttcctattctgctcccttcttctctcttccccatcaagaccactgtgttgaaagagttgcctacattcactgcctctctatcctttcttttcaatcgcttcttagcctgcccacttgctatttggacaaaaattcttcaacactattaaattattctatcaaagatctcaaaaataccacagttacaagatccagtgaattctactttatcctcttctacttaccttatatgtagtctttaaatttcattaaccattaatgtcattcttctcaatgccctttccccacttaacttctgggataccacactctcctgcctccctattaacctcccagattgctccatatccagttctcttcatctctcttgttcttcaactgcccttcaaaaatttaggtattctagggttctattttttggccattttcttttcttctagctccacccttgaatgaccagttgtcagataatgtcttattaccagggttcctaaactttcatctgcaacctccacctctctcctgaggccataattcttgttttgaattggaaagatgcctaaacatctacatctgagtgaactgcaaatacctggaattcaacatattcagaactagcttatctttatttttaaatttctcgtattcccatattgcccagtgaatcatgtcaccatctgcccaggttcccaaacaaggaaaatccagtctcccttgactcaggtgcattctctatcccttatgccaaggtgctcctccagtcctactgactgcctctcagatgtactctgatatccagtcctcttctcattcctgttactattagacccaaagtctcatcatcacttacataacctactgtatgaagcttccatgcctatcccagctccaatcttcctgccactctgctgccagacttgcactgtttaaattctcttgcagaagaacttctagggatcttcctcgctgcagacttaagtcataagctcctggcacagaaatcaaaaccctttatttcccaccatatgcactgtgtaccttacactctcaccaggtggaataattttctattccccaagcactattattaccagacatcatattgcatatttagaatgtgacagcttgttctttggacaatgtctggcacataaagggatcaaaaataattgcaggggaatgaatcaacaaataaacaaatgaacaaaatatactttcacactgttcttatgtagatgctgtccctctgtctaaaatttcacttcataaaatcctgcttcccattcagggaccagatgaaatgcttacttttctacagaacttttccagaactttccaagttcttccaaaccataaccctgtattcataatattaacagcacatttatcagactgtactcagaatttacagtttctcagatcccttggttattcattaaagccaagatcacaatgtagaaacgtcgtactgaagtacaacaccaagtcctgttgtttttacctcgttacacgtctaacctatccacccatctctttctccagctaccacaatctttccctggtatcttagtccgtttgtgctgctataacaaaatactgcagactagataatttacaaggaacagaaatttattttcttacagttatggagacttgaaactccaaaatcaagtctccagcatctggtgagggctttctagctgagtcctcacatggtggaaggtggaagggcaaaaggggacaaacatgtccctacgtggcagaagaggagaagagagagaacccactcccaaaagccctttttaatggcaacactaatctcttcatggggatgggcccttgtggtgtgggccctaaaccactctcaaaaggccacatttcccaatgttggagtggagattgagttttaacaggaaatttggggaggaaaaaatatttaaaccagagcacttgtgtaactgcaacagccttcaacttgtgctgtccccatttaccagcatgctcttccctctccctcatccattttcaacatagagtaatattttctaaattcataactgattatgtcatcttccatatttgccccaccatgcatgtgcaaacacacacacacacacacacacacaaactcttcatgccttaccactttttttgttcttgttccacagttttttcttttttattattttttaattgacacataattgtgcatatttataataattgtaacacataataactgtaaaataattgagtatagtgtactattttgatacatatatacattgggtaatgatcaaatcagggtaattaacatatctcacacctcatatatttatcatttctttgttttggaaacattcaaaatctgctcttctacatatttgaaaatacacagcaaattgttgttaattatagttgccctacagtgctatagaacagtagaacttattcctcctattttgctgtacttttatatctattaaccaatcttttggtatcctctctcccacatagacttccctgcctccaataaccactattctactctctgcttctttgaagtcagacttttttagcttccacatatgagtgagaacatgcagtatttccctttctgtgcctaacttatttcacttaacataatatcctccaagattatctatgttgctgtgaatgatagaattttgctccctttcatcactaaatagtattccattgtgagtgtgtgtcacatacatatatatatatatatagcattttctttattcatttctttatttgtgaacgtgtaagttggttctataccttggctatttatagtgctacaataaacatcagagtgcaaataggtctttgacatatttacagcactgatgaagatttcctttgaaaagagaagaatcctttgttactgcaaacactcagttcatattaagctggtttaatttagggtttttccaaaatatgattttctcaagccagggtacagtggcagaagacagagcaaatcctcccacacttaaattaatcctccctccctttgaaagctcttggtaccacctcctgggcatttagggcctctccttgcatttgaatacatacccattagtaaaattgctggatcatatggaagctctacatttagtttttagaggaatctcatactcatactattttaaataatggctgtactaacttctattcccaccaacagtgtagaggagttcccctatctctacatccttgccagtatttgtttatgtttttggttttgggtgggtttctgttgttttttttataatatccattttcactggggtaagatgagaccttatcatggtttgatttgcatttttctgataattagtgatgttgaacagttttttcatatgcctattgaccatttgtatgtcttcttttgagagatgtctatttgacccatatgatcatttttaaatttgattattaattttgctgttgagttgtttgaattccttgtatattctggatactaatcctttgatgagtagtttccaaatattttctcccattctgaaggttggctcttcactcggttgtttcctttgctctacagatgctttttaatttaacataatgccatttgtctgtttttccttttatttcctgtgcttttgaggtcttctccataaaaatcttcacacagatcaattttctgaagaatttcccaatgttttcttccagaagttttatatagtttcagatcttacattttagtctttaatccattttgagttgacttttgtatatggtgaaatatagatatccagtttccttttctgcatgtgaatatccagttgtcccagcacaactcattgaagagattttcctttccccaatgaacgttctcaatgtctttgttgaaaatcacttcactataaatatgtaggtttatttcttttctgtgccacctgcatatggtttggtttttatgaccatagcacgttgtttggattactatagctttgtagtatatttttaagtcctgtactgtgatgccttcagctttattctttttgctcagggttgctgaagatgtatattctgcagctgttggatgaaacgttctgtaaatgtctgctaagtccatttggtctgaattgcaatttaaatttaatgttcataatgttgattttctgtccagatgatctctccagtgctgacagtggggcattgaagtccccaactattactgtattagaggctatctcttcctttaggattaataacatttgctttatgcatctgagtgctccaggtttggagataaatatatatatataaatatattatatttatatttatatttatataaacatatatagttatatatgactatatataactatatagttatatatgaatatatagagttatatatagttatatataaatagttatatataaatagctatatatttttatatatagttatatataatatatataaatataaatatatagttatatatagttataaatatatagttatatatagttatatatattatagatatatgtatttttatatatctaaatatatatacatttagatatatagatatatatctaaatatgtatatttatatgtatatatgtatttatttttatatatctaaatatatatatatttagaatcatatcctcttcctgaattgatccctttatcattatataatgtccctttttgtctctttttacagtttttgacccatagtttcctttatctgatgtaatcatgatagctactcctggtcagttttgatttccttttgctcagaatcacttttatccatcccttcactttcagtttatatttgtctttacaggtgagaggtgtgcttcatatcagcagcatatacttagatgctcacagcagctatgggggcagggtcccaggcttatggtcttgcatacctgttatggcacctgggtcttgaggtgcaagtttgctctccttggcaggattagatgtaggtttcccatgaagccaagatttgtgactctgaggcaccccctagcagcttgggttcaaggtgccacgttgtagtggtgattatgcccctgaggagcaaggtacagtactaccttgatccctcagaagaaggggtaatctggaggtatgggcagggggagaaaggtatggatgcaatttgagaacctgagccaaatatacccagtggcatctcccaggagatgaggcactttgcagtagtgaccatagaccctggaatggtggggcttagcagcattctagactctttacagccatgtgtagcaacagcaagtatcccagaatggcaaagcacagctctagtttgggccgggggggagtgggtacatggatgactgcactccccagggagagaggtatctcagaagcccagaatagggaactagtccggctccagggaagcaaggtactagaggtatttggcatatagggtggagtatttcagttcagccacttctctcttgcctgggcggcaggatactataacagctcagccttggaatatgcagctgttcagcttggccagggcattgacttcccaggggcaatgtgccacttcagctcaggcctgtgggatgtgactgttctaggcagcccaagccccatttccctggaatgcagagtgtcacatcagcttaggtactggggtgtgtgaccaccctggctggtcaaggcatcatttcctgggatgcagggcacagtttcaacttaggcactggagaggcatgacttctctgagtggtcaaggtaatgttttcccaggatactgagtttttgtttttgtttttttttccttttgctaatacctaatgggatcatatggtagttgtatttgcagtgttttgaataacctttttatactgttttccatagtggctttactgtttatagtcccacgaacaatatgtaagggtacctttttctctgcatcctcaccggtatttttttcgtttaataaccatcccaaatggtgtgagatgatacctcattatggtttgatttgcatttctctgatgattagtgatgtggagcatttttccatatatgtgttggccatttatatgtcttcttttcagaaatatctgttcagatcacttgcttatattttaatcaaatttttttggtatttttttgtttgagtttcttatatattctggatattaatgccctgtcaaatgagtacttggcaaacatattctcccattctgtggttgtcttttcactatattgattgtttcattggctctgcagctttttggtttgatataatcccctttatttttgattttgtttcctgtgcttttgatgtcttattcatgaaatcttttccgaaaccaaagtcctcaagcacttcctccatgttttcttcttgcagttttatcatttttggacgtatatttaggaatttgatccatgttgagttgatttttgtatagaatgagaggtgaaagggggcatctgttaggttgatataaaagtaattgcagtttttgccattactttctaatagcaaaaatcacagttacctttgcaccagcctaatagtatcagtcttctacatgtggatatccagttttcccagcatcatttatgaaaccgtcctttctccagtgaatgttcttggcacctttgtcaaaaatcagttggctatagatacgtgcattaatttacggattctctattctgttccattggtctatttgtctgttttttttttcccccagtaccatgctgttttggttactataactttgtattatattttgaagtctggtagtttgatgctgccaactttgttcttttttgattaggcttactttggccatgcaggatgttttgtggttccgtacaaatttaaatttttttttctacttctgtgaatgacggcattgttgttggctgttttattttattattatttttttaatttttagagacaaggtcttagtcaggcaggagtgtgatcatggctcagttatggctcactgcagcctcaaactcctgggctcaagtaatcttcctaccttagcctcccaagtagctagtactacaggcatgtgccaccatactcagctatttttttattttcttgcatagatggggattatgttgcccaggctgctcttgaactcctggactcaagggatcattctgccccaatcacccaaagtgctggagttacaagtgtgggccactgtgcctagaactgcattggtattttgatagtaattgcattgaatctttagattgctttagttagtaaggtcattttaacaatactgattattcacatccatgagcttgggatgtttttccattggtttgtatccttttcaatttacctcattagtgttttgtggttttccctgtagaggcctttttccacttgagttaaatttattcatagggttttgttttgttttgtagtttttgtaaatggaatgggcttctttatttttttttcaggtagtttattgctagtggatagaaatgctactgatttttgttggttgattttgtatctttcaactttactgaatttgtttaacagttcttaaaggttttttttaggtggggaggagggtgttgaaacagagtcttgctctgtcaccaagctggagtgcagtggctcgatctctgctcactgcaacctctgcctcccggttccagcgattcccctgcctcagcctcccaagtagctgggactacaggcatgcaccaccatgcctggctaattttttgtattttagtagagacagggtttcaccatgttggccaggatgttctcaatctcctgacctcgtgatccacctgcctcagcctcccaatgtgctgggattacaggcatgagccactgcacctggccagtttttccatgtataatatgtcatttaaaaacagggacaatttgacttcctcttttcaaatttggatgcccttcatttcttcctcttgcccaattgctcttgtttgaactttcaatactatgttacataagagtggtgatggtgggaattattgtaacattccagttgttagagaaaaagctttcagcttttcctcaatccacatgatattagctgaaggtatgtcatatatggcctttattgagttgcggtactttccttctatacctaatttattgagagtttttatcatgaaagcatgttgaattttaccaaatgctttttctatattgacatggtcatatgaattttgtccttcattctgttgctttaatgtatcatgtttactaatttgcatatgttaaaacattcttgcatttctcagataaatcccacttaattctcatatattatttctttgatgtcttattggttttggattgctagtattttattatggattctgcaactatcttcatcagggatattggcctacgttttcttttttttgctatgtccttgtctggtatctgagcaatgctggcctatgagaatgagttagaaagagttccttctgcttcaattttcagaatcatttgagaagaattggtattaattatttttcaaaggttctgtagaattcagcagtgaagccatctggtcctgggcttttctttgttgggagattttcaattacctgttcaaacttgtcacttattattggtctattcagattttctatttattcttggttcaatcttggtgggttgtatttgtctaggactttatccaggttttcaaatttattggtgtatacttgttcatagcaatctttaatgatcctttgtatttttttagtaaacattgtaatgttactactactgctactgtcattgtgtatgtttttcatttctgattttatttatttggttattctcccattttttcttagtctagctaatggtttgttcatttggcttatcatttcagaaaagcaactttttatttcattgatctcttgtgttattattttagtgttaatttcatttatttctgctctgatatttattatttttgtcttctactaatttttggtttggtttgttcttccttttttagttccttgagttgcagtgttaattggtttatttgaggctgggaaatctttcttgttttttcatataggggtttactgatataaacttgcctcttaattctgcttttgctcatcccataggttttggtattttgtgttttcattttcatttaagaaagatttaaattttattcttaatttcctctttacccattgattattcagaaatgtgctgtttaatttccatgtagtgtatgctttcaaatgtttctcttgttattgatttctaggtttattccattatggtattatagggtacttgacataattttgatatttttaaaatttttttgagacttgtttattgtcctaacagaaacaatatggccaattctgaaaagtatttcatttgctgatgatgagaatttgtatcctgcagctggtggatgaaatgttctgtaagtgtctgtttggtctgtggtgcagtttaaatccaatgtttctttgttgattttcactctaaacaatctgtctaatgctgagagtagggtgttgaagtctccaactactaatgtattgcggtctatctctccctttaggtctaataatatttgctttttatatctgtgtgctctggtgttggatatatatatatatatatatatatatatatatatatatatattccaattgtaatgatttcttgctgaattgatccctttattattttataatgttaatttgtgtctctttttacatcttttaacttaagtctgtttttctgatgtaagtatagctattcctgctcactttagggttttgtttataaggattatcttttttcaatcctttcaatttcagtctatgtgtctttacaggtaaagtaagtttcttgtaggcagcatatatttgggtcttttaaaaaaatctatttcaccagtctatatgttttaaatgggaaatttaatctatttacattcaagattattattaataggtgaggacttactcttgcaattaattgttatctgcttgttttgtatatcctttgtttcttacttcctctcttatttttaattattgcaattaggtggttttctgtagtgataggcttgattcctttctctttgtcctttgtgtatcaagtctaacagtgagttttagagttttgcatgttgtcatgatgttggtttcagtctttttacttccagatgtaatactcctttaagcatttcttgtttggcaggtctagttgtgatcaattcccttatttttttcttgtccatgaaatgttatatttctccttcatttctgaaatgtagctttgctgggtatagtattcttgtctcgcagctttttcttttagtactttgaatatatcatcctattctcccctggcctgtaatgtttgtgctaagaaatctactcttcatccaatgtggattttttaatatgtgacttgaggcttttctcttcctgtttttagaagtttgcctttttctttgacttttgactatttgactgtaatgtgccttggaaagaacttttgggattgaccctatttgggttttttttttttttttttttttttttttttttgagcttcctggatctggatgttcatctctctcccaatacttgggaaattttcagctattattttattaaatatgctttctatgccttttcctttctcttctccttctgaaattcctataatatgaatatttatttggttaactatgcctcataaattttgtagactttcttcattattttttattatttatttattgtgcctgtgttctttcaaaagacctgtcttcaagttcaggtattttttcttctgcttggtcaatctgttgttgaagctctcagctggttccttttatattttattaattgattttttaagctgtaagatttctgtttggctctttttttgtgatatctctttgccacttttctcactcaagttatgagttgttttcctgatttgattaaattgtctatctgtattctcttgtatctcactgagtttccttaattattattttcaattctttttctggcattttatatatttctttataattagggtctgtgactggagagtcactgtgttcctttaaggtgtcatgtttccttgctttttcatctttgatgtatccctacattgatttttatgcatctggtcaaacagtcacctgttccaattttatgaagtaggttttataagaaaagacattcatttggatgagtcttggggtgttgttttggtgaggtgctttgacttttgttctaggtggatacaatagtgtagtatctgtgtcatttctttttctgtaatccatgctagtaatgtttgcgagtgtctcagcagcctaagctgagagagtctgcagttgttgtgctgtggctttactaggggtgggcttgctagactgtctgtcaggtcacaggtacatgtgtgcacacagtgcgttggccaactcagggtctggctcactggggttggggccatgtggctattactttgatcagaggcatgggtgcatggttgctccactggcttgaaagcatgtctacctggggctatctctcaggcccagatgtaggcacatagctacttggctggcctgggggtatgtctgcttggggtggcccacagggatgttttgcaggccttggacatggttggatggcctactggctgatgtgggttcgtgtgtcttctttgggtggattctggggctgtttcttagattcaggatgtgggtgcaaggttgcttagccagcttggaggcatgtctgccagcagcaacctgtgggctatttcttaggccaagacatgggcacacagctagtaggttggcctgggggcatacctcctggggtccacccacagagctacattcaaccctttttcatccccccagttgcacaggagataggtaacatcattagtgctatgttatagataagaaaacaggcttaaacagatcaaattctctgtccaaggtaacacaatgggtaagcaatagaaaaaagatattgcagaatgtacctcacttacatggaactagactaatctggggagatgctgagttcacacatctttattttcttctctctttagatctgtctctatgttgtacaagtgtttcaacttctctaatactaatctccctaatctggaaaatgttaatactaaggtctatgtcatagagttgtcaaggcccttaatactcaatctcagtatctgaaacaacatgggcatttgatgagtttatttcttactcccatcctcttgttaaaatgattgggaaaaattccccaacccttgctgatgattcttcctcatttattatcccagtttaacccagcctcctctacttctatcagaagtcaacagggaaaggactgttttttttcttttttttaagaaccaggaatagaagtttgtgcattagaaatgaaatggccactgttcatgccttagcttttatctgcatcactatctcaaacctccctattcttcattgctttgagactttgtggggggaaaaaagaaatcattaaactctctgcaacatgaagtggctttgcaaagtgcactgtaaactgtttacattgtctttaattacttcggagccatatgtcagcttggtataaagtgtgaagattacattgaatagggtggggggagtaggtgacaatgtggtgatttatggtaaccagaaaaattatgtatggaaatgagttcaatttaaaaacacatctatgtgttattataacactggaggtggggggaaagctagtttataacaaaatatctttggaaataggagcatgatgaatatgcaaatgagaccaatcaacatcagctgaaatatggtatatgcagatgaggcggcaataagccaaaatgtgaaatagctcccaaaccataaatatgaaccacataaaattcatttgaaatattcatgataacataaggacaaaaaatataatcaagtgatttatttgcatatagaaatgagaacactagtctgacactccagcctccacccccagatcactggggaaagaaaagttaacttaacagagggacttttagagaaagagatttattgaatgagaattgttgcaaacacattaaaaaagttgaggatcctcccaattctcagttcttcaggctcactcagcacagataaaaggaaaggaagtaaatcaggtaaccagaactgtaactgcaacagtgctagaaaatttgggttccactcagctttgcccttcagagcacccccttgttacatgacttaagttccttcctaacccaaccttctgtgattctgagagttaatggtcaaagcagccttgagtcccgcttactcaaagcgaaaaggagaggctgatgattctactggctcctggtgaaaaatgaaaggccagtgttagactggttagatctctgaatgggaagaggggatttgagtccctgggaataacaaggaaatgacgttgagtggttctcttcttagactgcactttagaatcccctggagaactttaaaaataatgtacacacccaagtatcacttccagatatttttattccatttttccaggacgaggtctaagcattaatcattttttaaagctcccttgatgattctaatgtacatctaaaattgaaagccactgaggtagatgatagtttagtcagaatccaatttgtacaaagaacattcatgagtatgtaaagtgtatcatctacatgttgtagctaaagaagaataaaacaaagaggaggttggcaggacataagatcaaagaggaagctgggagtgaggtcatattagtacctgatagaccatggggatgtatttgggtgtcatatttagtgtgattgggattaaatggggtgttttgagcaacaaagtgacataatctgatttgcatttgttaaaaattgtccatacacacaaattttgatttgctaatattttgtttaaaatgttttatctatatttgtagcaatattagtctgtatatttattttcttgtcgtttctttgtttgattttgttctacctgtattataaaatgagttgggaaatgttctctcatcatctatatcccaaaagtgtttgttttctagaattcaatacggaaagaatagtttttttccacaaatgatgctgaatcaactttgtatccatattggaaaaacaataaatcccaacccttacctcatgttatacacaaaatttaactttaagtggataattgacttaaacgcaaaaactaaaattttaaaactgttaggagaaaaatattttacaatcaggggataggcaaagattccttaagtagaacacattaagcataaaataaaagtgttattttggacttcattaaaagaaaaaacttctgcttttcaaaagacaataaaaaaagtaaaaaaagacaccatcaagaaaatgacaaccaaatcacataatgagagaaaatatctgcaatacatatatctgaaaaaggacttgtatcaagaacatatctttctatatataaagaagtaaaaaataagtagacacacaatctaatttaaaatgggcaaaatatctgaacagatacttcacaaaaaaagatacacgaatcggcaataagcatacgaaaagatgctcatcattagtcattagcaaaatgcaatttaaaaccataatgaaatactattacatacccattaaaatggccaaaattaaaagctgataatagtaggttactggtgaggctgtgaagcaactggaactctcctacatgtttggtgagaatttaaaattgtacaacctctttggtaaacagtttgtcagtttcttatattgacccaagagaaataaatacatatatttctacacagagactgcaagaatgttcataacagatttattcataatagccccaaacagaaaatcactcaaatgtccatcagcaggccaatgggtaaacaaatggtatgatatccacacaatttaatactaagcagtaataaaaaagaatacactgctaatatgtaaaacaacatggataaatctctcaaaagcattatagtaagcaaagaagccagacacagaaggtataccatatgattctatttatatgaacctcaaaaaagaagaaaatctaatctatggtaacagaaagattagttgcctggttcccagggtggtgttagggattgtctgggaaggcagacaaggaaacttttttaacgtggtgaagatattttatatcttgattgtggtagtagtaacaggtggaagagttaaaatgaatgcattttattatttgtcaaattatacttcaacaaagttgatttttaaaatcagcaattattccacacctattctgggacaggtgttttaaatactacatctcagttaactcacactgtatagacagggatactgacattcacaaaaggtaagaaaccaagcaacatcagagtatccttatgtggtgaagctaggatttaaacccaaggtagtctggtcctttctgctacacaaggcttcttttagttggaatctaccattttcccacatgttcctgctaaggtaaaagagggattgacaggaaaattaaagctattagcttcctttggtgacatttattatcagaggagaggatgtctgtgcctaagcccttggaactgccacaaaccagaacctagagtgattctctactcctatagtcacagagtgaaggaaacctcttcttggagctattttcctttcaagtttcagcttgcaaactcatttctgggtaaagctcctgctaagagtagctttagtacaagggtttgcaaactgagcttgctgttaagttgcaaattaacttagccatcagttgggaaatataagatttgggccaattaagcagttattattgacccaggtcaaacgtgagttagtgtctagaaggtgaaaatccttatgtcatttcctattctccataaatattctgaaaataactatttttgttatatttattgcttcaaccaagaacacaagaagctattttcttgtcactttttgggttgatgtggttttagtgtttccattaagtctccctatttttaacttgctaggtgtgtccttaaaataaactctacagtatctaagaactgcccagatcagaaggggaataatttattagctttgtatttatatgtttggaatttttgcttctttcttttatttgggtttggtttttattatatatatatatatatatatatatattagagtaggggctatatgagtctgataaagaaagcagagttcttgagatctgtaattttatagatgttcccaaccttatactcataataactcttcacacctcagtcacttacgctttatccatgaggttagagtgggatttccttggctgaaagggattacaacgaagaaaatacagtaagaatacaggcaggaggcccactgtgagctaataagcttatagtaataaagatgtatgtcatagatgctcccttgcttggtagagcacagatatgccctcatttacatctctcatctctaatatcccccaccctcttggccatttgatactccaagcattcatggtcctgatgacttctgcttggtacctctcattgagcaactaagacttccaggtgctaagatatgacagaggttactcaaggcatttctgacttgctatcaaacgcaatcttcttccattttctaatcaacagccaagtgaggtcatcttatctatcttttacaacttctgcttcagcaacactttccctttggactctccttgacaaagcaagctgtgtgtgagaccttccagtgaattatatttgtcagtgctcagagatataccagaaaatgaattggccttttttttttcctccttgctggtaactcaatgtttttgtctatccagtgaagatacaattaaggcagcataatactcgagttaaaaatatccttgtggctctgctctggggatttttctagcttttttttttaatagatggtgttaaaataaaaagaagcaatctaaaggtaagctgcaatcaatgcatgaactatttatttttatttcctcatttagcccatgcccatcacaaccacatccatctgggctgtgtatgacttaataagatgctttaaacagtaaaagattcaaatagaatatggaccctcttgcctgtccaccttccaacaaataaattacctgaatcttacacttcataaacctcccctgcagtgctcagattcaccctggccagcctacacagcaatcaaatgaccaaagatgtgtttttatatataaccattccagaagttaagcaggcagagaggaaaagtccaggagctaggggtaaatgctagagaagcctaaatgaatgaagcagaagttagccatcccagtgggtctgaggttctgagagagtctgggcagagagatagcaattgtttatgccaaatgttttataaacacgtaatatgcacttggacgtgagcatgctttgaaaagttaaaagtgagtgcaaatgcaaggtatgaataataaggacagcatgtttgctctgtttcccatttatagtgtctcagcttgactgactacacgctgactactaatcctgccctttccctcttcccatattcctcgaaagcacctagcacagagttaggcacactggaatgataatggcaggtgatgtttattaatttgcagtctctacctcttgattcctttcccaacttttcagagccccaggttttttttctataagaaaaccactttttatttattttactttttttttatcatcctcaactttttctttccagtcttcttgaggtatgattgacatataaaaattgtatcaatttaagctatacaggctggccacgatggctcacatctgtaatcccagcattttgggaggctgtgactggcagatcacttgaggtcaggagtttgagaccagcctggccaacatgatgaaagcccatctctactaaaaattcagaaaaaataaaatagctgggtatggtggtgggcacctgtaaacccaattacttgggaggctgaggcaggagactcacttgaacctgggaggcggagtttgccgtgagctgagattgtgccattgcactccagcctggacaacaaagcaagattccatctcaaaaaataataataaataagctgtacaacctgaagttttgatatgtgtacatatttgtgaaatgatagtacaatcaagctaataaaatgcccatcacctcatgtttcttaagtcaagctctcaggtttttaaatcttgttcataattcttctttcccagtaaggataacagcatctgaagaacttattgacaccaaaagtctaaggaatttgtaaactggctcctccaacccaatatgccttttgtaaaaatcataaagtgggtaatgcccaatctaaaggattgaattgctaatggtgggattttagtcagggtggaacatatgcttaaggaccatctgctttaatacatgaaaaaccatatcctggctgacttgcttgtttggaccacaaagtctgtgtgtacatacacttaaatttgagagcagggtgatcgtgctgtaagcacactgacattagtgctttagagatcccgtcttttgatgggctcctcactctctgaccaggtggaaaactcagattattttttttctttactgaatgttgaaaattgaggtgtcagtcatcacatatttgtttaaaatgtactccttttatatcttcccttaaatttccttttctgcttctctccacatgtacatataacctctcagtccaaccaagttaagacagttgagatgtaacttttcatttagtaaagcagacatttgacttgggagataaagggtggtggtttactgcagcaccaagtcccaaaacaacaacaaaaaatcctacatatagagtaagttccattctaattttaaggatgtgaggccaaatctgagatcactggttaaggctttttaaaaggaggagatttatcgacttcagtcaaatacttgagacaagtgcaggctgatgaatgacaccagctaattcatcaagaaatttatcaaggttcacagagtaaaagactgtgacttccatcagtccctgtatgtctgtgggatgaagcttgtggagctaatgagcttccttgggctgagtacacctccttctgactcacaaatatgctgttgtgtttgttctgttctacttgtgagcaactataagagagaccaagccaactaagagaagcataatccgtccaccaatcaatgattcaacaaattcttcttgagctacaaaatgtgtgctaattagatgaggacatgatttgatgaaacttacctggtagtcactgatagatgctgtgagcaataaagatgaagatacacagtccctgcactcaaggagttctcatattgcttaacaacaacattaatcacagctgccatttgttgtgtgattattttgccagaaactgagctaagccactttatatgcattgtcttatctgatcataagaatcttactatcattctaattttatagtgagaacgttgaagccaaagtggttatgtgacttgcccatcagcacacagttgataagtgatgaagccaggaattaaatccaggcattcttactccaaagttcatgcattaatctactattctgagatatttatgaatgcaaaagtgtagcccagataatataagatgtaggacaatgataaccttgctccctaatggagagaagtaggacgtacataaacacaaattcagagttatcatccatttaatttgtagtagtagtatgaatatcttcatgtggctatcctattttataatttcaaaatgcctcatataccccttagctcattaatctcccacaccaacctttaagtagcagctgggacaagtatttgttcctacctcacaggtgaggagatgaagctcagaaaaatttggtaactggcctgagatcaacatctaagaagtcatgtaggtgagttttctctgacaccacatcctgtgcactttctccatatagtgttttgttttgtgccatgttgcctgtcatctattaaaagaaattagatcttgagagtcttatagtcatgtcagtacaaaatagtaagtgtgtccaagtctgaagaaaacaataacccttaaatttctgccaagtatgtaaccttcatatgcacatgtttttgctcaatatttctcatacttcccactcagcgttgagcacttggcactggggaaaaaaaggatgttttagaagcggatggatgtctaatccaagcagtaaaaatccaagtgcaaagctggccttttccacgccaaagagaaaatgctcaaataaggtgtatccattaataaaaattgacccaagctgtcccggcaaaacatttttttaaagaaaatttcctaagtcaactagacttattggctttcttttttcttgtttttgcctacctctgtctgccttcccttgaaattaacattctagtgacatgtagattcaaccagaacctcttagccaagatttcatctctgcaagagaggatttttcttttagttaaattcaatgagcatttcatgagttcctgttcaatgtctcctacataaagcacttcaaaatttaatgtgcatacaaatcactgaggatctaactactgtggagagtctgattgagtaggtctgggtggacctaagatttgtctgcctaaaccagctctcaggtgaagccaatgctcctggtctatgaaatacgattcctgtgttgggacctgtgtggtagaggatacaagagaaatggcacacagcctctgcttcagtgtagttgttgataaaatacacaggaaacaattagagaaaagcacataacaaacacataattcactgctattagccaaatgatagattatggggaaaaaaaacacttttcatattccctttgtcattgtcagatcacatttaattgttaaaatggtcctcagtttttagtacaattagtcacttataaaagtactgttgcagtttctaaaagcccctctcttggtgctctagaaacacagctggacactgaaaaatgcaattcacatacaactgtttcaggagcccattgtgtggctcatctgggctaattgagcctgagcactccctcttgtgacagaaaaactgtatctcagggaagaagcacaagtctaaatatagccattatgtcctggcagtctgaggtgggcaaaagtcagagggaaagtgcagggcaagttagcacataaggtttcttctagatcaaacacagctaaaattgtgagtgaagcaggttgggggaggtgaaatgaaagcaggcagtaagagtgctgggggagggggatgggggaaacagactttctttgctcctttcccctccagccaaggcccagtagcatttctgcacacctgatggagcccacaggaaacctagagcagaatgaaatctgtgctggtctgcatgagttccaaaggaggaatgctgcagagctaatcactggactgagattgccatttaatgcccttcctccacaagccattcatcaagtttatagcagcaataagagttcattaccatgttcccgttttgcacatgcttgaacaaggttatgcctccaattttaagtgtggtgtataaaaggaaccagggaaggtgggaaggcgagagggttcctggaagaaacagtaataaacaaaataggtgctcctcaccaaccgaaaatgtgagtttcccccagctgtttatgactttatataatcagaaaaaaacagcatatcacttatattctcatattcattcttactagtagctcctaagctgtttttatcaatctagctatccattcatcgctgccagtcttccatattaggagctaaaagaacagataggatttggttctaaccccgaagaaatttataatgtagttacagaaattggaattcacgtaaaacagagtataaaccagaatataagcaacccctaaatgttgctgtccagatctttggtgccaaagcagttgaaagacgtgggagttagatctatgtcaggcagagaagcaagagaaggttttatggagacagtaggatttccattatcaaagaagagaggggaaagtgttctgagtggcggatattaatgaaacagattcaaagtcataatgggaatccgaggtcttctcaaagaggttgcaggctcccacaatccatgtcattttgatcccattatgcacagtgggctcccactgagctctgaatgttcaaacaggaatagaagaaaagaagctgcttcatgcactgagataactgtatctgaattcatcggaacatttggtttttttatgccccacccgtgattctctaggcaagatgctaggaatgtgtccatcaatgtcctgatagtgcagtagtcagtgtagaacagacagattcaaattacatctaaaactgcttagtgtcattgacttaggagagccattgtcaagtgaggtctccaaagaatagacataacttaggtttggctcatgggaaccagagaaatgtgagatttatatgtgcccatttatctcagcctaattacatagtcaaatcagggtacatgtaaaattctctttagggctattattaatttttcagtttctatgtttttatgggttgcatttgctgagtaaataataaatgtgcacaccactaccccaccccctaccctgcccaccccagtcagaagcacacataggagaagtggcaaaccacacctgggatagtttagtgcaaccagagctcttagctctaagaagtgcttctccttgaagaggatacagtaaaatttctcagtccttccttaaacttggaaaggaatgaagccataaagggaaagagtctgctcctactgaaaaaacaacagtgttttcctgatgtcccctagaggaagtcaagtgaatgatggctattctcaagcttggttttctcatttgtagatatcttggatggtcctggtatgcttcttccagtgctataggatctgctatattcttccttttttcctaaggtgttgtcaatgttaggcataaaaaaatagacggtgcctggtcagtaagtttatgggtgacatacactatagctagtctctgccccttagcaatcctctatttatatgaaaatggaaacgtttgactgaaccaaatatgccacatcttcaggccttcctcattaacctctgtctctctgtcactaacctcctcctgtccctagagtctaggaatgacaaacctcatagatacatttggctctttagagctgactatgcaccatttgaagtcatgaaaaaaggaaattgctgctccagtgttcactaatgagtgattaaaagcaaaactatgtcctgtgaaagaattcaaaaagatttagtaatatataaacccatgtggacattctgtgatcatcctgtatagaggagaaaatattaatggcaatgaattcttcaactctttattaagggaagtgaattttgactcccacctttgtcaaattattttccctgccccttgtgagacttatcccattgccctgatgatcctgtttttaggatgttgtgtttctctgctcttgttctatcattccttctttagcatgcaaaaatcttctccttcccccattgttatctagtctggtttggttctcatttcaaataatccttaatgattggggtggcagaccagccacaggtttaatgtcccagaactaagtcactcgggggaaaaaaattggaaggtgagttttcaaaagcatctctggactccatagtatgcaatatgatatggaagaatgtgtactttccttgtctatgcccctagaaatatttctaaaatgaatggctatatacctagtgggcaggatgtaatcacagctcactgtagccccaacatccctgggcttaggtgatcaacccatctcagcctcccaagtacctgggactacaggcccacaccaccgcacacaactagtttttgtatttcttatagacacagtcccaccatgttgccaggctggtctcaaactcctaggctcaagcaatctgcttgccttggcctcccaacatgctaagataaaaggcatgagccattgtgcccagcctggttaaggtactttaggctactatcattgcaccatttcttcagtgtgctttctttttttttttcacttctttaaatgtctgatgctgagaaaggaaggaagttccctaaggctgagagagtctgtcttcttcctttcaggtaaggatgtcaaggggataatctcaaggaaataatgcattgcctggtatagatctccttggattcccttccaattccagaattgaaagacccaagacctatcttgggccttcctcagaataatctagaaatagtaaaataaaatcctctaggaccatcaatcaaataacatgaagactaaaataattcttcatacagcttggaaatcttaaaatagatatgcacgtatctggaaggaagacagggtctcagtcctgcccatcctaattacaatttccattttctagtataattcatgatttctgtatggcaggaggagctccctgacatgtcaccctcagaagctaggctaagcaaaaaggcttgctgtctcttttcagaaacagcaaaggcgtgttcattgtagcatgtaaacattttacactgagtgagttccatttctatccatactcatcacaaatgagcaccacaaaaatactcaaatacatattcacggtgtgcctcccaaatgcgctgtatgaaaaaaatcagagctaagcatgaggcacagatccatttcatttaattagagtttcaaagaagcctgaagaaaaaggtctgtgtctccctaagtgttctgtttctgcatgtgtatagccgtcttgcattgtcaggtagtttgaagagaaaataattccaaatgcaaagcctttaaactctgaatgtttagctcaggtaatagtatcatagaccgacaatgaaagaaaccatctatcccattcctattccaaatcgcataccagtgtccacttttcctttccagtaaatcaatcaatgcttctttatcaatcaacgctgggccctgatttaaggccatgtcaggaaatcctgcactgcttctcagcacatccccttgagtatgctaactccttattttgattctcttctgttttattttacagtcccttttatcatcttttcccagtccaatcattaaactttgtttgctattattcatcttcaaggaccctccctgctgccaggccagactccccatggccccacatccatgctattctttttcttatcttcttatctctactcatgccattcccttgcctgcactgtaccatacctctctccacatagacaaccatttcacatttattccttcctactttcaacacatatttactgagcacctactgtgtaccagatgccacagacaaccttgacaaaacagacagagttccttgccttcatatggtttagattcttggaacaggagagagataaatgaacaatagacctttttttaaaaaattgagtaacttatatagaaattaagatgataagttctggaggtggtcagggagaaaaattagagcagggttagaaggatagggaggtactcttctaagaaagcccactccccagtctgaggtacacagtctacaagacagaagtccatgctggtctaaccatctcacaatatctccatggccacttctgaaacactttataaggcctttttctaaaataaacctgattgcaattgaataggaaaaacaaagtagacatcaaatttgattttcaagtagcgcagcaaactccagtatatacgttgtttcacagaacacctctatgtattcactgtatgccttcctttgataacctatagactctccaagctgtggatccaggaatgctgcctcttttggaaatgcttttggaaatgcttcagattttatttttcacaattaagataggacatttttatgattatgaaagtaatacatgcctgctatagaaaaaaaaaaaccaccaatgtagaaagttataaagaacaaaaattttacataattccaccataagatatccatggttaatattttgatgaacagctttccacaactttttctctacttacacataaaacaaaattatattacacatgctcttttataaccaacttttttcacttaactatatacctgcaaaatattttagaggaaactgatggccattaaaatatttaaaaagacaaggaagaattcagagatcaaggaaagcagaactcacacatgactgtgacaagtggaaaggattcagctaccagtttggaaaaaagtagaagtctgcaaggaacatgtcacctctagtctaagccaaaagccttgctgaataaaaatttaaaaatcaccaagaagacactttgatgagaaaagtaaatttttgttaatcattttggaaagataacaagaaagtggagcactgttgacctttgtatactgctctgtgccctcctccacgaaggctgagtctagacagtgcagcaggtggagacttctctgaaagggactctgtgatatgttgtcattatagtcaatggatgttgaatatcattagagagaaatcaatgtaagagacatcacatcttcaaattacaggcttggtaacacaggaaaaagaaagaccctgggcttcttcaaaaactgaccagaaaacaaaagatgtaagagggtccctagagtgacctgcagcctggtttcccagagaaaaagaatctactgagtgcagcaacatatataattgtacttgctacaacaaaataacctgtaaaaaaatatatatcattctgagtctatggatgtgtgaaaactgtactttagatttagttaggacatgtacagggcctcatggaaatagagatattttttgaagtctcagaaggcatactcatccagcacatatgcacacgttctcaaatacacgtacaataaaatctttcccgttagggtttgaaatgttatcattacaatttctttagcccttcttttctccttctctattgttctggaagttacatgttctattcatattatgttatagttactttataattcttaaaaatatatttatgaagtctcaaaattaatcagtgtcactttgttctatttgaacaacatgagaaccttagaatgttttaattctactcttcctctcgcaattttctacatcgtttttgttcagtattttagttgtatcttgtgtttaaattcccctaaaccagtattattattattattattattattattattattattattattattttgagacagagtcttgctctgtcgcccaggctggagtgcagtggcgcgatctcggctcactgcaagctccgcctcccaggttcacgccattctcctgcctcagcctcctgagtagctgggactacaggtgctccccaccacgcccggctaattatttttttgtttttttagtagagacggggtttcaccgtgttagccaggatggtctcgatctcctgacctcgtgatccgcccgccttggcctcccaaagtactgggattacaggcgtgagccactgcgcacagccaaaaactagtattatttttaactgtgtaagtatttaatattactattacttgccagagacttcacttcttaaactctatttgtttcttctgggtctaattttcttcttgttgaagaaaattatttaattatccttttaattaaaatttatgagtggtaaactctcttcagttattgcatgtctgaaaatatcttctttattcctcctgaactattaatgaactcataaatctgagctgactgtaatttctattcagcacataactctattatcttttgatatctcttgttgcttatgtgaagtcagctgccagtctaatttttagtaatttgtctttcctctctggtgggttttcagatttttatctttgtagtttcactattgagtgtggatttttttaatgcttgtggtttaatgatttccttaaactgaggcagcctttcctcagttctagaaatgttcttattgttatttttatcctcttcctctttcatcattttctctttctggatttcctgttaggactatgttggaatttcttatgctatcctccatgtctctttacttgtctttccaatttaacatctttttatttgtgagcaatatcatgagtgattgcctcatccattttccaattcattaatttcattgtttatagctattctattattcagtccacttattgagtgtttaattaccttaactttatattcgtgtattagtattttccatttttttaaaatctgttcttcttcaaattttcttatttttcttataatttctatatctttctgtatctctttgagcaattaaagttactcattttaaaatctgctgcagcttcttaaaaatcctcacttattgaagtgcaaatattccctctaatatggtgtttccttttatggtttctaatgtttaccctcatcccatgaagtgggttagaagcaggaaggatgaagtgtgttcaatggggatcacatgctgtaggtatgaaaatatcctaacatttgctgctatcaagcattttaattttctccagttctgttataacatttaaattagtttcttgaggtcactgtgcctagtggatgctgtgaattctcacccaacataatcatgtgtcattggcctcatgttataaatatttgcaggtgactgtttccaccaagggcctcaggatactgctttgatgttttccctggtttagattccccagtttctctaatgggaagattttccttactccaggctttatgcaagtagttcatctctaattcttctcaaagaactgtggaacttgggctcatgttcccaagtgggttttgaagctccaagacccagccattatgctaattaaaatttttccttggttttttgcttcaatgcatgctcagcgttctgatcatgttgaagatggagttacttttataatttctaaattttctaaaaatttttaaatgtttgacatattttattcagcattactgtgtctggatctggagaggcttttgtctcagacttccatgtcagccagaactcgcaacatcactgttttagtctttgtgatagtttatcaccctctcctttaaagatacaaaaatgccagagagaggtaaccaataaattagtaaaagacatagtttagattatgttctaccttgacaaactggggctgcctgatggtactgagcatctagacaaagaagaaatgctagaaagagggaagacattatggaaacaagatgctgagaacacacacaccaaaggccaatttgtccaaagctgcagccctgactgtgccctatgtatttatatatagatatagatatagatatagatatacagatgcaaatatagagaaataggtaagatataacaatatataacatgattttttaatttatatataaaatatatccatataaataaggatataggtatttatatataacaatgtttaagtggagagtaaataaaataaatgaacataaaaaagggtaactggagatgatgaaacacagatcaaagataacaagtctaacctttttttggtggtaataaatttcagaccccaaaagaggaagaaaaataatttccttgagaacaaaatcagccaccgtacctctcatcacaatttggatacatgtttccaatgggagtgtccctgaagtataaataatcatggctacagatgttgattaatgtccatcataatagagaatctaaaatacatggtacatatatctacctttctttttgttagaatctaacagatacagtatctatatctacctatccatgtatcgatcatgggtttgagaagaaagaaagggagtaagagaagtgttgctgaacttttcaaatgaaatctacatgcttaaacttgctaatgatgttgacctcaaatgaaagttactaagttctgcatcttatgatctaagaaatacctatctacagctctacttgctcaaagatttctcctcctactggcttctcagagtgcttgaaattttcatcttcctcatgctttaaggactgtagtcctttattaaatgcaaagctgttgcctgtaaatagtaacatacaaaccaccagcacccatgagtggttttgaccagtcaccttcttgaggccttagattcctgagagagccaaaataaataatctcttaggtcccttctctcactaagcgttattctgtagttctgtaattctataatatgatgatctcataggctgatgttttgatagaggattaggagtcaaggtggatcaagagccttaaatgccacttagggaagctggagtggagtggaggggtggttacagccaaggtaggcatagccacagaggcctctggatccaaaacacttccctggtgggaggcagagaagaggataccactgaggaattacactccatggctttgccccttggatgggcatgatgttaatacatacctaaaatgccaattgtccttggtctcttctgtcactggcagagacccttcgaaaatgaaaggcaatgtgaaatcaaataaagcacgtaagaaaaccatgctcatgggagcaagttgcatacaaggacctgtttaggacattgttaacatttctgtccctgtccctctcctgtaattatcagtgatttgccttcagcagcaataaagaacatggtttaacacagccatcccaagttctaaaagagcaatgctttatataaagtataaggcctataaagaccaggcttgatgcttaaagacgttgaaacacgtcgaatgtgacactgggtagccacctgtgtaagcagaggaagcagccccatctgcagcattgcgtgaggggcactgggagggcttgttgccacaaaagagaatgttaaaataaaacacctttgctggcttatccctaatgcccaaattccaccttcaaataccatcttctgtgttaaatgccaccctccttctaacccttccatctatttctccaggggtgagaaatgctaggtctagactaatagctctgggagtccatgtatcaagtcgattatgagtttcatctcaaaaatgggtgtctggaagaaaagaataatggcaaggagaaaagggaatacagaatggggcagggaatcgcagtatcgtcaaagaaaactgtaataacaccagggataataataattctaatcattccaaaaaggtgtttatgtgttaaatgctttacagtttaccaaatgctttcacagacataatttaatctttacattgatcatatgaagtagataagagacagttttttactcactttacacttgagatttggagaactaaagggtcttttccagaccacactactaataagcaagtggaaaactaaaactagatgccagctattgacacctgcatataccactttgctctaaaggtatccacagggccacagtgactccttaatagaggagatttggggaagttaaccacattctttgctgatcagacttttcttaactccttgggacctcggaaggggggtcaggcaatactctgaaaatccaaggcctcatctcaccagctttcatgagctctagctctcatcctctcctgtgttagaactggcttcctcctactcagtcctcaggttaagaataactggggaaggggagaggaagggagtggcaggcagaaagtcaatcactgtaagttctcctacagatattaaacatttgagccctccagactctgggtcttgtttcctcaacacaaatgctccctgatagctggctttgtgtttactttctgcagtgttgcactgtgcctgagagacgtctacaattcagccactacaataattacctcacttcatcttttccttcagtggctgaggacctaaagcccattgatatccagcctgctataaaatcatagtatatgacagatgtgatataaggggctccagaaaggacttaaagctctaaaaatacctccagtccctgcccctttgtgccctgtattcatgacaattctcttattaaagctttgctccctattaaaatgtaatcccctcccctccaaacagactttagtcctcagacactggcacttgggggtaaatgattttttttcttacagcagagactagtatagggaacaggggggaggagggctctcaaaggggcccagggatgcagggtgaaaggctcgccatgcttcccatgatgctgtatgccaggctccagcttgcacacagcccccagtgcaggcagcttggttgcagaccatccgttttcctctcaaatgccctctttccttatctgagctgaaaacagccctcctgcgttggcctcttcatcaactcccctttcagctactacttattctcactttcaaattggtgattttcccccttacttttgcacagcatttaggtgctagaagaaagaaaaaccaaccataactgaacatcctttagaatccatgctcaggttcttcttggcaggttataaactgtttctactataagacatatctttaggttacacaagcagcaagcaatgaaaaaaaatcacactcaactctggggagagatttccaatagttttcacgtttcctcattgtccctgcacatctctagctctctttaagtactttgggcttactcagtcactgaccttgtctaatcatattgattgtcagcaattgcagtctaattggaaagcaagttgctatggtaattcctgtatcttctgtcttacatttaaagacacaatgatcctaaaagggggaaaattgcttgtggttggtgacagaggaaaacataattagatatgcaaattgtgaaactaatgtattcaaatgaattctgaaatctaagtaaggatttgatgtaataaattggtcccagaatttctaccaaaggcacatttggtcagaaggtattctttttctccaaatacttatatttttaggaaaaaataaataaagacaatgtatcatggaagcaggaagggggtggctattcacagctgaaaattggggataggatccataacaccagtatgctgcattgcgtgcttgaaggaacaccagctcaggagatggcagacccagatcctgctcctccttctatctttcactcactgtgtggccttgggtaaatcacctaacttttctgtgccttattattcttcactagcaaacaaaataacagcttttgtgcttttcatttatttcgcccatcagtgatcacttactgggcacctgctattagcaggaaacattgaaagtcagtctctcttgtcactatgtactccaaagagagtacaatttctgttaagttagatgctccttgaaggcagaaactatactctttcaaatatgtatgaagaagaggactgcaaaggaatttgagatttggcaccaaaaatactacagtattgttaattcttgctccctccaactaaataaaaattgagagcctgccaagtgtgatttgaggggcctggtattatggagaatgtgacagttgccacagctccagcactcaggggcctacaaacagaagtgcagctggtgtgacagcctgactatgataaaataccctgataaaggcaaaagcaatgtgatagacaaactcagagaaaggaaaatgtcttaattctggaggattagggaaggcttccttggagaaaactttaaacgttgggccttaaaattggaatggggtttctttcccactccactgctcaggtgggagggtaaagtatatgtttacttgactcaatataaggcaaaggacttcaagccctgaggatgtcacttgttcattcaacacacatttatggagtacctgctgggtgcacagatacaagctatgcatataacaaaatccttgaccctaagggatttatagtcactagactagactctagtagaaaataataacaataattataaatatcattcctttactacttactaagcttcagatacttaacatgtaactatttcataaagaattctcacaaagttttatagaagtaaataccattatccccatttcaaagatgagaaaaccgaggctcagagaggctaaataactttgccagcttcacccagctagtaagtgcttatatggatctacaatgctacctctgctgcctggctgataacctagatacctccttccctggaagtaatagctttcacccattggttctacagctccagcaagaagacccctggaactagagtgcattaatgaaaatgcactcctatcatcacatatcaagaacatcttaacctagatcagttccattattaattagccatgtaattatagcttcttatacctttgttactttacgtgttgaaaaaagggaaagggggcatgtgtaggaaaataaatctaggagatagctgataaaatctcttcctttgctgattactctgaaattctaatttcagggtcattggaaaaacaaaacaaaatttctaaaaggtgtctttctaacaggatccccattacctgaaattattttagtaaaggacaaatgcgtgcttcacaattaaattatacacatcaataggggtacagaggaccccttcagaagctgctaacatgaggaatgagatctggtttctcttctccctccgcacagagccagtaccctccatcctcaataggagccattccactgtttgtgttgctactctctaagtttttatttaaacaaagggtcccaaaggtacagcaaaggcctgaaaatatactgaaccaggttgttgatccccaatatcttgggtggcctaactggctggatcactaacatgaaagactcatgttaaaaaataatccagtcttcttattcctccctagaatgatggcgtttttctctaggcattggtagtctcataaaataggaagcatttaaaaaccatttccttttcctgaccttgcaggtcccttcactgtaaaaacacggacagtctcaggaccaataggagacaaaggaggtgcaggagtagggcttttgcctataatttgggggtagaatgggggataactactgttcaaaaatggatataaaaccagttaaatatggagtcagagaatacagacctgtaaatttctgaattgttgcaaagggcaggatggataacagctttgcatgcagggcactcataagggtgctacattcaaggcttccaagggataaaataagaccatcagtgtgactcaaatacaaaagcagccaaatgtgagctccttgttgctccttcactgtggctcataaaggaagctctttcaagccaagataagatttaaagaggtataaaatggaggggcataaaaaatagagtaattataaattacagagtgaaaacagaggctggaagcaggagaaaagccatttggggaagccatttgttacaggtacggtatcaaaaaggcacaatcgaacccagagagaattattaaggaaggttttggggtgctctgtggtgccagcagtggacaggacagcctccaataacacacacacacacacacacacacacacacacacacacacacacttgctattcctttagcaaagagcctcaagacatatgtcaaggaggaaatcaacactggcttactggcttgtagggggtatcaatggagccctctttaaactgacaataaaacatatgctgtctttaagagaataatggctcaggccagaagtcctttctcacacttgtccagggcttcgagtggtaaatggcccttgctggctaccctgctgctactccctgataggtctgccgcagagccactcccaaagatgcagtgccataagaaggatgcggcatggagccccgcctcaccctagctttttaaaaatgaaagctggctgtcatagaggactgccaaggatgaggctggctgccttttaataacagaatcacagaaataattaaaatcacagaattccagggctagcagggaccctggagatcatttggatcaacagtgttgttttatagatgaggaacaaaggcccagagaaggtaactgatttgactcaagaagagtggttaattagtggcagagtcaggactagaacctaggcctcctgactccagtgaaataataaaaataatagtaagcagcacgacctttgcataacactatgtgcttttatcctagtgcatgacatgcattattcatgtgatcttcaacagcccagccaactacaaaggattgagtataaaatgtactgagggacagaggaccttcacacatcttacagaggaaaatggatctcagaaagctccagtgatttgccaaagtgatgaagggcttcctttggcccactcaagagacctttccaaatgcagctttgcatttctagagcttagagagctgggggttcaaatttcttaaccttaacaccctctcaggctgtgtgtgctaatggatttagtagcccccattgttaaacagttgttctttctagcatgccaagttttgttgttgttttttcacgaaacagttgaaaaagggaataaaacagccaagggcccgtaattcaataaacagcagccacgatgtgtgctcacaagagggaaggcaactcaatcacaggtagtaaatactgtgtcactgaagaagagtagtctccggttaaattaggtcaaatatagatttcgttttgaggaagaatttttggttatttcttttcttcaaattggccaagcaatactaattaatccatcaataaaaatgtacttaacacctactgtatgtatccacttttcaccagatggtagatataaaactcttaccctgccctgatgtgagaagcatttgctgaacaagtgctagcaaccacccagggtactagactcttaaccttagatattagagtaggacagatgacaacaaactccaaaatatcagggactttcagaacaagtttctttctttctcatcgagtggtctgggttggtatttctcagcattttatttaagaccccagggcaaaagcagctttgccatcttcaactgtggccttcaaggttgttctgggcacctccaaccaacagctaaaaaggagacagtgtatggagaagcacaatggtgggtgaaggaccaggcctgaaatagcacacaccacttctgttcaccttccacaggaagagctttcttctcacaatgctacaactaacagtaagattggccaagaaatgtagtccagctatgctcccaggaataagaggagggaaattgatttttgaggacagttagcaatctattccatgccacatatttatctccaatattctcacaaaaaccctaacaggtggataattattcccattaaaataaatgtcatgcatattaattgacttgtccaaggtcacacgactgggcaatgataaggctagaatttgaatctagacctgtctggcttccaggttgatgctgccactcacacatgtgtgtcaaccaagacaaatatgagtcagcagggccctgatgagacaaagccattagtgagattacccatgcagagcatttagcactgtgcctgctacaccgcaaacatctaataaaggttaattattatcattgtcatcattattcctgcagccttgagttacacaactcaaacttacaagtgtctcaaacctatggccactttactgtccctgtcccttgtatgtcaaaggctactccaacctcgcacctcacttttttttgcctctgccaaaagtgtcaggtcacatgaaacccaaacgacctgatcaacatgcctttcctttctcctctacacagcatatccactcccttactacctaccaaactccttgtctttcatcactaggaactcagtaaattcctgcttaagaaagaaattgactaccttttctagcttccaaccctaatctgactctacctccagaaaatctttgtccttccttcactcttttttttttttttttttttttggagaaagagtctcactctgtcatccaggctggagtgcagccgcacaatctcagctcactgcaacctccgcctcctgggctcaagtgattctaatgcctcagcctctcgagcagctcagactataggcatgtgccaccaaacctgtctagtttttgtatttttagtagagatggtgttttgccatgttggccaggttggtctgaaactcctgacatcaagtgatcggcccacctcggcctcccaaagtgctgggattataggcgtgagccactgcgcccggcccttccttcacattttctcatcttctttcaattccatttgctttcccaaataattatcctatgcatggctcccaagcacaaagactagctgcaccactgtgtccaggtagggatagactcataggctaccagcttccacttcactattttctctactcatcccttcattcttagtcttgcatattatatacataaacttaaatctctcccaaatattaagtaaataattggtacactttattcatttgaaaacagatgacctatgaccaacatcaaaccactccggagtcaccacacggctgttaagaactattggtggtggaaattgcaaagctgacaatgatggtgggaaataaagggaggtttgcaagaaatacagaagagagtaattgagagaatttaagatctgtttggacaaaaatggtggagagaagttggagatggcagcagaattaaaaacttaggttagtccagtgggccagtagggatgtcagacagagccgttggcaggggtcgtgactagggaggggaagagagtttggagaggaaaagaatctagctgctctagactgattgtctgtgatgggttcacaaaacatgtatccctcaggttgttacagacaagggatgctggtctcagagggcacctcatttgcctcatcagcagattcatcagcagagaggtcctaactgagggaatgaggtgacctcagggggtcaacaggaaaagcttgagggacaccaagacagggattaagaaatggtgacatttagagagtgtgttggggtaaatatggtgtacagggaaaaataataaaatgtattgaagccccactgtttactcggctgtgttgggcaccgggcatccttcccacactgtcctccacttctgttgactctgcactcgcaacttttcatgcgtatgcctaacctgccgatgtttgcaagataagggcagtaatatttaccatcttatatgctttatacttgcacagaaaatgtactaaaaggtgcttattatatgagttgctgcttggaactttgacttatgtgtgctgttggggaaattactgaacttctgtgtgccaccctcttctgtaaaaggggctaaggatggcacttagctgacaaggttgttgtgaggattaagcaacctaataaatgtgaagcagagaaaagttgcctgacacgtaagtgcttaataaacgttagctattatgactgtgatttttagtccctttgctcatctactgagggaaacaagggaaatatattatgtcaaattttagattacttaaggtttaaattaaggtaaacctaaaaatgaacacaatcgtttgttgttgatgtatttgaaaccaagtgcatttaattcaaattactgaattaggctgagccactgaaggtacttttatctctgtctcattttggggatatctgtaggatgactctagcaaagacttatcttgcccatgagaaggaagcagatctgggaagacaagaccatctcaggcatgtcaggaaaggatagcaccactggctgtcatctgaggaggtaaaaggagccttgtggcaacatcctcaccacaccctgacatgtcccaccttgaattgagcctctcctaaagggaaaagcatgctttttaggttatgatttcagtggtggagacaatccatgttgaggcacatacatgctctacctaatctcctttatgcggtcagcagaccagatagccaatctcactataggatttaggaaggggcttgggttcggaataataacatagcctggtttaagtatttaaatgattctataggtgaggttaagggaataacctgaatttctctaggacctttgccagtagagttttccctcagcacagtggttgactgtcacaaggtctcccagctgcagatgaatttagtcccagactccacaaagagagttttatgaaattttctggaacatattttcatgggaattttcacctgccttcttatacatgacatatatatattacacatattataattatattatatgcatattacacttcaatatcacaaggtatacaacatatgtcacatatataatatgaattactatatgcacatactctatcttgttgtattgaaaagcaatataccaaaagtttattttttctagtaactaaaatgtgccccatcaaatacagatagcaccagttaaggaaagcctagaatactactctcactgagttagagatgattgatgaaccaaggatccattttattcatctttagattcccagcactgatcccagtgcctgaaacacagaagctccttaatcaaaattcgttgaacatttgttgaattagttctccactcgcttaaagattcactccaagttttctgctaagaagcttccctcctgtgcgaatacacaatttgatttgcaaatactctgtttactgcaagttttcaggaacacggttttattgtacaaaagcaaaggtggaaaatcttttataatctttcaaagataattcattcattcagcaaacatttgactgggagcaggaatattaagataaagggcaatgtcactgtcctccagcagttcttagcctagtgagggaaacaaagcagaatgcaaacccaatgcaatatgcaaggggcagtaacagagggtctatggaaatcctcaaccactggggactcagggaaggaaaacagtcaactgaatttagtttgagcttattaacaacaaaagaaaaatttgattcagtgactattacaaatattttaatgcagttgagtctcttaatttactgagttagggagaaatattttggatatattggagaaaaatgctctgtgaagagaaaggcaggggaggagggacaagatgggaaagacccagagggggactttatctcctctatcagaaagaaagtgaaaaagaagtttctgtttttgatttcttattcttttatttttattgtttattttattcatttcagggatatattatttactcaccaaaatctggagtttaggcacagtctcggctcactgcaaactcctcccaggttcaagtgattctcctgcctcaacctcctgagtagctgggagcacaggcatgcaccaccacgcatgactaattttgtatttttagtagaggtcaggcttcaccatgttgctcaggctggtctcaaactcctgacctcaggtgatccacccatctcagcctccaaaagtactgggattacaggcataagccactgtacccggcccttatttttttttttaattttactttaaattctgggatacatgatgtgcagaacgtgcaagtttattacataggtatacatgtgccattctgttctccaattcatgtcatcgaaatcctagtgaggcctttaactactggtcacagctcttcagttctttgtatccaataagtcagtaacaactctactcggaataaaacagttcggcacttgtcaaatgagtatcagttataatggtgaacaaattaatatgactctgtaagaggttgaaatttcatgctggagcagaccaaattctgtatgcttattcgctccctaaagtcctcaatattggaaaacaccctaccccaaccctccatcaaatgtacttgtatatttgaaggaaaggaatttcataatggctctgaaacccacaccagagagaatgccttgataacccccagtacctcatggaagcacatgtccctatccttcatacaaacatggaatctcatgtacagaaggggccttaaaagtcatcttccctaatccccagtcagacactcagtgaacccttatagtcacccgtcctctctcctgttttattttctatgggtgttttgtcaattcaaggacctcaactgatagccagagaaggcctagggagagagctgtgacccagagaggcacggataaaggtatccagatactatctggtcagcagaccaaatatttttgtgtgtcacttgcatgttatactctgtattagtaaaattccctggaacaaaatcctaagtcatagacaagctaggctgggctgtcacctgctggacttagacatgttgcctgcagaaaagggggtgaaagaatgccacaaacttcatctccttcagtttagtgatgatattcataggcctgaagatttcttttccttagtctaccctttgatccattcattcatccagtaatcatttattgggcactaactacatatcaaattatcactagatgctagagatacaaaaacagatgaattagacaatgaccaaaaaaaagcaacgacaaaacatggttgtgattgcttcagctgagaaatgaaaaagatcttgtgagaagctagacaataggaaaacttcagtgctggtagagtaaaggagggcttttcagagggaatgcagatttttctaaaccaactacttcattctcctggagctcctctatcacactctgcatatccacctatgaatatgtacattgggtcaaaaagtctggtagcatattattactatttccctaaagaaccttgcagtacaaagtatgaccagcacctgggctattagaaatgcaggacctcaggccccagtcaagaccttcccaatgagaatctgcattctaaaaagatctctaggtggttctcatgtgtgttagcatttgagaagcgctgtcctagaagatgaggaaaggagagactcatctctgaaaattgtcttctgcagagcttctgtgcttgaggatgaaggcaccttgcactgttctggaaaagacttgacaaatgatctcatcgtatccccttattttgcaacaaagaatccaaggcccagaggggtgctcaatatggcacgggaggcagggagggtagaagaaagtgtgtgagcccttctgtcagccacagttggttcctcatacaggtgggaccatttattaatgtggagaccaaaataccaacctcacaagcatgtcaaaaggattacagagtatgtaggtaaagtggctgataaacggtaaacacccaataaattataatagtaataactagagacagaattgggttagatcggaataagatgtctaaatttctcattgaaggacttttccatgactgtaccctgttcacctgcccccaaccctcgtctggccaaaggcatccccctacccaaccctaacacctggtactgtctttgaagttgagaccgtcaaatacggactactttctgaaatcactaatttagaagtgtttctttactttgttctaataatttctagttccttttgaaaaacaaatccagttaagggaattctcaatatgtgaacttcggcaaggacatatgtctctacgagtggtgaccaaatgtactgctaactgctagtgaacctggaaatagcttttagaggagatggccttatttgcatttgagcccttcctgttagctagccttttcctgcatgccttattctctacctgtgccattctttcactctactgcattcaaatgaaggctttcttcttccatccctttccccctccttctcaattctgtacctctcagaactccctgtacttacaggataaagaatgagataataaacggccaatagccagcatggtgttcattctctctctctctctctctctctctctctctctctatatatatatatatatatatatagagagagagagagagagagagagagagagagaaacacataccccacccttatttatgttcaactgtgcaaatggtgaggactttaatttaccaaataaatcatgaaagatgttattatggaataagaggagctcttctcacataatgtctcctcattcatgggggcttctgagaaatggccctgccaccactgggttaacaagccacagatgtcaccagccccctggtcacagatgcaccagtcacagatgcaccagcagactgctgctgctcacagtcacacttcccctcccccaggggccttcttttttccctcccctccaggcctttctcttgatcaagagcctttctagaactcttccgctaaatcctaggccagcagacagcacttctaccccagccagtttgaatgcatgctgcctgtgagatttcctgagacactcagctgccgcattaaaactgcataagagtcttcctcaggaggcctaataatagcacatttcatctgtgagacactttataaatattaactgattaagctgccctctctcctcacaacctctgggcttctgcctagtggacttcattctcttctgccctcaaattactctgggagaaaaaaacgctgagacctgaggaatcttttctgtgtattctaggccaagacatcattaatggcaatggccttgcaacaacctccacctagttaatggcatggagtggaaagggatttaaatatatgttttattttattatttttcttaatttttaagttccagggtacatgtgcaggatgtgcaggtttgttaaataggtaaatgtgtgtcatggtggtttgctgcacctatcaacccatcacctaggtattaagcccagcatgcattagctatttttcctaatgctctccctccctcaatcctaccccctgacaggccccagtgtgtgttgttcccctccctgtgttcatgtgttctcattgtttagctcccacttataagtgagaatatgcggtgtttggctttctgttcctacgttagacattaatggggccaacaaacatatgtgtattttaaaagagactggattgaagttctcatctctcaaagccagattagcagagagaaaacaactccacgatctaggacagtgtcactgaactacagccaatggatcaaatccagcctgacacctgtttttatgaataaagttttattggaacacaggctaattcattcatgtgttacctttggttacatttgggctacaatgtcaattgggcagttgtgatagagaccaaataccacagcaagggcaaaaaagtatttactatctagccctgtaaaaaaaaaaaaaaaatgtttactgacccgtggtctagggaacttaaattttgttctcatcctgtatattccctaaatatctttaagcaaatctcttccttcctggacctcactttctacaactatagactggataatctccaaggtgagccacagccttcgacttattctcctcttgttcggtaagtgttagcctctagtatgttagttttgccttattactacagctgacttctttaatggcaggaaaggagttttgtgtgtcttgtgaatcctcccagacacaaggctctatgctgagccctaaaaatattcaaggagtgtaactgaactggcttgacttatatatttttttctccacagagagatctctcagaatgatgtcttggaggtgatagaggcagatgtgttctccaaccttcccaaattacatgaaatgtaagcaagaagattgggggatttgctcatggccattcttgaaaaaacccttaaagttcttctacattcctgggaggccctgattctgccatggcctcagatccctagattgtcattataagatgtcaaaatcagcctaaaaggcactgtaatgtgtctctatctggtgacccagggaccagctcagagcctagtctcatcctgttgcctgcctgtcatcattttttgcatcatagacccaagaactttgcccagtgactatgtgcaagcacctctgtgtcatccttccattcagagttattccagtcaaagcccaaaataagtcccacatgatgtagttgaagttgattagtcctggtctgactactggcctatgccatatattcaccatgaaaccttggccaagatagataactatctgagactcagttttctcatctgtaaaactggaataataaaattacatatgtcataggattaccctgatgaataaagaagataaatgtcaattaaatctagcatactgactggcctagagtgtgtatgttataatgatccttggttcctctactactccagccaaatttactttctcttgttgatgttccagttttacataatagcgctgctcacacagatccacttctgtttcataccagtttattattactataaattatttcatagaatcatagaatgtcaaagccagaagagactttagagactggtcaacaatttttcaaagtatattctgtgtatcactaaaaactcagggaattataaggtatttttaaaaaggaaaagatttatggtcaaataagattaggaaatattaggtaaataaaattagataggtttgcttcttataggaaaacttttcagagtctataatatgctaatatgcatttagaatctccaagaaggatattgtgtgtttgtcaactaatgtcactggaaagttttctttagagattggtgattaccatctcacaaaatccccatggaacacatttaagaaagccaatgaactacctcctaattttacagatgaagaaggaaaggcacagagaagttgtaaggcttatctaaggtcatctgtccaaatccacacacaaataagaacttgaacattaatcttttgactcttttgtatctttttaacaaggatgaatttatttttatcatttgccaaatatcagtagggaacagatacacacacacacaaatagacacacaggtgtgtgtgtgtgtgcatgcgcgtgtgtgtgaatttctttagtctgctcatttggcaatctcccctctcccttttacttccttctacccactctgcctcctaccttcatttttcctcgttgcctctgcactctgcaagtgatgttcaccctccctctccccattactttcatgcttcttcctttcttctctttccacttggtctagttgggaagaacccacagacattatcagagaaatgaaccaaagggcagccagccctctgggcaaggtcaagcaggcatcccttgaaacatttcaatggacagtgaaggtagtggtttgggtctttcatctcttccttgcataaagaggtgctcacctccatgtagcactgactgtacttaaaatgattaattgcctggtacttagatctgggtagctacagtttacagcaacataaaagctaatgaaacagggaggaagtaactaacagagagcatgtctacaaatacacattgatccagcaagacaaggaaagggcaggctgtctgtgttggaatccaaatgtgaacatgctcacttccagactgttgatcaagacacagcacaagccaaaatagggcagaagtcacccctttccatgagctctgagtgagcagcctcagtctactgcataaagggaatcaatggccattcccagctactgtatgcttggatttcatgcttaaaagcaaaaagatatcgattgtttttctcccaactttctttttctttgccatttcactctcttttcctccaatacctttttgcccctcactttttccttccttatcttcttttcacctcttttccatttttcattgctctttttcattactttcattcctttttctcttgcctcccgaccagacaaacactcatttcgccatattagtctcattcctaacctcttagcctcctccaaccctgggcgattcttactggttaaagatgcagctctgctcagggtgacaagaacccacccagccaatgctctgtttgcctccagcggacagggcccaggtaatgagaatgaaacagcagggagacagggttaatatttagtttgcacagcttagtgtgataaaaggcactgcatgctccctcaatatttattgaaatgatggatggatggatggatggatgaatagatgggtggatgagtggatgggatgaatgatttattatgtactctgtaaaatgtgaaaaatactacagcattccttaccatcaagatcactagcatgttttttcttcttttacagtagaattgaaaaggccaacaacctgctctacatcaaccctgaggccttccagaaccttcccaaccttcaatatctgtaagaactcatgtagtttggtacccccactatgattaaatagtgcaagcctattttactaaaaggcctacttgatactctggggagcaattacttttgatcaaggatggtggtggggggcagaagtggaggtggagagatacttggtgatggattttagtttaatgagcaaattctactaacataattgtatcttgttttcatttgcaaaaacagacataagaaatgccatttgcattaatgggacggtcacatggacctcgtacagaactcagtcataatttagtgttaatgagatacagccaaaatttctgctagcatttagcttgtgaccttgacttcaaagccattgtctctcttattctgcatatatgcatttttcccttgataaatatcagcattttattttgtttattttgtatgttttcgttaataacacacatggtattttatcagcagagattcctagtgtttcagctgcattctttgggcctgcccctatcagcaaaagcactgcttcctctactcaaatggctttcggattagctgagggcttgacagagccatgagtgttataatgggaccccacaaaataacagttaagaatttggtcgctggagttaaactttctgggttcatttaccagctactgatcataggtatggacttaacctcgcatattgtttcatcaagagaatggaaataataatccttgaatatctgttatctattagcatcataatcatgcataaccaaccaaccactacacaaagatagaggcttaaagcaacaactacttgtcattttttacctctctgtgagttgatcagtggaatggttctgctgatctggactaggtctgcctgacctcagctaagttcatttatacatctattgttaattggcagatcaactggatgttggccactctggatggcctcaattgggatgactcagccctcctctaagaggcactcatttctagcagggtagcatagtaggcttgttttcatggtaatcccagggttctaagagagacagctgaagactgcaagcatcttaaggccaagatcctgaactagcacactatctcttctgatgcattctattaaccaaaacaattcactgaatcatccagattcaaaaggtgaagatgctacttcttgatgggaaaagctgcaaagtcacaacacaaggcatagggaaggatacagaattgaagccattttttgaagccacttttgaaatcagtttaaagtatttaaacatttttgtactacgcctctgatagtagatgctcagtaaatattagctattaatgatattacgattctgtgcctaaattttcattcataagaactggacttaacaggtataataagaaacactgggccatcatgtgccttagctctctgaatgagaactgaggtaataaaagacttaataggagacaattcatatgacctggaacttctgctctctgacagctaccccagaaagggtctgaaaaagaaacaaagtcatctgcttctaagttactgtcagaggtaggctggcttcatgggcacacaagtgcagttgtatagggctttgtgctcaggagggcccccgcactcagaggactgctgggtttcattctctgctgttaccttcttgaaatgcttaaacaagaggctctgcatttttatttacacagcatcccacaaattacgtagccagtcctgcttagaggttagggttatgagctcttctactttcaggcttaggagtcttgatctctaagttcatcatgttccttagggatggaatctttgctatgctctctgcagaggctaacatgcctaggcacataacagtagaggaaatacgtgacaacagaaaaagcatgcacctcagaatcagaaagtctaggtcttcatcctgactccatcattcaatagttgagaaatcttgggccaatcaccggacttctgagagacgcacatggcttatatgaacctcaaacaagatttagatatgaaaatattttgtcaaatacgaagtgctcaaaaacattaataaatgtatttgtagaataattatttctggtcaaatactcaaggtctaccagcccatcctcaggaaaattctagtaagttgttgaataattatgctgccgattaagaccttcagcttttacctacaaatgcttggcaagggttcaaaaagaggaagttggagcatgcctttgcatttaaatgaacagaatggaaaagaaactatatatgaaaaactatgaattcagaaggactggaatccaaatagaacattgatatttattagctagctggttaattactttccctaaacctcagtttgcttatctatagagcggctgtaaaaaccaaataagattatgcctttaataaaaaaacactttgcaaattgtttttatataaaaactataaagaactatagaaatataaaattattagtgcctgttacccagttagtttccttcattctttcttcctttctcccaactctatctctcccttccagatccttctcttcttttgttttggagaatgccaaagtggaaaatggggatcatagagccttcagtgacagaacaaatgctctctaggacatgaagaggcatccccagagacactttcattcataaactatcacatatggctaatgcaaagcactcctgccaaggacaaacccaagaagaaaaccagctcttcacatagatatccctagcccatgataataatagcatatctgaaaatgcggattggaaacaggtaaatgagaaatgaggaatcattgcaaaatttgaaaccaagggattcagaatttgacctcatcattgacccacatcttgcagccagcaccatttgttcttatgaatgaggacccccttggcccttcccttaggagatgagggcaggggagatacttgaacttgtaaggatgtgggcatggaaagcacagctccagacagaggaagggagagagggagaacagaggaaacagagctatgcctttgcctctgaaaaaggctgaaatctgtgccacctgccactaagtccatcctcctctttgtgtctttctgtctcactttggggtgttgagtagtcctcagtcctgtatcaagttcacaaaaagctggaggtgaccaattccagacacatctttttctgagagaagattattgttctcagggcattttaaacctgctttctaaggaaagaaaagcacaagaaaggatttagaagggattatgtcactgtcgagggattctccttgattgctctgaaaaatagcatatcattttcttagtcagtttgggctgctctaacagactactgtagcttgtgtagcttaaacaataaacatttgtttctcatggtcctgggggctagaagcccaagatcaggatgccagctggccagttcttggtaagggccctcttcctgggttacagacagccatcttcccattgcatccttacaatgtatatgcacatggccttaccttggtgcatatacacagagagaaagagagatcccatgtctcttcctctttttgtaagggcattcatcctattgtgagggtcttgccctgatgatcttatctaactctaatcaccttccagaggctctacccttaaatatcatcacattgagggttaggttccaacatataaatttggggaggacacaaacgttcaattcattgcagttatataattctacactatacaaaatgtttgcacatccactgctatgtagatttcccattagggagttgagaccaagagttgtctatcttaaggctttgacttactgcccagggtggacctttcccagctatgtactcctcctcagtgtatggcaactctgccctccaaaggcacttctacctgcaataaataaataaaccatatatatatttatttatatatatatttttatatatatttatatatatatatatttatatatatatatatttatttatatatatatatatatttatatatatattcagggctaagactctagctctttgaaatattttccaaactgctaagagggatcacctaaactcataggtggccctctaaatctgaaagattttgtcagggaaacaaaacctaattaagcttccacctcacactagttagcttgggctaccataacaaaataccatacgctaagtaaattaaacaacagaaatttatttctgacagttctagaggctgggaagtccaagaggtactggccaatttggttcctggcttgcagacagctgccttctccctgtgtcctcaaatagtaccaagagtgagagtgagaaagtgggggtggggggggaagatagagaaagagagagagagggagagagaggtggagagaaaggagaaagagagacttgagtgagcaagaatgagtttctggtgtcttatcttatataatggcaataatcctaacaggtttagggccctacacttatgacctcatttaaccttaattacctaccagaagttctatttccaaatacagttacagtggggattagagttttaacaattgagttttgagaggacacagttcagtccatagcatatcttccatgcttattttcatctgagcaggagtcctaacagcttcatgctccagcagccaggtagaggtagatggcaacgatttcagatattctttgggatgatgaactacttgcttcaagagaaaaaacgcaaaatggatgaaggaattcagtggggaccagtaggattgagttgttggttttgtttcattttgtttttttcttaagccaggataaatgttaatcatcacagccactgaagcaggagattacaaggggtaggggtgagttgctacttgacttgaatgtcctaatttctgcatacgggtacttaaaaatgttgttctgaagctctccctgttgatgccatctcatgctgctcatttgatggcacagaattcaagacaactagaaatcagtgctcttcatcaatgccttcatgcttcactgaggaaccttaagtggttaggaaaaaaaaactcatgaataaagaagtgttcttaacttgaagaatatgcatcaaaggattcatctgggtggatttttttaagtcaatattgtatttacaggcaatatttctttctttactgctctgccttcctggagctgaccttttgtgtatgaaagattgtctattgatctgtaaataaggtttacacaatattttcttgcctttgcatcctgttaaagtaattctcaggcagctggatgtttctctttgctgctcaataaaccataattccattttagcaaacctttcacacagtgctgtaagccccacccccatgccccactgacaaccatcttccactcagatgtgggcctgttagacctccttatgatgcctgttaatggctgccatgacatgtgctttcttcaggtgggaacaattccaggagattcttcactgggactcccctcagcaatccaggctgtttctttcccaaccctcagctaagtccctctctctcttttctgtgtttgtcccttaaatttaatttggtaggagtattaaaagtagcttttctggttataaaagctgaactgcttttggaggtagcacggcaaggggacagagggtagggagtcaagaggcagctcagagtagcaaggaagcacaaagaatccagtggcacctgtctgggcacaggtctcagctgcttcccttatttgctgcataagcttgtataatcggcttaactttgctttctgaaaagtaggaaccttaacattgcctgcatcaccgagttgtgttcatcgagttaaaacaaatgtttagacaaatgatcgacatttagaaaattcaaggatacccaggaattgaactcagctctgcaccaagcggacctaatagacatctacagaactctccaccccaaatcaacagaatatatatttttttcagcaccacaccacacctattccaaaactgaccacatacttggaagtcaagctctcctcaacaaatgtaaaagaacagaaattataacaaactatctctcagaccacattgcaatcaaactagaactcaggattaagaatctcactcaaaaccactcaactacatggaaactgaacaacctgctcctgaatgactagtgggtacataatgaaatgaaggcagaaataaatatgttctttgaaaccaacgagaacaaagacacaacataccagaatctgtgggacgcattcaaagcagtgtgtagagggaaatttatagcactaaatgcccacaagagaaagcaggaaagatccaaaattgacaccctaacatcaaaattaaaagaactagaaaagcaagagcaaacacattcaaaagctagcagaaggcaagaaataactaaaatcagagcagaactgaaggaaatagagacacaaaaaacccttcaaaaaattaatgaatccaggagctggttttttgaaaggatcaacaaaattgatagaccactagcaagactaataaagaagaaaagagagaagaatccaatagatgcaataaaaaatgataaaggggatatcaccaccgatcccacagaaatacaaactaccatgagagaatactacaaacacctctacgcaaataaactagaaaatctagaagaaatggataaattccttgacacatacattcttccaagactaaaccaggaagaagttgaatctctgaatagaccaataacaggatctgaaattgtggcaataatcaatagcttaccaaccaaaaagagtccaggaccagatggattcacagccgaattctaccagaggtacaaggaggaactggtaccattccttctgaaactattccaatcaatagaaaaagaaggaatcctccctaactcattttatgaggccagcatcattctgataccaaagccgggcagagacacaacaaaaaaagagaattttagaccaatatccctgatgaacattgatgcaaaaatcttcaataaaatactggcaaactgaatccagcaacacatcaaaaagcttatccaccatgatcaagtgggcttcatccctgggatgcaaggctggttcaatatacacaaatcaataaatgtaatccagcatataaacagagccaaagacaaaaaccacatgattatctcaatagatgcagaaaaagcctttgacaaaattcaacaacccttcatgctaaaaactctcaataaattaggtattgatgggacgtatttcaaaataataagagctatctatgacaaacccacagccaatatcatactgaatgggcaaaaactggaagcattccctttgaaaactggcacaagacagggatgccctctctcaccggtcctattcaacatagtgttggaagttctggccagggcaattaagcaggagaaggaaataaagggtattcaattaggaaaagaggaagtcaaattgtccctgtttgcagacgacatgattgtatatctagaaaaccccattgtctcaggccaaaatctccttaagctgataagcaacttcagcaaagtctcaggatacaaaatcaacgtacaaaaatcacaagcattcttatacaccagcaacagacaaacagagagccaaatcatgagtgaactcccattcacaattgcttcaaagagaataaaatacctaggaatccaacttacaagggacgtgaaggacctcttcaaggagaactacaaaccactgctcaaggaaataaaagaggatacaaacaaatggaagaacattccatgctcatgggcaggaagaatcaatatcgtgaaaatggccatactgcccaaggtaatttacagattcaatgccatccccatcaagctaccaatgcctttcttcacagaattggaaaaaactactttaaagttcatatggaaccaaaaaagagcccgcatcaccaagtcaatcctaagccaaaagaacaaagctggaggcatcacactacctgacttcaaactatactacaaggctacagtaaccaaaacggcatggtactcgtaccaaaacagagatatagatcaatggaacagaacagagccctcagaaataacgctgcatatctacaactatctgatctttgacaagcctgagaaaaacaagcaatggggaaaggattccctatttaataaatggtgctgggaaaactggctagccatatgtagaaagctgaaactggatcccttccttacaccttatacaaaaatcaattcaagatggattaaagacttaaacgttagacctaaaaccataaaaaccctagaagaaaacttggcattaccattcaggacataggcatgggcaaggacttcatgtctaaaacaccaaaagcaatggcaacaaaagccaaaattgacaaatgggatctaattaaagtaaggagcttctgcacagcaaaagaaactaccatcagagggaacaggcaacctacaaagtgggagaaaattttcgcaacctacttatctgacaaagggctagtatccagaatctacaatgaactcaaacaaatttacaagaaaaaaacaaacaaccccatcaaaaagtgggcgaaggacatgaacagacacttctcaaaagaagacatttatgcagccaaaaaacacatgaaaaaatgctcatcatcactggccatcagagaaatgcaaatcaaaaccacaatgagataccatctcacaccagttagaatggcaatcattaaaaagtcaggaaacaacaggtgctggagaggatgtggagaaataggaacacttttacactgttggtgggactgtaaactagttcaaccattgtggaagtcagtgtggcgattcctcagggatctagaactggaaataccatttgacccagccatcccattactgggtatatacccaagggactataaatcatgctgctattaagacacatgcacacgtatgtttattgcggcattattcacaatagcaaagacttggaacaaacccaaatgtccaacaatgatagactggattaagaaaatgtggcacatatacaccatggaatgctatgcagccataaaaaatgatgagttcatgtcctttgtagggacatgtatgaaattggaaaccatcattctcagtaaactatcgcaagaacaaaaaaccaaacaccgcatattctcactcataggtgggaattgaacaatgagatcacatggacacaggaaggggaatatcacactctggggactgttgtggggtgggggaggggggagggatagcattgggagatatacctaatgctagatgacgagttagtgggtgcagtgcaccagcatggcacatgtatacatatgtaactaacctgcacaatgtgcacatgtaccctaaaacttaaagtataataaaaataaaaaataaaaaaaatttaaaaaaaagaaaattcaaaacaaatgttatccattcttattaaattcctgaccctgccatttactagttaagggtgcccatgcaagagacttcatctctttgtacctcagctctctcctctgcttaaaaaaaaggaaaagataaaattataataattcctacattttaagaccagtgtaggattaaatgagatactgattgtaaagcttctggtatattatccattcacaataaatgtttctgatttgatgatgatcatgatgatggtggtgacagtagtgatggggtctcttttcctttccgttattcctaatgttttgaaggcctctgtaactgcttctttaggacatctactactcagcattctatcatggaaatacatcattcatgtttctcaaaagacaaaaggagccttcttacagaacccctgacatatccaaaaaagtccttccaacaagcaaaactacattatcctgcacaattctaaaagttctcaaccctgccttttatgtttattttcaacactagtggtccacaagctcccttgccatccctattcaaaataattccagttttttacacaaacagctggttgaataatgcttcccatttttatgtttatttataatttaacacttatcatcctttgttgcatttgaacctcaacaatccacacagtaggagggacacacagccattttacaggagatgtaagctgacttgtctatagtacttggttatagggctcttctgacaggaggatgcaatgtccctacacaatgaatcattcttatacttttcgtgcttagctatgtttacttctctatgatggtgggaaaagagccatacttgggctcatttttagaagttatggtagccatgtgcatggtggaaaggcctggtggctccccatttctcctccatcctttttgaagtgaattggccaatcagtaagaactcattcactcagccaatcattcaacaatcaattactgaggtcatagtacactccaggctttgttgtagctattagtctctccaactaaaatgtaagctctataagggcagaggcttcatttgtcctgtcaaacaatgttggataatgtcaggtggtgatggtgctatgaagaaaaataaagtagtaaaagtagagagtcgtgctttagaaagcgtggttgagaaaggatggaagggatggcttgtgtgagatataggagatatcgatggacagctctcacttcaaggagctcagtcctttggggagaaaagtctatcaaacgttaacccctggaaatagcaatacctctgtagagctgtgtggcactgatcctgagtgagaagactgaccctgtgcctcaggccagactagtcagggaaagcttgttgtgggcttcttggaggtaacatagctggaacttgagtgataaatatgatttggagagacataaaagaagaataaatttcctgggaaagaaagaagtgagtactgtaaatgaatagaatgaaataaccacggaaatgataaaggatgtaaagaaactgagtcccaactaaaaagaaggtgtgtactgagaaagagtatgactagatttggatggatagggttgggtaagattgggagaaaaattaaggcagagaagtttaagcctaacgcagtaggaaaaaataagttataacatattcttgagcagcagagtgacataatgagaatgacttggactgtaagttgaccagtagcagggtacagactatacaatagggaaacctgttaagggtcatgtattagtcaggattttttagagggacataactaataggttagatgtatacataaaggggagtttatttagtagtattaactcacacaatcacaaggtcccacaacaggccatctgcaagctgaggagcaaggaagccagtctgagtcccaaatctgaagaacttggagtctaatgttcaaggacaggaagtatccagcctgagagaaagatgtaggctgagaggctaagccagtctaatcttttcacgttttttctgcctgctttatagtctggccatgctggcagctgattagatggtacccactcagattaagggtgggtctgcctttcccagcccactgactcaaatgttcatctcctttggtaacaccctttcaaacacacccaagatcagtactttgcatccttcaatccattcaagttggcactcaatattaaccatcacagggcagttgccataatccagggatacagtaatggtggtgcttagagggatagaaaggcatggttcaatagggacacatttctaaaacagaatcactggaatatgtttcatctctgggtcagacatccatctaagtggttgcagtgatttgtttttttgcacactcactttcagtaacccctaaaaccctctcttcccccagtacctcctcctaagcacttcccacacagagtcatcttgcagatatcactcatcgagaatccagacatcttatgcaggactatcattatagtgaagaaattattagccatctcctggctgtcagtgttgcaaggatctaaggatgttgccatgactacaaggatgtttgggcacaatcgagatttacaattgctttttttatcagtaatctgcctggcagagccaactttgcctaccatcttcaaatctaggaaaatgtggccagcttttccttccagaacactgatgttgaaggtgagatttcagcccaagccggtcatctccagggaggcaaggaccacctcttgattgtaaaggtggtgacattttcatgctgcttacctttcctccctgttctcccctaacctgttcagtatgcgttctcctgaaagaagcccaagtccttcccatcagcaaagagatcacttgatccatcaatttatatcaacatattcagactctgatattctcctttcaaggagaatttgcatttttgaaagaggaacctgaaaaaggtaatgctaaactcaagagttggtagtgatggactccatgacgggggatttctaagagggagagaaaatttctacaggacccactcaaatagcacataggtgaccatctactctacccatttgcagattcggtgcaattttattttcataggatatgccttcttacaaggtagttgtatccttacctcattaattttgaaataagacctgtctgtctttcatcaccagaaatcagatataaggacaagtctagagaggactgggtgaaaagcaagtctcagattagcctagtaaagcttagctctgatttttttcttattgctatatcatcctcatcagacactcccatcagccagtgatgtactaatctcttcaggtctcagtttcttcatctgcaaactgaaaataacaaaatatgcttcaagaggctagtcaaatgaggaaaatagaaaatcctctaagatctactctagccctgaagtgcttggtttctgaactgtgatcttcatgaatctggggctcccagtgtcactgcctgtcctgagttcatcatattcaggccccacacgaggggccctgtatggaaagaggaagtgattctgcaagataagaacatttggcatcttgcagaccacttcacttcccagctcctcttccccaggattcaaatgctgagatcttgcagaagcagtgagaagcttaaatcagctgtaaattactcataaattaagcacagctaaagtgcagctcctagagctaaaggacagtcatagatgtattcctgccaccccagtccctgacaaatgagaacaaccacctcagcagagcctgagaggcactggatgtggaaatgatatttaagaggcagaaagcacccagcagccattagagctggcctgggaaggagaaatccttggcagggcctgcctggggcacagacagaatgacagtgtggacagtggaaactgaagagacattaggcaaataccccacctccatggaaaataaactgttgcctcttattccactactaaagcctcatattgggaggtttaaaaggtatctttgtccttagagacccttttagatttgcaattatccctgggacaggccacacattgagagctacccatctccatggggatgggccagaggaggcagggcagggcagtgggcagcaagggtagtcaggacatggagagaagggagagtgtcactcaagtgacagattctgcactactccaaggggtgggggtgggggaccaggttttctccatcactatatccccagtgcagggagggaggattattcattttttcttttatagaaacctggctgtgatccagatgcttgcacctggtcctcgccccactctgaaatacttgctgagagagacccactttttccctgcttccatctatttgttcatctcttctactttatctttcataacgtgtattcttaggcgataagatcctggtacaggaatattctagctgaattgtcccagctgcccccaaactcttgatttatccttctgggaaggacgttgtcttccccaagggcaagtctgcaggaggaatgcatccagggactcacaagtcagccagatcaggacggggaaaccacaaagtagctggagatttccccactagattccactgacatccaatccagagcaagggctgtgtccagtttatctctaggtccccacagaatacagggtctgcacacagtggcccttcatgagaatgtgggccggagtggttggaacctttttgtttgggtagagaggggagcagctgctgtttttagagaaatatcttggggcatcacagagtgtgaacactgaagtgaaaaatgctccacaaaagaatattttcatcttcaacagacatcgcaaaaatgttctgctgtggtttaatcacgagctcacccacagaaaacaatccacaaataacatctagttcaagaggcagtgagcttttccctcacccatttggaattcaaagatagcagtgctaagaagagaaagcctggcatgcttgaaggacttgcaagggaagcagctaggcaacctccctcacaatgatcatccatcatggtctctctggacaatgaccaaaccacaggagccacatagacacagattcacttagcaagacatcagggataagctcttttctttacaggagatccaaagacccaggttccagccctggccctgcctgtgagaacttgtaagcaagtaacagggcctcccggggtgatatggtctggctctgtgtccccacccaaatatcatcctgatttgtaatccaaattgtaatccccacatgttggggagggacttcatgggaggtagttgaatcatgggggctgctacccccatgctgttcttctgacaatcagcgagttctcacaatatctgatggtattataacgggcttttcccctttgctcggcacttcttcttgctgccaccatgtgaagaaggcatgtttgctccccctttctccatgactataaatttcctgaggcctccccagccctgaggaactgcgtgtcaattaaacctctctcttttataagttacccaatctcaggcatttcttcatagcagcatgagaagggactaatacactgggcctcaaggaaaatggagaaaaaaatagctgcctcatttcttaacaaaaggttattgtaaagagagaagaggaaggaaggggcaagatgaaactgggtgtgggaacattttgaaagttaaaagcaatgaagaaatgcaagcactggtagttgtattaaggtattgctgggtgatacgggcatgagtaacagaaatcataatgcagaaagctcttttactttgtattaattaactagtcttacaaaagacctgtaaaatatttactggtggatccattttacagaccagaagcttgaggttcagaaatgctaactgaattccccaaacttacaaaatgggattatgaaattatactggggaagaaggcccagggacactgagcttactgagcatctactagatggcagattctgaactaagcattctgttcacccaagttaccttccaatcttctaaaacagtgaggtatgcatttttcccaatctacagatgaggtctttgaaactcagagattacatagttgatataattaagaactgaagccaggaatgtcagactccaacccagttcatcctgcattccaacacagcacagctagagagatttagaatgtggatgaagccaacatcaatgtgcccagtgctcagaacacaatattgacaccttattaatacgtttgccacttggaatttgtgatcatcttcttgggctaagttgaagtgtacctaagaaatagctttctaaataattaatattagaaatgagttgtgggaagggtgtgcaaactgtttaaaatattaactcttttgcaactcccttatgtaatttaaaagtaattgcttgccacaaattggtagtttaattcaagttattctaacatcagcatccaagaaggtctcaaaagtttgctgcttggcaactctgttagctgcgaatctcacctagagatatctttaggttttaaaagttcttatacagccaatgcagtatgatggaagcaacatcaccaagaggcaggggagccagagtgcctgggttcaggttccatctgttctactttctatcagacaagctacaataatttgaactctctaagcctcagttttcttatctataaaatagagtttataatagtacctccttcatagggttatgggcagcgttaaatgactttaatacaggcaaggcatttacaatggtgtctagcttatggcaatgaaataggtgagtattaaccattattatttctggctcagatctagaaattttgagcaggtcagttactctctgtaagccttgcctctcttatcagtaaaatggtaatcataattatgtttaccttagaaggctattgtaaagtcaaatgagatcatatgaaatacctttgtcaggtatgtgctacacaaataataaggctagtttattttcaagtctttttttcttagaagaaaaatctgggtcagacttgtgacctctgtaaccagttcctaggactgcagttccttttcagttagcagtgttctggtctactgccactttagccagcctctcactcagctcaaattcagacactggtcactgtgttccccaagctagagggagcagctatgaaactttccacatggtctttctaaagtccctctttcaacctaagtgaagcagcaagcagcccccaccctttccatggtacaggaataggaagggaaaaatctacagctttctccagaaacccttctcacaaagtctttccccgaatttaactctccacactactttcatgcccaatgtgcatgagaggttaagaattgtgtaactggtttccagaaacctggaatgtaacatttcttctaccactgtgtctcagggaaaactccaactatgacattggctacactgagctctgccttagccacggaggtatccgatagcttgctccaagttaaaagcacaaacatcaatagtgacaactacacagtagcccatcacaaacttatttatttttttacattcaagtcaggcctattttctcaaagatttctcctaagtttacttcccttttgacttagtttgccgtgattctttttaccctaatctggttatatgtagaagttaattgtcggactaggggtaggaaactgaccttgagactgatatcatttacaaccctagcgtagttacacagagtcccttgctttacctcccctagttataatctaagagatccatcctaaaatgtgcaaacttggtggtggagagtaaaccaaaattcactggacatagtctgccctttcaccaatacagttctgattttgtgtattgtgaactttctgatgtacatcacggtagaagaatggagtgtgctgactgatggaatactcctcctaagacagagtttaccaaccatgtcctaatagtaatagtctttttgaagaattagtctacagtaaaagaaggtgacataaatgctttagcttttagcagagcttccaaggttgaactaggaaacaccaaactcaggatatactatacaatgatgtgggagtccaaagtcagtatgtttgggaaagccagccgactatttccttctcttggaaacttataatgaataatgtcatggtaaaggctctgagaatcctgcaggaaacaagctgcttaattaaccttattaacccagcattccctaaacgtatttgaccattgtaacatttcattcacaaacaaagtatttgtatttctggaaataccgtttctagagaaatgctcagtttctaagttggaaggcatcttagaggttacggagtctaaggccctcttcaggaataaaaccctccatacagttacttggacatagtaattctatggttgcagagataaggaaccacatgcttagcagcacaatccatttcttcttgggcaactctcataatgaattagaatctgtctttaaggtaagacaacaataagcacccaaattttacattaagaaaaatctaaattcaacctctagctgtgcttctccttatgtggctttgagaaagctactggacttctctcagctgagcatcctcaactctaatatgaggatggtaagggtacctgtctccaaggtagtggagaggaatacattaaataatcgatagtaagtgcttggtgcggtacctggtacataggaagtgttcaataaatgttgaccattattattatgaatcctgtatctactttccagaacagaatagcacatatctattaccatttccacctggcagctcttcagaatcacacaggcttcttttcccaagcaaagtatcctatgcactggatggtatgatcttgattcctcaccccatcagcgaacaaacacacaaacaaacaaagcatatgtttccgaataagtttattgataaagtagatacacatatgactgcagtcttgtgtgcattaccacacatacacaaaaataatattttaaagaatgaaatcaagatgaataatatgcttcgatatttgcatcttctcttattatgtaccatttcacatagcacaaaatcctgttttgctctcactaaatataataacaatattttgagaaagcattttcatggaatatgctttttttttaatccttagtttaagaggtcattgtaatattagattttaatggctgtcaaagttgagaacaaaacttcactaaaataggtagatccaatggaagaacagctccatacctatagtcgctgagtcatcatacttagtgtttataccccttttatgcaaatactgttgtaaaattcagctagtatatttttttccctaacgtcagtcaaatgttctggctgacatcagggaaaaaatacaccagctgaattttactagtacctggaaactacctggaatatgttgaattttttatacttttaatgaaagcattcaaaactccacgagaaacaaactggttagaaaattgcatttccttatgtttaaaacatatactatgagagttttcatatataatgacatacatcactttcagcaataaattaacaatttccatacatgtttcccaatgctttatccatagcacagatttttttttcaaatcctgttgccttcctcctcattaatataccacctttcacttaaaaagacaaatcaagtatgtctaattagaaaatatctgctttgtaccattatttctgacagccatttgtcaaagaaaaactcaacaaatttggatcacttgtctttttgaaaaaaaaatgtataagtcatctttaatttatcaactctaggtagtagttttccttgacttcaacaaacctctaagtgatagtatgatcctgatcagaaaacccaggagccagaggctaaacagagtcagacaggtaaaaaggtaaaaaggttgatccaggcaggtttatcagaaggaagcagaaggcaattagagaacgagggcaggaggaatctgggaaagtccactgtgacttccaatgttctcagcagagctcaaggagcctcaggtagaaggtaacagaccagcctactgaagtgtcatataagtcccacagggactcaggcaaggaaacagcatttgagcacccaagagaactagggagatgtaagacatgacccaggtcctagtggatcaaggaaatcagaatctcagatatggcaactggaatacaaggctggagcatgaccacagcagtaacaattcctggtcacggggctaagttgtcctaaaaggtaaatcttatttccctgtgtaaaatataagagatctgagccctggagactccaactaacccctaaggctacacatcttaaaaaatgataaggccaggaggacttgaaaccagaccatctggcaccagagctcttacctttgaagctatgctacatgccctgctcaaaaacagaggctgattgcaaatctaggatgctaggtccgaacagaatctgcagccaagccgataggactgacctctcctctaggaaatgttacccttgagctccttaaatttcccctgattactaaggagtttggtttccatggagactgagacaaagagttccagttaaatatgagagttaaatacttctagttttgaaaatgtgagatcgaaaaggcaagaaaccaggctttcctactgtctcacataatttcttacacaaaatcattttacagagagaaactgagactctgaaaaggtaagtgaactgtttggtgttatccagaagctagagagaccactggaacccagggtctctaaaccttaagttgaagacctttttcatacgccttcttacatgctctgccatctaactccacgattctgtgatactatacctagcgcaatgtttatttaatgattcagaaagcatatgttagcatcttttatcatgttgtatatagatatacaaactcccagttaagaaggatctgtaattaatagaaatatcaatattagcaagcctcataaagtagcgagtcttttcatatacagttgatcctcattatttgcagattctgtatgtgctaattaatctacttgctaaaatgtatttgcaatccaaaatcagtacgtgaaacacttttgcattattcctagacatgtgcttttgcagaaagacaaaaatttgagtgtcttgacatgggttcccaactgaggttgaatgactctgcattctgccacctcgtttcagctgtcatgctgaaaatcaagtgtcctttgcatggtctatctagggccttttatccccatatttgtgctttttcttggtgatgtcatggtttaaaatggccaaaaatatatgtgtaagataagcttccttcagacatgagttatatactccagaacatgagttgtgttaatgaatcaacaagaaatattaaataaggtgtctttaaatagaaacatatataaaacatggttgtatattgatcaagccatgacaaaaatgttgccaccaaaggcttataggaatctaaccctgaatttcccatggggccagtgattcactaattccatgtttgaggtgacttttagaacatactgctgtggataatgagaatcaactgtatatagttaagctcagcccactcttcctagtcttatccatcattgccctaacttctctcagaatggtcaggaggaaggagtcaacttcaactttatgcaagagactttaaaaatgtaattaaaaatgtaaaagagtaaaagaatcaaatggcttaaaaggaaacaaatcctatatcataggaaaccaattagtaggtagagaaaagagttcaacttcaaaccctcagccttggttactaggaaatgcgctttggctaaaaggataaactggacacacaactggcagcatcctctctcttaatcaaatttgcctaaagcatctcaatgatctactcaagccatagcatgaactctgtggctgccttaagtcctagactaagagagagctgtttcacacagtctcagaatcgatcattccatgccatggtagatttggtgtggaacagaggtaaaaaaaaatgttttccttgttgacatatgtgataaaaagggatgtcttgtccttcctggcttaattttctcactccagtaggttaagtattcacctccacagttggttctcaaccaccatcactttggtctgattacttctgtgaattcctgagatgatgggctggtgaaaacatgggccagctctgctcagggaaccctcaagtcttcttgcttccccttgcagccccataaagtggcttctaatgcttgcccataagtggggaattaacaccatgcttcttctttaccatgtttctttaactagctttaaagtttctggaatcctgcctcctccctgccttttaatttcatttttgtctgcttcccatcctttcatccacctcgtgtggtccggatatacacacttgctactcttagtttaggccagaaggctctgtagtttctaagatacttgacttttttcctcttcctataagcacttcttcttggctactccagcccatattgttcctccagccccttccctgaactcataaagcattcacaatcagtagcatacagttttccaccagaccattctgagtgtttcacctgtgctagtcttaactcactcccaaactccctgaaaccggcacactgtgtctgccttcctccttggataaaacagagattttattggaaggatggcacatagaccagtgcaacacaagcaaacacagaccctgttaactcaagaaaaaataagagcccatcaacactactgaagcttaataaaagcattaatgatgtttaggacaatgagccttagagcctcagggtcacctgtttatgaaaggcaagcatattatcctatggcagaataggtaagaatggttcccagcaattacaggaccccgctaagtttatcctgattggagagaagctcactttcactttacaacctgaagattaaggacaatcaggcatgaaagatgctaacatcaacttagaatgtaaaactggctgtagagagggaaaactctgagtcagttacctttctttaaaagactcatttgcagaacttaaattcactgacattttaccctcaggcctttaactgttttttgaagataaaccatggttgagtgaatcaaaataattttgcagcaaacagtcatttgacaaaagcaaacccattgagacatacagttcctagctgattacccacttccagcctccatcagcatgaatttattgatcagaggggaaaaatgaattgaaaactaagtgttcgtctgaactccatttcctgtattatcttggggttatagagagtctcagctacagaattatcaccaataatccatctcactagatggtcactagatctttttaagtgccttaaactcagcactactggaataattttagccattttttgcagtgtgatttctttcctataaagatcaaagatctcaatgtgcatctgcagatatctatagatatttcataagtacagtggctatggaagctcatgcaattgatgttaaatgatgcactcataactttattattgagcaatcatgaattcttcattctttcaattatataaaacctattcattcactaagagagatggggaagttgctacccaaataacgttgaatgagtaagctgtaataaacataggcagtgaataattccttgtgagttcatctcttgacaaaacatagcacattacctggcataaagagcttggcaaacattgagcacattttatgcgtcaactactgtgccaacattgggttttcagggaaaacatgaatcttgccctcatatgattcacaatctggttgaagaggcagacattggataaataacacaaaataatacatggctcagagttttgaggagtgctaaaacagatgcagttatattgagaataaatcaggggccagaatttagtttagcatatatggagctcctttttgaagaaatgacatgtgtaactaaactctgaagggtgagttgaagttcgccaggtgaagaatggatggttagccttctagagaaagtacatgcaaatatttggagaaaggaaagaacttaatacagctgaggaactgaaagaaagccacaggggctaaaacgcactggggaaatagcataagataaaggtgcaagagtaggcagtaagaagtataaattttactctaagttttatgggaaagaactaaagccttagcagcaaaggagtaaaacaatctgatttacatttttgaaaagaaggcccagagtgctgtatggagaatggattggaaaagaagaggaggataatattgcagacattcagagggtcttttgggaatggtgtcagtggagataggcaaaattgcataaagtcaagacatattttggaaatggaatctaagaggactttgagatgggctggatatcggaacgtgagaaagaagaagccaagccaactttaactgtcaaattaaaattgatggatagcaattctatctatggagagtaattgagaagaagccgtttggtggaggtgataatggggggaacaagtttagttggctatgtcaatgagacattcaggaggatatgcaaagtaagctttaattagcaatagactagtgaagtcagacagcaagtatgaatctaggagtcacacaatattgatgctacttaaaatcacaggaagcaagatctatgtagtgagactatagaaaagagaagcaaaaggcccagagcacaaatagagaaaaaggaatcaacaaagaatgctaaaaaggagtaacaggagaaggagcagaaacgaaagaatgcaaaatgacagaaaccaatagaaaagagagtccggaaaaaaaatgctaaatgatccagagaggcctaataaagtgactgtttaaagtgtttcttacatttggtagttggtgagtttgtagactttggcatgacagtcacagtttcagttatgagttatgggatgaaaatagattggagcaggttgaagatcgatgggatatgagaaaatgaagacagcatgtgcagacaactctttctagaagctttgctgtgaaagaagaaagagaaatagggagttaggctaagtgaaagaagccagacccaaaagttgcattctagatgattccactgatagagacagagcaagagggtggaatagaaagctccaccaattgtcccctgggcaaagacaccaaattaacagctctctacacagaaaaaaacaccttcatgagaaccaaaaatcaggtgagcactcacagtacctggttttaacttcgtatcgctgaaagaggcactgaagagatagaaaagacagtcctgaatcactgacaccactcctccccacttccctggcagtggctgtgtggagagcatctttgggctccagtgggggacatcatggatgattccattgacataacattttggaaaaggcaaaattacagaaacagaaaactgatcagtggttgctagggatatgaagtaggtgaagagatgaactacaaagggaaaacacaagggaatttagaaagtgacggcactgttctatgtctgtattgtgctcgtggttacgtagctatatgtatttgtcttagcccatagacctctatgctgaaaagagtttatttttctgtatataattttttagcgcattaacaacacaacaaatccttcaaaaaagaacctcttttcctggataaaaagcaaagggagactaactcaagggctgttgaagtaattaaaagagaattgcccaagacagcttctatgtggacattagggaatcaagagaggaaaaaaagaaaaaaaaatttgagaaccatcaccgagaacccatagactgcattcacttcctctctaaatacagaagcagagaacaaggcaccaaatcttcttgagtcataaacctcaaaaggacatatggtccttcacaatgattaatatatatcaatgagtgttctttaggttgcatgcaactatcaccacctccatcttgagtaagtcacatacagaaaagggaatgggagtagagaggtagtagaaggatttcaaataactcacaggtgttagagaaatgacaaagaacaatgcgtccaataattcgtatgtgcctctaaaaaccctcaccattgttctggcagccagttccacccacatttcatccagcttcactcaagtgcaactggacaacacctggcctagccttgtacacctctcacttcctactctggggcttcttgggcaccactgtgagagatgcccatcaggaactcactgggtgctcacaaatgtgcaagccataagtggggaattaacaccatagggtcaccttttaccaataggaaaggggagtctacagacacatccttcccccactactctccctcactcagatcaacagttctgaggaccaattttttaaatatcctaactcaagtccttgggattaggaactaatcaccagtagtggtagtattgcttagcttcacctccttgccagtttcactccctgtcctgaatgctctgaaatcatgctatcagctatattacccacagctaggcttcttctcaggctctgcttcccgggaaagccaggccaatacaaccagaccttgggaaggatcctgggtaggtctgaaattttcagctatagaaatttataaccatctcgtaagggtaatgacagcagaagctctaaccaacctctaaccagttcccaggagagagtctgattggcccagcttaggtcacatacataccctagggtcttagggcatggaatctcatgctctaatcccaagagaatcgcttggagtggagaaaggagttttccaacaagtatgatgaggttggaaataggggaaattttaagaaacttttgttactagttggaagttgctttagggtcacattaacttatcaatcgttttttttttaatgtatactgtggcatcctaatccccttgtgactgaagtgtaagtttcttttctctgaggaatcaacagcttttaagaccgtggaacgaaccttaaaatagaaaacatgagcctaattcacgtatatacgggcttttctcgtagatttttctgatggttcaaaattgatatttttattctggaaagttcatgctctaacaactgtttaaacagccagtttcattttcactcactctcattttgtttctctctaggttaatatccaacacaggtattaagcaccttccagatgttcacaagattcattctctccaaaaagttttactgtaagttttttccttgagtgactaccaactctttactcagtatctgtcttgcccaacggctatctgggcctttaatatgcattgtgtagtctacatcctccaaatgtattgctctgggttagcaaagatagggaggccagaagtgaggtccttgattttacctgcaggccagtcaatattagtttggaggaaactgaaagacccttcaataagagtattgttcacaaaaccagcatgtagcaaaatcaaaaagtggctcattttttcactatttagcgctttaattactgccccccacacacataaacaacaccccctgtattccagcatcctctcctcttctttctagaattgctatgctgccctgggcacaaagaaactatctaacaaacacattcatattaaagagttaatgacaggctgtgtttgccttttcccaaggtatttgtattttgaaaaaggaagagaaaaggtagcatataatggcaactattcccaatagtgaaattgtaagaatatggacagatccaaaaggaggagatggggaaggggtgtaaggagctaagcagagaggaaggagataagcagggagggaggagagaaagaggaaaatatgaaaatctttcagaatttctcaaattgttccaagctgtttactacactacttgtacagctgttacttccacatttacttctccatattagatcagacctaacagggaaggttgacgggggaaatgaggaatacaaacagaaaatgagagtttcctcatcctttcattcaggaaaagaaaaatcaatgataaagccattctgagacccaaggagaacaggcagaaggaaactagctgtaagaaggggattgacatgaggagaaggcccaactaagatgaacagagaagttagacaagaggtgaaaggtcagcttaagtgtttgttacattagggtgaaattatttaagaaaaccttcagaagaaaaaagtaagccatgcacagtggccagtggctctaatccagtactttcggaagccaaggcaggcagatcacttaagcacagggtttgacaccagcctgggcaacatggtgaaaccctgactttacaaaaaatacaaaaattagctgggtatggtggtgcacacctgcagtcccagctattctggaggctgaggtggcaggatcactggagcctgggaggttgaggctacagtgagttgtgatggcaccactgcactccagcctgggtgacagagcaagagaacctgtcttaaaaaaaaaaaaaaaaaaaaaaaaagacactgaatgtctgcaattccatttgtaagaacatactaaagataaattagagacaattttttctccaaactttgagctgatcatcttctaaacaacaactagttatattaatacattacctcagctgaagaccgcatcatgccagttaaactaaattttggaaggttacatgagtagagctgatgtaagtatcttatttgtctgtactttcttctagtgacattcaagataacataaacatccacacaattgaaagaaattctttcgtggggctgagctttgaaagtgtgattctgtaagtaagggggaaaaaatccaacagagtaacatttgatttttcatttagtgatctctttctcataattggatgctccttttttgtttgggtaactttggcatttctccacttaaatcactctccagttctgcgttcctctctcatctttacatttcagaatcacaatgtggagtcatgttaataatttatgattctggggtgtgattcaagtatttaaaattgctgtttgaatgatgatctcctgtgatacaacatctgttccaaaggaaagaataactcatgcatcaataaagctagttattgcctggcaaggcttttgttgcccaaagaaaaagatcaggaaggaggcccaatcaggaagatatggcgattccctcataaccatgccaagcagttcctgttcaggcccatgctgagcataggatgacttctcattttcttgaaacaatcacattttttaatgagcttgagttactctctctgacttttgggaaatctcttaaaagcattctgtgttgttagtgaaagaccttctactcttttatgccagtagcccctgtagcagtttatccactcacaagtatggccaagaaataggacactatgggctatctaagtatgcctgggatccatgaaagttagatgcacagaatgacatttggggacccagcaattgcacttacatctgtaagatatgaaaagcattttatctattttacaaactgttgtgtttttaaaaaaatataccagtatgagtttttaaaatatgcctatatgtacaaaacataagttccagtccataaagaattttagcccccttcagttgtatgattcagagaccaggctgttgaaagaaaaaagaaatagtagacagattataacactttgatgagtaaagctaagcactgtatttgatgtaaattaatcacagataacaatggaaaaagtttgaaaacagattagcatagaaattgaatgtatggagggaacaataaaattaaatcaaaggaatgtattcaaaatacatagatattaggacaaaagctataggtgagtgatactgaatcatttcacataagctcatgatatttgaagtgaaggggtgtgtgtgtgtgtgtgtgtgtgtgtgtgtgtgttgagatgaggtgatggggtgcagaaagggtaagaaagagaaagcaaaaggaataaactaaaacgcgagcagaatgaatgatatacaaagaaaaaaagagcaatcattctaagaggaaagaaggaatgatttaatctcactagtctgtgatgcgagggttaaaggaagagttaaacaagggaaaggaagctaagaaaaagaggttgtttttaaaatgggcttttaaagatgagcagtagttagctagggaattggcaaagggcgtgcagagggaacagaataatcaagaccaggaagagcacctgccttttataaaaataaaaataatcaggtgggcgtggtggctcatgcctgtaatccaagcactttgggagacagaggcaggcagatcacgaggtcaggagattgaggcaatcctgtctaatacagtgaaacccgtctctactaaaaatatataaaaaaaaaaaattagctgggcatggtggcaggcatctgtaatcccctctactcaggagggtgaggcaggggaatcgcttgaacccgggaggcagagtttgcagtgagccaagattgcaccactgcactccagcctgggcaacagagtgagactccatctcaaaaagtaataataataaaataaaataaataaaaataataatacaaagagcttgtggaaaatagtgaatacatgagtcatattggcctgctggattgtgaaacaaacacaacagtaaaaggattcctgggttacttcacagagggagattggtgataaatgtaaacatttatacctagatgtttatgtttatttggatctttcttgaaatatatgttcattttaaatagacttaaatgaatgttataatatggcaaacttattcaatttttttatagaaaatatataattaagtgggagtgtgctcatatcattcttgtagttttgcatagtgtgcttatattgttctcacagtatcattgatctgacttttttgtccagaccgtaagacagaaggcaaagcactttaagtgacctggtctcaactctccccaactagaggcaaagaacctgaggaaataagaacttctgacatagctttgcaaacccaaagctacaagggaaacatatagatcctgtctgctctttcctaactcctgttcatggacactgatctctcagaatttaggaacacacttttcaggaaaggagttttcttttaagagtgaatgtttctcagacatgtctctaaaggataaactcacttttgtggaaacaatttctattgttcttattttggctgtcccttaatccatagacaataaaatcatgtaattcatacttaacacaacttaagtctccaatcgtttctagtttggcagcttcgatgcaggggtgttttcttcccatggggacatttgagcacactcagaaaaaaaaaaaaaaaaaagcatggcaaatggcgctgatgactgttgaagtattctatggatagcaattttcaaaattctgggaatactacacagctataaaaaagaacaagatcatgccctttgcagcaacatggatagagctggaggccaatattctaagcaaactaacacagggacagaaaaccaaataccatatgttcactcttgtaagagctaaacaatgagaacacatggattctaggaaaggaacaacagacaatggggcctacctgagggaggagagagaggatcacaaaaaatatctattgggtactatggttattacccaggtgatggaattatttgtccaccaaaccccatgacgtgcagactacctaatgtaaaaaacgtgtacatgcggccgggcgcggtggctcacgcctgtaatcccagcactttgggaggccgaggcgggtggatcatgaggtcaggaaatcgagaccatcctggctaacaaggtgaaaccccgtctctactaaaaatacaaaaaattagccgggcgcagtggcgggcgcctgtagtcccagctactcgggaggctgaggcaggagaatggcgtgaacccgggaagcggaacttgcagtgagccgagattgcgccactgcagtccgcagtccggcctgggcgacagagcgagactccgtctcaaaaaaaaaaaaaaaaaaaaaaaaaaacctgtacttgctcccctgaaactgaaagttgaaaaaaattctgaggccctgttctaaaagtaaatgtatttttaaagcaaccagcaatgaaagattatcagacactagcctagtgaatcagagaagtgagcaataaaaacccactgtgtagaggcttctgagcccttctgcacccgcactgtgccctggtaagcagagtgcctgaatggggaaagcacctagctatggccagccaggagaataatgtcctaattcagaagaaataaaatgagtgatatgcgttacagtgcccagcacactcgggcctcaggagagacctgcttcgtgcgtgtttcctctgttcctcagtctgcccgtctcccttgcctgcccctcaatgagttttaaagggccaagtccccagcacctccactctttaggatgagagcaaagttcacttctgtagcttcctgagcctctgctgagtgagcacactggcctcatccccaaggacacaaaagggttaaggtaagcctgtgatgcagtaactccttagttgatgttctgcccaggttgttgtagtcatcgtcatcatcgtcatcatcgtcatcatctggttttcaaataggtacttcctctcttaagagaccaggggtgcgtgtaataaatgtgggtttccctttgttactagcttgagattcccacagataacgtaaatccaagggcagcagttctgaacataatttgttttttttgtgtgatgatccactgctgatatcaagaaataccatcctcctccccatataatggtatctgttgattgagataatccataaagacaaagggatatttgaatacaataattatttaaaattagtttatgttttatttgattatagcaacatcgatttacaggacagtaatatgcaagaaatattaattatctagtcaataggcaaataggtggaacctgtatggattaagggtcagccaactacatataacccagaggccaaatccagctcatgagctaagacaggaaacactaacattagatctaagttaagcaaaatgttatcccccactaaaaattctcttctcaatattaggcctatattacaaaaaaaaaaaatacccaattattacactttgaatttggtcaataaaaaattgtggtaattgttttataagtacataaagtacttatataatattttttatttttgccttttggcccataaaacctaaactttactatcaggccctttacagaaaaagtttgctgaatcctgtatttgattcaaatccccagggatccacatgccacagctacctcagcaactcccactatcctgcaacagtcaggagtccagatgtgcctgggagaggctttctcaaatggcattgggggtgcatagccacttctttgccatcagaacccaccaattgattgtgaatgttttaaaagatttgcctcgcccctttctggatttttttaggtaattggttttcaagaggaggaaaaagacatacagttgttctcctgtgattttaagtgttttctggctacccatggcagcccaggaaagagagtcctggatgcacaggagcttctctgggtcagctttctgtacagtgttatttgcaagcccactaagctggacagggaaaagaacctgacagcaaaacaagagcaggtagtcagaggttcttcgggctaagctctcctgaccttggtatctgtttttgttttcagatccactcaggagcagagcaaggcagagctgtagcccaaggtgtccttgggctcccctgtccagggaaccctgctcactgaccttcttagcgcaatcaggatggctgttctacacccatctccacctcccccagaacctcctcccctgctcattcagatcacctcaccctgccacagcccacattctctgtaattgatttctcttcctttctggcttaacccagagccacctccacaaacctccaataaccaggtccctatgggtcacaggagatgttcaggttgtctgacaacttaattagatcacttttgatgacagccaggcctgctgctgtgggtgatcatgggtgaaaggcttaaggccttagagaaaggtgacacaaaatgttctttctctgtcttataaacacttgttcaataattgtacgattcctgtccttcaggatgagaaagatctgtcgctccccgcattgcttctctacacacaaatgatgtgtgtaaagaccttacagttatagaatccaggctgctctgcctaagtatgcctttcaaacttaaatttcatttaatcctttgaataggtaatacatgcaagtaatacaaacttcaaaagttacaaaagattatacagcaataaatcagtcttcctcccacccgtgtccccaagctttaaaagtggcattttctttatgccactaacctgtgctgtctgcccttgctcagtgcttccaattatgaaacccgtgtattgtttgcatctgacattattggttttttaataggccttttatttcagatggctgaataagaatgggattcaagaaatacacaactgtgcattcaatggaacccaactagatgagctgtaagtagccctgactattcttcaaggccatttaaagggaaatggctcttacaacagcaatatttatgtggctttgtgttttccttcttctttcctcaaccccatccccaggaatctaagcgataataataatttagaagaattgcctaatgatgttttccacggagcctctggaccagtcattctgtgagtagctttccccatttctgtgtgtaagagctcagtttgtgtaagttagaagtcaactctctgcagctaggggagaagcttccaacacagggctggccatcaagttcaatttttattcgtgtcatctgcaaaaatttatagagacaatttaaggcttatccacggtctaactctccattaaaaagcaacactaataataacatgtaatgagcacgtacagagtgtcagatggcgttctcagaagttaagatgcattttcttgtttaatccttataatcaccccctgtggtaggagctattattcccgttttacagaaggaaaaactggcttccctggagaggttaattcacccactcaaggttatacaagagttacagcagggatttaaactgatctaactcatggtacagacccacaaccactcgatcatgtgtctcttccctggaaaggaaagcacaattctccatcatcctcaacactcaggaggttccttcaacccaatgagacctatatacacattatttttggatcctctttccaaatcccttgggatgcattccgtgcctcacagccctgcatcagcacccctccctcttgtcatttccttacttccatctttccctccaaaagtgactttcccatcttctcttcttacctacactgccccttccatcaagcatcattccaaagtcctctacctcctcaagtctctctgacaacctcgccatcagtgacttcttcccgtggctctcatggcctttaaggcttctttggtggggggacaatctgcatcacaatcacaaaaaggctttttaaaaatgtgttcctgggctctaagcaagacctactacacttactgactgaaaaaagtacttcaagatgaagaaaggaacccaaaaggagagaatgaggtacaagaaggaatggtgagcagagcaatagataaacatgttaataaatctacagttttactgaatgatccttatgtagcctgccttaagtcaagtcaggcgtttagaagccacctgcctgaacctcttatttggcagttagcataggctaccatgtgtggttatctacccacctaccgaccaaccatctatctgcatcacttttgtctacaccaaatagctaatattctccttcaggctggaacctgtgtacctctagaattagacttggtatggagagtcagaattttaaatatttattattaatgataaagggtgtgttgtgatctatatatgagattctgctgctttgaagaagaaatatacacttcaaggtagatttatcatcctgaccatgttcaaagattattcgagaatgcctggcttgagataggcaacctatacaaatggagtatccgtgtgattaaagcggagatacagagcagactgccttggtttagaccaattcttttacctctctaagccttggtttcctcacctaaaaaaaatggccaaaacaatacctatttcctaatattatttgaagcataaaacacacacacacacataaatattttttcactcatcagataaatttttaagcatcagtcttgtgccatgcaggaaacaaaggaaagttcctcctcatagaaagcttatattctcattgggggtgggaatagagaggagtcaggcaatacattaaatatacaacttaatatatcaagtcatgatctatctatgaagtacaaggaaggacccagggctaacaaatggagagtgttgggcatatagtccatgtactcaagaatacaaagtactcaaaacttgtactgcttagttcatgtaccctgttcttagagtactcgggagacaaatgaattttgacaagtacttttgatgtctttgatccccacaatagcagcatgtcagtttcacttagcaaaaagccctgaaagttttgaatgttcctaagaaggcatctctatctgttcatggcagaatatgtcagtgatgggtgtgtttatatatgtgacctgtaccaggtacaatattgaatctatagcatcttaacctatctgctcccgagaataatgaagttggatgagatcccccaactccttcattatccaactgaagaaatcagaacccagaggagagtgatctgttaaagatcacactgcaactagaaggggcagagtctggaccagaaactaggtcttctgcctcacattccatgtattcccaccataccatgttgccataaatacgtttaattgaacatctaaaagttattcggtgaggccccctgaaactggttgtgagctaaaatagagaggaaaataactattaacaccagcctcccagcctaagaacaccagtcaatgttagataaacgtggcacagaagaacatctcctgaggttgcacaagcagattccaggcgaagatactgcacaatgtatctcataagaatgtttaacagagaacacaaaacttgaatcccccatctagccccactgtgaacgcaggcaggaagagagcctctgtgaaagcatcggaagcaattctacaaggtcctcaagttataggcccattgttttgtccttcttaccacaggaacacatctgtctagaattaagggaatacaatttacagaaaatccatggaattaggaagcactccccatgacttaaaaaggtagagagtgataatacattcccacatatttccatctcagtgcaggatcctggctggaagcccagcctataattgcgaatttcctcttttccccctggggccaaaagaattgttcaccttaacatcaagcccccctttctggggctttcagatcagtccatagatgttcttcaagcctctccccctgctgacctgagatgcaagaagactaatagcttattccacatctcacttctgcatccagatacactaaaccatctaaaccctggcctgagaggtgcttgtgtaggtgtgcagtagaccagcccacctcaggtgatgagttaagaggtaagagtaggagtatgcgtaggctattcagaccacagtaggtgcaaatcatgctgatcttgactgtgccttgggtcagattgcagtccccgctcccacacacacacacacacacacacacaaagactgtgatatatctgcatgcgggaggtttaccggagggtgctctcagaatgtacagggaacccttgatggaagcagaatcagggtaatgcatttgcaacaaaaggctcagctgatcccatggggagatctggagttaagatggtccttcaaagttgtactgaattaaggtaaggggcaagtcctccatatcaagaattattgggtgcaggctgtccctggggaggaaccaaactcctggggaggagaaagtcagctgagggcaattcccagagtagactcggctatgagccacctcagctgtgagtggttctcagttgtcctagagcagcatgttcagagttgagtaggttttgggggggtgtttttgtggttttttttaatcacccatgctggagtgcagtggtgccatcatagctgacagcagcgttaaactcccgagctctagtgatcctcctgcctcagccttctgagtagctgggactacaagcgtgcaccaccacacctggccattttttttgttgcagagacagggtctcactatgttgccaaggctgatctcaaactcctggcctcaagttattctcctgccttggactcccaaagcactggaattacaggcgtgagtcataacacccagctcccacctttagaatttttgattcagtaggtcagggttgaggcctgataacttgtatctctaacatcttcctagtgaaactgatgctgcttgtccagagtgctctctgagaattactgccctaggaccaatattgggaattgggaagccttgctcagtctccaaaatatctcctccacaagccaaatgtggtgaatcttcctccctcactggctcagtcctttttctccagtggatatatgcaaggaattctaagaaaattaaggggcacacactcaaactgatgatagctgctttcctgaaggcaaaatttgtagttgagggaagaatagggagcctctgaacacctgagggtgcaagggtgcactgttccacacaaagaaagatagatgcagagaaagccaggggcatacaaacaagtttcatcgagtttcagaggagcagctcagcatcctcatttcccccttgtgagtcttgaccttgaacatcagcagccatctgagtttttacctgatattctgaactcactcaaggttgtttttttttaagcaatcgaacaattgctgtttctttgggaaacagtttcctgtggggaaaatttaatgcattgcctttgcaggctggagccagtacaatcatattctgatggtttatcaaattgatttggctatagctcagattcatttgatagttcagattcaaacactgagttatttgtataagaatggttctcttccattaccagtgtacccacagtcctatagatagtaaattgcctttttatccagcctgggatcatgaaagagaggtcttctagccatctgtcagtgtagtatacaccagaaatgtgctctcacttatggaaatgattgacctgtaataacatctttgctgggaaaaatagaaattgttcaaatcaaatttgtggcactggctataacacactttattaaatggggcacagagtgctttttaactcctgcctctcctgcctcagcctcttactaccctcctacccatgcagtctctcttgctactctgtatctcaaaatgaagagtactaacaatgtggaaacaattttaaattactaagtctcttctgtgcaagtcataatcccatggggtatccactggtcttttcaagatttaaattctcaaaactactcactatctgaatatagcatgtgttgcaacgttaaaagtgatatttttaaaagaaagaccaaaatcattagaagagaccagcctgaaagataaagtttaaaaacaccagtccacaactacccctccccgcttgtccagcccaccagttccaggcacaagggcaggaataaagtaaacattctcaagcactcattgagggcatcaagtcttacatgacatacatttagtggatgttgattaaacacctactgtgtgtctggcaaggggtaagaaatatatgtgaaaacagaaaacagtacctactgtaatgcatctggccaagggatgaatgttactccccagtacaatgagcactgcagaaattttcacaaatggctatagtaatatacagcagatgcctaataaacccttgtcatcatgtcacacaatgacttttaacacgtgaagtgatagtgtgggaggagacagcctctgtcatcctaggcctgaatttctgcaaaagccacgttgtccccttcctaccctcagtcctttccccttccattagtttaccaactatttattgaacacccaccatatgctggtatcaaggttctcaagactaatcttacaaaaatccagctttgaataaaccattcttctgctcatataaatcctaaactcttctgcatgactatcaaggctcagagatctaatcccgtcccatggttccctttactcctccaagtatgattgcccagaataactattctaaataaccctccctcactgtgccatgatttatgttctgggcctctctctaagcctatctttagcaaatagtcattgtattagtcaaggttattcaaagacagaaacgagagagagagagagagaggagaggggattttattattattattatattttaagttctgggatacatgtgcagaacatgcaggtttgttacataggtgtacacgtgccatggtggtttgctgcacccatcaacccatcatctacattaggtataactgaaggagacagagacacgaaaaacccctcaaaaacgtcagtaaatccaggagctggcttttggaagagaataacaaaataaacagactgctagccagactaatgaagaataaaagagagaagaatcaaataaacacaataaaaaatgataaaggagatatcaccactgatcccacagaaatacaaactaccatcagagaatactataaacacctctatgcaaataaactaaaaaatgtaaaagaaatggataaattcctggacacatacaccattccaagactaatccaggaagaagatgaatccctgaatagaccaataacaagttcagaaattgaggcagtaactaatagcctaccaaccaaaaaaagcccaggaccagacagattcacagccaaattctaccagaggtacaaaaaggagctggtaccattccttctgaaactattccaaacaacagaaaaagagggactcctctctaactcattttgtgaggcagcatcatcctgataccaaaacctggcagagacaagaaaaagaaaaatttcaggccaatatccctgatgaacatcgatgcgaaaatcctcaatgaaatactgacaaactgaatccagcagcacatcaaaaagcttatccaccacgatcaagtcagcttcatccctgggatgcaaggctggttcaaaatacacaaatcaataaacataatccatcacataaacagaaccaatgacaaaaaccatatgattatctcaatagatgcagaaaatgccttcgacaaaattcaacaccacttcatgctaaaaagtctcaataatctaggtattgatggaccgtatctcaaaataataagagctatttatgacaaactcgcagccaatatcatactgaatgggcaaaaactggaagcatttcctttgaaaactggcacaagacaaagatgccctctctcaccactcctattcaacacagtgttggaagttctggccaggacaatcaggcaagagaaagaaataaaaggtattcaaataggaagagaggaagtcagattgtccgtttgcggatgacatgattgtatatttagaaaaccccatcatctctgccccaaatctccttaagctgataagcaacttcagcaaagtctcaggatacaaaatcaatgtgcaaaaatcacaagcattcctatacaccaataatagacaaacagagggccaaatcatgagcaaactcccattcacaattgctacagagagaataaaaatacctaggaatacaacttacaagggatgtgaaggacctcttcaaggagaactgtgaaccactgctcgaggaaataagagaagaggagatttcttagggacattggctcacatggctatggaggctgaggagtccatgataggctatctgcaagctggagaaccagggaagctatagcatggcttggtccaaacttgaaagcttcagaaccggggaggccatctaattctcagtccaagcaagaggcctgacgtgcctgtgtcaacaaggagacagacatgcactggggagtaagtagaatgatacattgggtggactgacttgaacaccatccagtgttcaggtgttggattgggaagaggcctgagaaccagggaaattgatggtataactctgagtctgaagtcaaagtcctgagaatccaagggggtgggggagggaaactggtacaaatccctgagtccaaaagcctgagaacctggagttctgatgtctaaaagtaggagaagaaggggtacccagcttctgggtgagggcatatcttccttactcaatccatggattcacataccaatctcttctggaaataccctcagacacccagaaatagtgctttaccaactatctgaatattctttaatcccctcaagttgacacctaaaattaactatcgtggtcacaataatgtactcccatgaagatgtgaataactgatgtctttttttgttactaccccccacccacgcccatgtatatttgcatcataaaaatggagagtgttttcataaaggaattaaaatcaaacatctgatttttaggccatgcagaagaactgtagccaacaaatagacctgtgtgtgtatgagtgtgtgtgtatgttttaggagaacagagcaaaaaagggaatatactatagttaagtctctagccaagatctgaacaagatctacttatctcatctttgtccctggctaatataaatttctatggaattttcttaatccatggagatactagagatatgttgtattttctgtcagttcaaaatttggaagtcttgacaggttccatgtttgatcacttcagacagtaagctttaagtaaacacctccacaaagacttttatttccctgtcatccaggaaccacttttgcttaaaaatttgctttactgaactttaagtgactttgcctctttcttaccaagagctccctccttcaacatccaccaatgaaagatctcaatcccagggcactgacaagatgccttcgtctcacagcatcaaagccaccatgtgcaaatggcagcagcacatatgtcttgtagccgtgataagaaggaatccaaaataacaagctagctccagaacactgagcaacggaaaggcaatgaagtttaccaaggaggcttcccaatctaacacctaaacactggattgcattcaagtcaatctacccagtgtatcattctgcttactccccaaggcatgtctgtcttcttgttggcattgcacaaggttgctccctttcttggtaacttttatattctcagccacatatacttacctgctgcagaagcaccattttcctgagctcactttaagtctagatttctggatttctcggtctgcctttcattcatctccccttagaattagctcttttgtaaaattttctccagcctctcatttttattacaatgctgagtcatgtctgcttatcagacaactacttactcaatagatttcatgagcccaaatctatgccagaaatgatacagaacacaaaagcctgctctcagggcacttgaaatctggctgaggagacaaacaaacatacatgaaaagacaaccataggaaacaatagaagacataacacaaggtgcaatattctgcaatttctggaagtcggagaacatcacagttggctggggtgatctgtctatttcctttcctaatccttctccaatgtcactccccagtatatcttctaacaaagcaataagtttctgggtactcactacatgaaaggcaccgctgagaatgcgagagccttataccttcaaggagagataaaatacaaatagctagtacataaagcaaaagatagtcagtggtaaaagaggcagaaagtatacagactataatgctatcgcactcttactggttttcaaggaaaaaatacttcttcaactgttaaacattatggagacctcagtggagtttgttttggttctctattgcctcattaaaatttaatggcttaaaacaaccattccattttgctcacaattttgtgtcagacatttggatggctggccctgatccatgcaatgtcagctcaggcggctgactgcggggcggggggtccacttccaagtagtccccatcacttatgtgcctcacacatctgtgtttattgggtgtgtgtgtgcatttgcatgtgcatttgcatgtgcatgtgtgtgtgtgtgtgtggtgtcttctctaactctgtccatacgggttctcattctccaggacctgtctgcatggtttaggcttttaccaatatggcagccttaaggtattcagagatctttcatggcagctgaagactctgttaagaccaatgtagaagatgtcagtgctcttaaaggctagatctataatgaatagcaacatttctatcatattcttttatccgaagacatcacagttctgcccagattcaaggggagaacaaatagacccgcaatgggaaagagtgtaaaagaatttgcagtcatctttaatctaccacagagtatatgagataatgggatgatattccatggagtataaaaatttgtttctctttagaatcttcaattaatccaatttttatactgtaaactcaagggggagacataatcaagaaaaataacctgctttgtattgctcgttttgaaaaatgtgaaaaatgttcatgagaggcaatgatggtcttggtctaaattgttcctaaaggacttctaaaatgttttttttaatctcatttcttggagggagtcctgaattgttatagacaaaacagggagttgggtctcaacctttgttctttccacatttgagaaaaaaagaggaacccaaatgacagataagaactcagtcacagaaaacagggcaagtgtcactaacagaactggctagaagaggcgttgccaaaagagagaaaccagaaagatctcctgtagcaaagaaaaaagttggaaatctctaaaacaatgggaagtataaatggagagaaggcagagacagcagcagagatcaaagattcatcaaagagacaagggttcatggaccagactctgatctccagggaccccaaatctgaagaatcataatagggagggagctagacaagatgccctggaccaccagaacgtttaccttgtggtgatagcaatgagtgttgtgagaagtaattagattccagatgtatgtggtataaaaagtcaagaagtttttctgagagttttgatatagggtatgagagaaagagaggagtccaggtaggcatcaaagtttttgcatgaacaactggaaaggtggaacagattttcagaaaatatcaggaaggccatttttattattcaaagtctgacctgcatattagacaactaagtggagattataaggaggcaattgaatatgactctggggttcaagaaaaagaagcaacccagaaatacaaattttagcgccatcagcatataaattgtgtttatgtcataagactggataagcttatctgcagagtaagtgaagattgagaaaagaagtctaggcactgagttcattggcactcctaaagttggaggtcatggaggaaccagcaaataagaagaaactttcagcgagctaggagacaattattactagagatacagaaagttaccaggaaggcataaaatgtataaatttgtatgagccttaaaaagtcatcaaacatataaaaggcaaaaattgacaaaactagaactatacaaatccaaaatcattgttggagatttcattataattttctcagtagtgatagaacaaagaagcaaaaaaatcagtaagtatataggagatttgatctaattgacagctaacaaagaggggactatgtataaaatacacacacatacaaatgcacacacacctaacaaaggtaattgttctgaaaatgtaaatcttcctgaacatcaaacaggggatcagtagtccagagattggcaatagtaaccactactaaccctaggacttgaggaacaaatgaggaagtcatcttactgatgtccaggaactggggcaactggtagaagctggatcctccaaggatctgttcaacgagagctgaagtcacagagaagactcagttgctgcctgagacagagaagggatgagatttgcacttttacctattctccagtatcccactagtgccatttgctaaacccaattgaaagctgattgataaggtggtacctgggaaatggaactgcagggatcatccttcctgcaacacagagaagagcgtagagaagggcataacatggatgtgggagaaaagaggcaaatgatcaacacactgtatacagtgacttgtccttcatcctaagagcaatggggagtcattaaagggtcttaagcaggaagtcacaatctaataggcattttttatatctgcagtactaagattgcaatagatggtcatgagggcagttataagacctttgcatttgtctaggcagagattgtggtgacttagaccaaagtcacaggagaggagggaagtaggctgatttgaaacacatttaaaagttaggcttgagagaacaagacactgatgtcccatgagggagtcaaggatggcacccaggtttccattatgaaaaacaggggaaactggaagagtcatttgctgagatggaaaaaacaaggaggaacatatttacaagaaagatggtaacttcagttttgatgcaagtcatcaaaatggtggagttcaaagaacaactgattatgtggacctggagctcaggagtaggatctgaatggggacacacattttggaagccatcagcacatgcctggtatctgaaactaagggaatgaatgagatcacctgaaaagattgggtatagtcagaaggggtctaggtataaagatatactaatatttaaagaacagataaaagagaagtaaaacaaaagcatcagaaagaagtcaacggagatgtcagaggaaaatatgtcaaggagaatatgacgccaagaaagagagtatctcaaaaagaaggagcattctacctgtgaaatgtaattacaaaatcaaggagatcagagctaagacatggccttagtgagtactatttcccgagaggctgaagagaaactcaactgaattgtgagatgaggaaataaaagcatgaacaactagtataaatttgcttgggaaatggaagtgacaaataaggcagtagttagggatgggtttcactggacaataggaagccattataaatttttgagcaagataattatacaatgaaagcaagactttgaaaatgtaattttcaccagattgtgagaacatatggggtagcaaatatatattcacacccccaagtttcattactctgagtgcctactgctttgatttacagggaatgccaacattaaaagactcttcttactcaagtatatccaagggtccccaaggatgctaaaatgaactcatcctggtcatcacttgctaccatccccatcagaagtacccactcacggccaagctgttggccccaccaggtccaagctggtgccatttaaatctccttgttctcaccagccggtcttggttttgaaggttgcaactaccagtggtgctgccagaaaagcgcccacatcactggtgctgctgccagaaaggatggaacttgcagcccatcaggggcagggacctggttaaactggtcatttgtgctgaggtctaatggacaggcagagactttcctaccaaacaagaacaactttctctctctcacactcagtgttatgtttactaagaatagttgccagacactaagtgttgtctgttggtcaggaagttctttatgcactttaactcatctaattttaacaacaaccctctgaggtacacataggatttttgtcttcccattttacagctgaggaaactgaaacatggagaagtgacatacttgaccaaggtcataaatctaatagggagaggggcaaggtacatatgcaggcaggtctgctgtagacgccaagttcgtaaccaccactctgtactgccacttggactttgtgctaacactgcccctaccgcctgccagactcttcttcctcttgtagtatatttccttcttgtccctttttctgaaatttggccacagattctactccagctcatcagaaatatttttatagctagttttatggtacagacaaatggtctcaatcccttagtcccatgcaaattagcaggtacaaatagactgtagaagggaaggtggctaattctactcaccagcaacacttaggccccaaattagccaggatgtaagtatatccaggaatcagagtggcctgttatctaactcctcctaccaggaacagaaggaccaggactcctacagaaccaaatgtcctattagccaaatatccatctggccaaggtgtgttggaggaaccggagtctctctcctcatccatgtaagaatatcactagtgtgtctgctattttgcctgctaaccaagagcagaaagttttaggtccatagtaatcctgttatatttaccttttctctttatagagatatttcaagaacaaggatccattccctgcctagctatggcttagaaaatcttaagaagctgagggccaggtcgacttacaacttaaaaaagctgcctactctggaaaagcttgtcgccctcatggaagccagcctcacctatcccagccattgctgtgcctttgcaaactggagacggcaaatgtgagtccatcctttaagccctgctcaggcatttccccaatgtagaactttgtccacaatttctacctatctgtgacatgaagagaatctacttgcagagagttccctgtctcaagccctttggcacattctgggtcaaaaattcagttcatggagagtgaggaatagttgaactctttcatttctttgaaagtgggctcacaggagagggctacccatgtggcagaacatataccaagtactaaatgagaaaacatgaaaaatactaagcatagtgcctcagagttggtgcataatatctgttccctctttcctttgtaccattatagatttaatccttcaagtcccaaactgtgcacctgataaatgccccatccgtgtcatctttggtggggagatgcataaatgccatgccagagactgatgtacatatctgccgcacatcccaatcactctaagcctctctaatccaccttgggatcttcctacctcacagggaggataaagattaagacatctcattactttggctttcaaagaaagccgggttcaaggaagcccagacttaaagagggccatctaaacagagacaagtcttagtagctaactggttaaaaaagtgaggtaatcatagacaggatctggaaagagtaaagagaaagtcgccttggagattgtacacatgttccagacatttaaatgatccattggaggtaagaacttactgagtatcagagttctcaaagctctcacgctcctctgagctcacctacataagccacaccatgtagttgcactcatcaaatgatgtcttttcattactcttatatactagcctagaactaatacagctttcctatgatattatttctctgtttaacacagtctcctccattattcaacctttaacatacattgaccagtccatgtggacatattccttgctccaaagcaaaacaaaaagagcaacaaaacagtacccaccctaaaatgtttttcagagtagctggaagtccctactcagacccttttggaggatttgtagaaaaatagctgtttttcagaatctgcatgcatcattgggatattatccagaatgggcactcttcatagatcagctcaagagccaggaaatttcttcctgacaatcagaattcttaaggtcctgggctgaagcagtggcttgcctcttttatattccagataagaattattctatccagagtgagaaagataccaattttgcaccaagtccatgggactgaataccccaaaggagaaataaagaacattaagattggccaggcaaggtggctgacacccataaccccagcactttgggaggccaaggcggaataactccttgagcccaggagtttgagaccagcctgggtaacatggtgggacctcgtctctacaaaaaaaatgaacaaaattagccatgtgtggtggcgcatgcctgtagtcccacctactcgggaggctaaagtgggaggattacttgagcccaggaggtcgaggctgcagtgagctataattgtgccactgtacttcagcctgggcagcagagtgagaccctgtctttaaaaaaagaagaaaatgttaagatcactgtgagagcagcttgcagtgtgctatttggcccagttccaacacaccccaagaatttgttgtctcatcgtgttactcagactcctctagacatagcctcaaggctctcccaaccagaatctccacatctaccttatattgtcacaggacatgaggtcttctctgatccctccagaccactcggctctcatccctctaggttgctgctctaacttaccatccaggcctgttggggtatagcaagggagaggaacatggttcttacactacatgccaaaatggagtaacaaaaattgtgataggtggttttcattttttatttttagcaatgggtatttgattttcatatttatcaaattcacacacaaacaacacaaaataattgttattcagaagataatttcagatttattccttcaatagtgacatttcattgtatatcatagtagatgtggtttggtagcgggattcaagttttaacttgtatgatgaaattcttcttttgatcctcatttggaaataatgcccagagtgtaaacatgaggcccctgtgactaaaactttggccagtggtcctcctggactcttcctgggctcttcccaaaagttcgtatcaactacagtcttcatttgtcattgaacctgatatttccttgtcataattctgtattcattttgcattactttgctctcattttattcttcaatttttaatgttaaatacaataaaaattgtgtttcttcacaactcaatgttgtgaaggccatttcttcacaattcaatattaaattgacatgctgttgcatatgcttctaagtacccacacagggcctagacctcaagaattccataagtaaccaccatcatttgtcttcatactgctgacatttgccaagtattcactaccaagcactgtaatactctgtatctttatttcatttaattcccacaatggtaatatcattattattcctttctcacagagacagaaactaaggctcagagatactaaataacttgacctacactgaccaaacagatccaaatctggtctgcctgcctccaaagcttaggctctgcgacactgctatgccacccccaagcatctgttcactgactgatcagagtccaagagtgccactttttcaactgaccctaaactgaattcccaactccttatgataattaggattttccaaagtactgcggaggcaagacttgatgtcctttggtttccacttttgtttctgttcttatctcagagacataagttatttacttttctccttacttcatgtcagtgggtcacttcagtttcagaaaaagagaagcacaatatttaaaatatatggacagcagtatcaacaataagaaccttcacagacagcgaccataagccataggaagtgaaggctgtttctagagagttaagtcagagctcagtccaatgaaccaaactgcagtcagcaagtaccaggttacttactttctcttcctggaatcaggctgcaactaattcagtaacagggtttaagagtctagagttagactaaggaccacaggatacccctcttctcccctctatacccattatggagcttgcctcacctttcttggaagaccattgactaaaccagaacattttctgggctccgtttccattcactttcaattctgtgtatgttaatcatttagccttaaaaaaacaaacaaacaaaaagaatcccttaggccaagagaaaatgacttcctggcaattcaattcacttcccaggggtgagagaagagaggagagcactcttcctaacagacccttctcatccaggttgatggggcaaggttcagtccctgtataataggttggaacacctggcaagactcatcctttagcatcaaatggagtctttacctcctccactcccctagccacctttttccttcttaagaaggtttgatacttacttcgccacttatatctgaggttatgtcaaggtttaaaaaaaatacagtcaacttaatattgctgtgaacttgccccttggggaaggagggaaaggtatgcatgtgtatgtacaattttttttttttttttgcatccaaaaaggtcctaacgtaaggcttattcccattccacaagcctttgcttccaaacagaagtattacctttcttgtttctacatccagagtattgatatactactctggggtagaatatttatgggtatactcgtggattgaatatttatcacctggatttcattcaaatccctctgtaagtacctctatcctgttgacaaggccccttgtacatttgggtttaaaggcaaaaccaagacagtaaagtgagcccaaggagagctaggctgcccagaggatgagttccattcttagaataaattaggtccttttgcagcttgcattgttctttggggcactcactaggaaactgttcaatatgagagagccaggcttaccttgcagacaagcacatgctgaggcctattgtggcccccagaaagtgagataataaagaacaggaaagaccctggtaacatttccggcaaattagctggcctcctaatagcctgagtaccaaagagccagggaataggggctggctgggaactaactacagattttgatcccctaatttatgtagataagagaagcaaataagttctcatttgagtcagcgaacagtctggatcttccagtgatttgagtgtagacgaataggaatatgtcctactcaggtgtattaagagatagctggatcaagatgggagaaggaaaagggtcgagttgatgccagctctgtaaattattttcacttaacagcaaggcttagtctcaggtgccttcctccccacattcaggttgtggcaagatggtttccccagtgagccatccaactctagtaatatatatacaagttgttatattcatttacagtaagcagcattaacccttgaggttagcctcaagggcaggtatgatgtgagaagaaaaaaaaaaaatctcaggaagaaactcatcatttctaccctgcacaaagacagtgatgtatttgctatactggatctgagatgttgattctatttctttttgtatttttctagctctgagcttcatccaatttgcaacaaatctattttaaggcaagaagttgattatatgactcaggctaggggtcagagatcctctctggcagaagacaatgagtccagctacagcagaggatttgacatgacgtacactgagtttgactatgacttatgcaatgaagtggttgacgtgacctgctcccctaagccagatgcattcaacccatgtgaagatatcatggggtacaacatcctcagagtcctgatatggtttatcagcatcctggccatcactgggaacatcatagtgctagtgatcctaactaccagccaatataaactcacagtccccaggttccttatgtgcaacctggcctttgctgatctctgcattggaatctacctgctgctcattgcatcagttgatatccataccaagagccaatatcacaactatgccattgactggcaaactggggcaggctgtgatgctgctggctttttcactgtctttgccagtgagctgtcagtctacactctgacagctatcaccttggaaagatggcataccatcacgcatgccatgcagctggactgcaaggtgcagctccgccatgctgccagtgtcatggtgatgggctggatttttgcttttgcagctgccctctttcccatctttggcatcagcagctacatgaaggtgagcatctgcctgcccatggatattgacagccctttgtcacagctgtatgtcatgtccctccttgtgctcaatgtcctggcctttgtggtcatctgtggctgctatatccacatctacctcacagtgcggaaccccaacatcgtgtcctcctctagtgacaccaggatcgccaagcgcatggccatgctcatcttcactgacttcctctgcatggcacccatttctttctttgccatttctgcctccctcaaggtgcccctcatcactgtgtccaaagcaaagattctgctggttctgtttcaccccatcaactcctgtgccaaccccttcctctatgccatctttaccaaaaactttcgcagagatttcttcattctgctgagcaagtgtggctgctatgaaatgcaagcccaaatttataggacagaaacttcatccactgtccacaacacccatccaaggaatggccactgctcttcagctcccagagtcaccagtggttccacttacatacttgtccctctaagtcatttagcccaaaactaaaacacaatgtgaaaatgtatctgagtattgaatgataattcagtcttgcctttgaagggtatgtcacaaagagctgacagtgcttctacacatttcatctaatttaatattcctggcatacctttaaggtaaattggtcaggaactattaattccatgtgatacattaggaagctgaattattagtaacaacaataataattaaagaatgcaatactgtattacatattttatccttatatatgttatttttgcacgttatgttcaaagtgcttttgttcagatatctcaagtgatccctgttaaataagcaggacagggattattcttggagttttacaaatgaggaaaccacgactcaaagagttaagtgacttgttcaaaattgtttagtttgtaagaggcagagccaggattaggtattccgactcccagagaatttcccagagaagcaccatggtattcattcattcattcattcaacaaatattaattgaacacccatctgaagcctttgtaatgcgtcagtgtggataggctgaaatacatttcccagatttcccttcctcatgtgtttccagttagtgtgggccatagtgaggactctaggaaaacaggagggcagaggaaaatggcagccattttgtagctcagcacactctgttgctgatgctgactcagctcactgctgtgaagcaacggctgggtctccaattgctccacctttccctggatcctccttcaggttctcagactcgtcctgggccaggtatatttgttaagctccatgataaaggctccaacttctgtacggcactttcatcaccaaggtcagaggcaacaagaatgtaagcagggctcagggtgtgcttgtggagttctacctgtgctgctgcttccagcatgctgtgatcttccctttatgatcgcccaccctgaggacttctagttctggcatcagctgtggagacatccttacaaagacaggttaaccagctccccacaactgtgtgagcctgtaacaaatatttaccacctatatatatttacatgcatgcaaatatatcactggttctgcttctctacttgaaccctaacacctattatatgacatgcatatggatcgtaatgttaagaacacagcagtttggaatcagacagcactgcgattttattaggactccataataagccaggacctgacctcactaggctcagctgccatttctgtaaactagagacggttatatagctaacttttgagcttattgtaagaagtagataagaaaatggttgtgaagagcctagtgctgtaactggcatggtaaacgttagttcacttctctcctcccagacctgtgcctggtctagtgccctctcctgaccctcagtctagaactcattccattatagcatattgctctcaataaataaccatactacccacatctattttataaatgaccccatctggataatttcggtcataaatatcaactataaattccaccaagctctgtgccttggctagcagacaaagctctgcgtcttctctttctatgtcagaagccagcccttcctcctcttaccctttggcaaacatttaaaaacttgatcccaaaagcattttggaggaagtccttagagagccagaagaaaaagcaatcgtctcttcccatctgacctggcaccattttgatatactgtgagcatcaagtgcaaaataaaataattgtccttgtaaagagtctagagctttactgtctagcacagtggctgctagccacatgtggctactgggcacttgaaccgtggctagcctgaatttagatgtgctgtaagtgtaaaatacacatgggattccaaatacttcatataaaaaatcataaaatagctcaataattattttattgattacatactaggacaatattgttttggaggtatcaggacaaatacatttaaaaattagtttcacttatttatttttacattttttaatgtagctacaagaaaattttaaattacttatgtggcttgcatttatggcttgcagtttatttcaattggagggcactgatctagaactatacaaaaatgcagggctttcagctagcattttctccccagcccccacacactcgtttgctgcactgctgggctgtcccagctccatctgcagtcattcatcttccttatttttgaccagaggcaatgtatttctgaatttggactcaaaagcaagttgcagctaaattaaaaatacgatagagtattaattattccacaacatagctgctgatgacacatcggtttaagaaatcatggctctgagaggcaagaatgtgctcagagacaaatatacagcaagagacactcagaagacattttttccatcactataatacttcctggtaagagatgagacttttctcaaataagcaaacatatttatgggtagctaaactcagtgcttctaaaccctttagacaaatctaaagggaaagaaaaacatcctacacttcctgtattataataaaaaccattgaaatcactcttccccctaaaggtgattatacaggtaacacccctaaagttgtacctcctggagtggcagttcagtcccatagtggtgacccagagggaacacacacacacacacacgcgcacgcgcgtgcacgaagtttcagattaatacaagtttgttttttctattttttaagtttgtattgcaaatctcaaaaaccatgaagaggacaatagctcccagagattacttaaagtacccatatctccatgggtaatactgaaaatatcaatacaaatactgatctctcatgatggatattggctttggccatcctggtgcaaaatgaaatctttgcctcctatccctgaccacacactggacctgctcccatgtctatttcctcagattttcactcatcataaatttattcagccccatcctggaaagcctctcattttgtcttcccttctccaccaactttcctccatatactcctttgactaaatcccaagaaaatctgacaaggtaggatcctccttggtggggttggagcaaggtgactgaatggataaatccagagtgaatgggtcagagtgaagagatgaactaggtacacaagttgatcaaaaatttttatcttgtcacatacagatgcattagttttggtgaaggggatggaatggggggcactggagagtactatttcactaaaagtctccatgtgctgatcatggggaacccttcataccttgtttctgcaagagcaaatggagggaggaagagaataagagaaaaagccccctgcacttgcatcactaagatactgcaactcttaccacaggcagcactacaccttatttaggtcagtatcacatggcattagaaaaatcagaaaaagatcattgaaactgatggccacaaccttcaggttcataaagtattttattaggaaagtttgtaaaggcacaagcagggaataaactttcagctactacatactaagggacattgaagaaagaagacaaatatataggatgtgttgtttgtttaaaatataactgaacccattaaagagactaaataaacgtccacacaaaataaagctcaactataaggtggtatttgctgaccctcatcaaagtgctttcagtggcaagaagcagaactcttattttaaaaaagccttaaacagtaaggccagttatataaaatgttccaggcttggattggcagctcaatgatctcaaagacccaggacctttccatctttttgctctgtcatctttggagtcttcagccatgtcttccctcatgatagtaggttgctatagcagttccagatgccccaagcagacatgaccaaatccagaaacaaagaagagatgtcttttcttctgtgcatctctcttttcaaagggaatagaatgtctcattaaaggccatgagaaagcctcctttctattcactatccaggactgctgccctggttgcaagagaggtcacaaaatgagcctctgccacattcagcctctatagtgaaaggcaagttctgtcagtcaggaatgtggaagcaggtactagaagagggggaatgaatgggtaggcaacctcatcctccaacgtgagccaacccaaatcctctctcatgggatgaagccagtgggattcaaggtcagaatacatatggcacctttacacctcacatctcctgtcttcattcctctgtcaccctccctccattataacctgcagtgcagctcctcctctccatgtagtctgttccatccctccctgaaacaaaccttagagactactcagatctaaaggcaaccattggagtcacacattgtccatgaaatcctgtttgggaataggaatggaaaaggaaaaaaagaaagaaaagagacaagaggaaaaagaagtaagaaaagaaatgcactaggataggaaggaggagacatgaggaaaagagagaatggcaagacaaatatcaaggaaaggggcaatgtgaaagaaagccatgccctgatcatgtccctttgtgcagatacttgtttatctttgtcttaagaaaacctttccaacttgttgcaaagagttcaattcaaaacactgaatgagctcagttttagatcccagtagaaaagcccaatggacatatcatgatggtctaggtttcccagggctctacataccatggtgtggggcccccagatctagttcaaaaagtgagacggagtctaaccaaagagataagggtcagtatttggaactataaaaatatttggtgttggggtaaattatatcactgggagccacctagagaaatcaaaaactaactctgaacaagcccacacaattctattttccacttatgcattccctcattcaacaaatatttattgagtgcctactttaaaccaagcactattccagtcactggatataaagtagtaaataaaaaatttctgtccttggagactctatattctagtagaggtgaccaatgacatacaaactcagtaaaatgcattggtgctaggcagtgacaagtgctggtgacaaaaaataaatcagggaagagggatatgatgtgcgacattgggggcctccctgagaacgtgacttgagtagacctggagggaatggaaagtgagacgtgtggatactgagggaagagtgctccaggcaaagggaacagcaagtgcaaaagcccagggacagtaaacctgctttgctccagaaaaacaagatcggtgtggctggagcagagaaaaaggggtgagggagagtagcaagaaatgaagacaaaaaagtacaggaagctatatcatttcaatttctctatttctaaaagggtggaagcagggtgattaagaataaaaaaaaaagacacctgaaaggttgtaataagtattaattgagcttgtgtgtgtagattgcctagcctagtatttaacactaggaaattttgaatttcagtcacttttcatttcttttaacagcttgctgcacctaatcctcccccttttccactctctcctggtttcccagccctcactctaattctctcctgccatcatctctccaaccaccccacagcaaagctgctctcctgtggggctgtcactttctaaagaatatgatacatggttcacaccacggtgataataatctcctatatttcaatgggttttttttacaaattccagaagactttggcttgcattggctcattagatcctcaaaacattcctgtgaggtagaaaggaggacagggtttccttgttataaaagaagaaattagcattcaaaggttaagtgacctctctaggttgtgcacctatacaatgacagaataagcgcagaattcaaatcccttggttccagtctggactgtctctttaatgactgtcacaactgaatgtgtccacttcccagggtcacataaaagtagaggtattggaaacaccagccttaacatgaataagggcagcaacctagttcagacacttctggcagcaagaccaggccagcagctgaccagggactgtattctcacacagctgatgctcactgtccatgctgaagccttgatgatgtgaatttaatcagatgaacaaggaaaatagagtcacaaagcaaagcccagtgatccagtgagcagagctttttctaattccctgtaataccttttctcctcctgatcccaagcacagggcaccccctgactggcacgcagttgagctcagcagaagccaggaagagagaaaaataaaagtcaatgaaatgtactgtggctcaggagagccctaactcatgggccaaacttgactgtgagccagtgtagttaagaaagaatttgacagctctaaggtgtttcctccagaggagaataacctttaatttaagcatgtctttgttcatccctaaaagagaccatttgctggaagagaataagaccattgcctggccgtggctattttctctgctgcaatcaggcattttacatttaggtgctggtttgtaatgaagcaagttaagggcagatatgtggtccccttcctggacaccatgctttagaggaccctgctctctcttgccctcctctggccatgccttacccataggcaaggaatctgggagcccatgaggccaacggcacatgagcacccaaatttgcactgaacatgttctgatacttgaggccccaaaatctcctgcctgagtactcaaggtttgccttgaccctctccacccgagggtggattacacccacagtgtgcacactacaggcctaaggatggctgtttgcagtgtgtaaatggaactcagaggtgcaggctgagtggcataatgcatgctcagtgcaaccagggcacacacagaaaaggagctctgcagggcagggcttccatttgtacccttgcttgagtcctgaagatgtgagtggtggtcttcatgaagaagtagagatgagtcagtgttctccctcgccgactgctgagaaaaccattcaaagcacagcttgcaggccagtgttgtcaccttcacttgggacacatgcactttggctatggctctgccattcagatcattccatatttattagaacccttggcacttaactcagttgccatctccttccccacttctgcaccttcctgatgacttcagcatcctcatagatcacccagtctggacctcagcctcacaatgctttgacttacccgttcccagtgctttacactttaatagacctgggtaacttgtagcgacaatcccaatcctgaaatatccagaaatcgtcccctcacctcggaaatcttcaccttcagaagccgactccctcctcccttgctattctaccaacctcctcaactttcctcctggagcatgccttgccttttaggctgccatgcctttgcttatgccatgtgccctgcctaggccctccctgcatttgtctgctggatatgccttctttatctataaaactcagctcaaatatcacttttcactgaatgtccatgactaagcactaggaagcaggcaccatgctaggcagcaggattacaaaattagtaaagtatcttccttcccccacacagaccaactcaggaaatagacaagtaaacataattccatctgtgtggtcatttgaacaagttactatgagagcacagaaggttttaccaaattcagttttaccaggcagggcactgtgcccaatgagagagaaggatgccctgcctggagttttacacattcatttaccttcttcaaaacaatatattcattggaggcaaaatgggaatagcccatctgatttcttctactgactggcatgcactcagacagaggttcatcttaggaaataaaggagctaatattagttcagctcttatgatgtgcctgtcaaagagaaagtttcctcaacctgcctagggttggcagagaaagattaataggagaaaacgtacgaatttatttgatcaaagttgtacacgtcacaggagctttaagaaatgaagacccaaatatcaaggaaaattgtccatttgtatgctcagattcagtgaagaacagacagctgtgtcaaatttgattggacaaaaagggtatggtctaatggtagcaggcagagggaggaaaccccgcaagacctgtctgttcacattcttctttgcctctctgtgtggcagctctttctcctgggtttagggcaggactcattctggaatgagggtctcatgatcatgtatcagacaagttaggtcagagaatttctttatggccagcccctacacagaaaggcaggggaacgttagagtaatatgtctaggttttatggctgtctttagggaagagctctggtttctatgacccaccttggggaaaaggaattctagtttctctggtctgccttggggaagaaaggagagcaggagaaagaaaggtgggagaaggccagaaagactttgtttctgaagctctttcagtttccttcagttcaaagcactcatcacaccaagacaccatactgtggggtatcacattctgagccctaacacttccaatattatgctatgaatttacatcatgatttcaggtaattattccaacaatgccacaaggtgagcatttgtgttatccagtttcacagatgcagaaactgaagtggaaaaaattgactagcattatatggctggcaagtgatcaaacaggattttctcattatttcattcactcaatagttattgagctcataatatatgccaggcattatgtcagacttcatggatacagacaggtacacagtaaacaaggtggccactgcccaaatggagcttgcattctggtggggaagacagataataaacaacaagaaagaagcaatataacagattgggacagtgctattaatataagtaaatgaaggagggatatcatcaggagaatctgggaaggagtggatgctacctgagacaggatggtcaaggatctgcctagttgcaaagcactagactttccacaaccccttctaccctccagtgggcctctgcagtatatatggcaaccaattctggtttcatgtattctaccacttactccaactctagtaaatatctgcaaagcttaccattgcctacgactctcagattatttccccaagatgctgcagaatccttataatgtttctcagcctcaatagaatgaaaagcaggtctgtgcttatatcacttaatgaccaaagaggaaggaaatttacaattaaagtgtactttgccaactgtggatgaattagttaggtcactgtgatctacaggttagatgtctgttcagcagtgtcctctacttgagattccaaggaggttgaagctcactactcgccacccctcgcacccccctccgttctcttctttcccttacctgcttcctcacactgattcaaaatctcccccatggcccgggcacggtggctcacacctgtaatcccagcactttgggaggccgagccaggtgggtcacctaaggtcaggagttcgagaccagcctggccaacatggtgaaaccctatctctactaaaaatacaaaaattagccaggtgtggtggtgggtgcctataatctcagctgctcaggaggctgaggcaggggaattgctggaacccaggaggcagaggttgtagtgagttgagatcataccgttgcactccagcctgggcaacgacagaaagactccataaaatgaaaaaaaaaaaaaaagaacaaaaaacaatctccttcatatcaccttcatatcagtacctcacaacacctgaaatccccatcctatcaatcagatgcatgatggtggaaagagcgtgaaacatgtccaaagtcctagtttgaactagcttgaagtttgaactctacccttcaccctgttttggaaagaatgtgtgagttggagtatgtgaaagaatgtcagaaactgcccaaacatcatgaatatgggtccagctggaatacaaatgttgttgggaacagtctctaactaatgggatttaattagctgagctccttccaccacatcactttacccttagggaatgggtgcacacagcgcttgtgtgatgcagctggaagagtcagggcactggggagccagagtgaatccatgtggaatcagtgcttactaggcagccagacgggcagcattaaagctttggggacgtgggtgcttaaggagaagaaacagccaaaaggaaatgaaggagcattaaacagcaacccagccatgtcacgtgactcacactcctcctgcgccagagcccagtgtgagcccctgtctgacagtcagtcacagaggacccagcagcaaggcatgattatcaacagaaatcagcttagcaaaatgcagctgtaaccccagagggcacaactgtgaccctttctgccaacattgttcaaatgcaaggacagagatggttttccagaaggcaatgactgcaagagctgtccaccccagacctgcgaagaaaagtaaagccatagggaaatggggactataagagataaggatataaggccttgtgatgctttggataaggaaagagatataataactttagatgtagacaaaatattttagttaggaatatatgctaaaaatgaaatggcaatgactgaatgaaaacacaataaagatagaaatagatcttttagcttctgaaagctaaaactataaaacttttctgtaaaactgtctttacaagtttatagcaagccaagatttcctagtcagaactcaaaaagcattaatatataaaaaattgataaattgggcttgatcaagtttaaacatttctgttcatcaaaagacacattaagaaaatgaaaaggcagggcaaacctgtgaaaaaacacttaagacacctctaacccaggactcatatccagaatacataaagaactcctgcaaataaacaatagaaagataacccaacaaataagggagggcaaacacatctactttaggacccagcagctcctcttctagttacttacacaagagaaattttgaatgtacataacaaaaaggtatacagcagccttattcataaaaaccaaaaactggaaaagcacccaaatgtccatcaaaaggtgaatagataaataaattgtggtatatttgtaccatggaatactgctcggccataaaaaatgaataaattactgatatacagcacataatgatgactcaatctcaaaaacactatattaagtgaatgaaggcagagccaaagagtaaatactgtatttttccatatatataaagttcaagaacaggaaaaactgatgcacaatgatataagtccaaaagcagtcatctcagggatagagggttgactgaaaaggagcactgtctataataacggaaatagtctatgttttgtgtggcagttacacagatgtaaagaattatcaaaccgatcaaatgaacacttaatatctatgcattttgttgtatgtaaattatacctcaacttattttaagtccacaaaagaaatctaactgtgttcctttagtaacaattagaaaatatagtagaaaaagggaaaaaaatcctcacaatagcaataactgtaaggtacccaagagtacatacaataaggacaagactttcacaagaaaacgtaaaacttattgagagaaggcctaagtaaacgaggagataaattacgttcatcaatgtgaattttcaatactacaaatgtatcaattcattcccaaatgaatgtataaattcaatacaattcaatgaaattccaaactttacttcatgggtagggatttatagaactttagagatcaatttggctatagtaaaaatgcgcttatcggctgggcacggtggcggctcatgcctgtaatcccagcactttgggaggccaaggtgggcagatcaaaaggtcaagaggtcaagaccatcctggccaacatggtgaaaccccatctctactaaaaatacaaaaattacctgggtgtggtggtgtgtgcctgtaatcccagctactcgggaggctgaggcagaagaattgcttgaacccaagaggtggaggttgcaaggttgcagtgagccgagatcgcaccactgcactctggccaaatatgccccaaggaagacttagaatattcacttctgggaatatgccccaaggaagacttagtcttatgcacaagaagacacatatgagaatgaccattgcaccattctttaagaaatgccaataaatatataagttgcttttaattatttctgattgttgaactgtttccttatagttgaaaaacgggtctgaggctgactttttggattcaatgataaatcttttgtgggataatttcatggttaatttttaaaaataaatctttgtgtactcaaaataatgtgcattctgtgtttgttcattatttattcacctttcctcctggagtcattgcatccttttggatttaattggatttaattgcttcatccaaaattcacttaattcacttaactccaggagttctttcaaaatgatagtaattatgtgtatttcaatttcacattatagtaataatttggcccatcatgaaattttagttttactgtcttcttttcttcttcaacactttgaagatattaactcattgctttcccacatctaatgtagctgctgaaaactatgattgtaatctaattttcatgttccttttgggtaatatgctttttatcttgaagccttttagaatgttctatttttaatattctttaatgttactgtagaacatttctatgtgaggaggtcacctctcctgttcagcactctgtgtcctttccatttgaggtctatttttcttcctacacgatgctcttggaaggatacttacacttcaacttcagtcctccatatttgttgacttgcattctttctatctctttatccttttccaatgtcttctgaggaagttcccggcctcaatatttcagtctactgatatattattttgctgtatgcattctgatatgtggcccatctattgagcaatctcagcaattatgtttagaccctcaatatctccaatttgttcttcatattttcttctccctgtttgtttcaagagtctcctttatgtttctaaggataattactacaccttcttttttttaaattattgtccattctgtttcctctggtttagcttatttattttgttaaattactttcacggaactcttactattcacatcttaccatttttcctcgtaagctcatcttttatttctttagactattgactgcttttgcaaatgatgtctatgtgggagaggggtaaacacttaggccttgcccttttctctatgtgagttggaggaggatggtcttcaaggcagaaagtctcaaaggttgcaacatgaattcagccatcctccaaaccccaccaccactccaccaaacactctctggcctctcatcaccaggcgtgttcttaagaacaaaaagcctgtgtaatttcctactccacttggtggaaggagaaggcaagaatgctcaggggacatccaggtgttgtcactactagcttcacattttgactccagagctgccctgatgttaccctgccacttctgcctgattctgttgctttcctgcccatagatctaggcaaccggtcacccagagtactgtggggaaaagaaaggaaacactagaaagctttctgccacccggatgtctctggctttcctcctctccaggctgtcgtttctcccagcctggcagccaaacacattcatcttcctaagagttctcacattttcatgttagctaataaaaatggttgagatctgccagcgttttccctgctgctgttctccattgttgggttcagaaaagaaaaccaacaatttgcaaagacttgagccatgtgggactccaaaaatagtaaggctacataacaaaaactttgtcattaataccctatctcttacaatttattttaaaaagtttatcttggctaagtacagagctaagtatgttctagctgaactcagcctacacagctttcctgaccatcgtcaaaccaaagagagagtttcagaatcaattgagtttgatcaaagttcaccaggagtactttagagagaatatttgactacttttagccatttctcagggcaggcacagtggttcatgcctataatcccagcactttgggaggccgaggagagaggattgcttgaggccaggaattcaagaccagcctgggcaacataggaagaccctgtcttttttaaaaaaatgtttaattagctggttgttgtggtacatgtctgtattcccagctacttgggagactgaggcaggaggagtatcacctgagctcaggagttcaaggttacagtgggctatgatcatgccactgtagtctatttctagcccgagtaacaaagtgagaccctatctcaaaacaaacaaaacaacgaaaatttctcaaaggcagaaactcatgagaggagtgaatagacagtcacaaaaccatatcctctatagggtacagttcctgccataatttaattcatttttttctctcagcatatgctttcaaactcccgtctctctttagctgttcctttccttccaggaaagatcaaatcttcatctattttgattctattctattctaataagaagatatagaatggttaggataaagtctttcatggcttctcctatcagaaaggatacaatccagttccttcaagtaattctgggtaatcactaattactctgaaaccgagcaagacgctttctgtggctccattatggaatttctggattagagaggacagaatcaaattccttttctctgccaaaggctatttatcatttgaaaagcatcctgtgaaaaactgagaaaaacagttataacttgagcctccaagaaatttaccccactaaggacattattttctcctagtaaaatagtatcaatttataagccaaataatttatttctgcataactggctaagatgtccctcatacaaggccctttgattaagcatgaaataaaacccactgccattatttattatattgactctcagattgaaaataaggccttaacattgaataaagatgtatcataagccctccttatgtccctcaactgtaaaattggaacacaagaccatcatcatggctttttatgaggcttcagtgacaactaagggggttcaactaatcaataataataatggaattcccaacaatgaacatcttctacttcacctttctgtggctctagacacacatgcagacacacacacaccccacaatgcctttatagaacattttccctttcagttttttcctctattcctttctctactctcagtctgtagcaaagactctcactcccggttctcccagtgagagaaagatcttttactaagactccatccacgtgaccaaggaagaaagttaaaattagaaaaaaagtagaccaagaccaaccaagattcctcagtgccttctttcttctcctactgtagacacactacacctccacctctttttccccaccactaaaagaacaggaaaaggtcttggggaaaactggcacagccgctgacaaggtagatatcatcatctcccattttacaggtgaagtagctgaagcccttggaaggaaaatgacttcccaaatatgctacaagcagcaacaggtgaactagaatgcagattttgtgcttcctaagacagtattctccccatttcccccactgtaggtttctaaccaggtactcaagtgttctcagttcatcatagtctgtatagtcagaaggacactaacattccctaatttttattacttcaagtatcaaccatttcacaacaccaaaaaagcttctctatgtcaatgtaataggtttcaaccacctgcagtcgactgtatgccaccctttgttagtgggcagcttgccaggctaatacaagatcaccatctagtggtgaaatcaagtaactacaggctacacagtaaatcagattcttctctgcaccccccacatctaaccccaagcctatgggctaagccactgcttatgttattttcagcaaacttccagaaataatttacaaataaaattgataattttccattacataaaacatgacataattttaaaattcttttgagatttaggcatctaccaggtcaatataaatatacttagactcacatacacataattttctacctgcccagctgattgctcttagcagcctgcagcttgacatccagtgaggctccaagtgaaaactagagatgaaccacattgcagatggttgtagataatcacaacttcaggtaagtgctggactctactttcattaaagttgttccagaggcagtatcagaaagtactctccaaacaaaaatagctgcttctaaaaagaatgtgaatgttgatttcactcccaaacaagtatttcttgaacatctattataagctacaaaaaataatatgaagtatcttagataagcattgaacggtcctttagcaatctagattctgcccactactcattattttatggaacctgctaccatcatagtaaacaaatatacatattttaaacacaaaactctataatcattttttaacacaatcaccatgagcttctctgccgcccttaacaccgttgacaaagtactcatcctaaaagcctctcccatttttaattcttagacctgcacacctctgataatgcttctagtttttagtctccccatgcctcccaacaatgtatgtatcctccaaggatataacctggggctccctgtctttttttgtctttattttcacaatctatcacatttatgattttgactatagtatccgtatatccattcctgacgtctactctaagctctagtttaacttttttttttttttttgagacggaatctcgctctgtcaccaggctggagtacaatggcgggatctaggctcactgcaacctccacctctcgggttcaagcgattctcctgcctcagtctcccaagtagctgagactacaggtgcaccactacgcccagctaatttttgtatttttagtagagacaaggtttcaccatgttggccaggatggtctctatctcttgaactcatgatctgcccgcctcggcctcccaaaatgctgggattacaggcgtgagccaccgcgccggacctagtttcacttttttaattgtcttgtggctatctcccaccggaacttcaaactcaacgtacccaaatcagagatcacagctttgctcccaacttcatttctctttgctcatcatttcaatccatcaggctccacacttcgctgttactttaactccttcctttcccagtgccctctatctaatcagttcccagggcagtcagcactacatctgcactgattgctcatcatcccagttttccatttctctccagggtcactactgtgattcatgttcttattctctcctactctgaccacatctgtcagcacatatttgttctaagcatatttttgaagaaatgaccatataccagacactgactaggtattgggaatatagcaggaaccaaacaagacaacagccttcctctgatgggccttatgtgttattgtagggaaagaaaaaacaaaggaggagcaaagaaaggcatacaggaaaacttcaacattctctccctcaactcttttattcaacagaacaagatgctctattaccatctcatgccgtattctgcactaaagtgaactgtaatgaaacccagaaaatttgagagacattttacatagctaatggtaaaaaagaggaaaagcaaatgcctatattgtttccctaaacctcaactcttgcttaactttataaagtcatttttatatgttaagaaacaactcctaaacatttgagggaagacggagttaattagccaaaaaaaaaaaaaaaagtgtacttatgccttgctgtagctaagactgtgaaacaacaagcttttgttactaggaggagaattagttgtgtgtgcctgtttcgatcatttcgttggaaacctaaaaatctaaattatgggtattatacttgaaaggattagctcatcaaattgatgcttattgagcctaaaaagcaatcaacaagacttgtgttttttcatagtcccaacattaattgctgattttaaggacttatatacttgagtgattgatttatccattctttcattcattcactgaacaaatgtttataaaatgtctactatgcgccagggatggggctgatttctggggtagagaaatatgatgttgtaattatccttaagaaatttgcattctagcatgacaagaaattgtgaaacaatgagaaagatgaaagctataattacaaatcagacaaggttctacacagaaggttctgtggaagacggtagggtggagtcccacaaatgttcaccaaaaagagacacctaggttgggccttgaaggatgaatgtttttcagtcaagaggaagaagaatgtcacagacagaaggaagaggatgtactcagagcatggaacagcagaacattttccactggggcaactgctaatagatgacatgataagagctcctacttcagacgacagaggaggaatggaccagctaccaaacttgagcagaaatatcaatatggtatcagacttgcacaaaattagcagatattggccagtttccggtgttagcttgtttgacacgtactcaaatgaccaacaaccatgcaatatgaatagacatatgcatgaatctattccagtagcatcagtcagtggtaaactttcagacttgtgagtctgtctttaaccacttcacaattcctacacaaccttaaattaacataccgtgaatgtgcttggtttgtctaaggcaaccatgaatttattaaaaggaatttttgttctccctgccagtttgtgttatctagtatttggctgtttgtgttgttaccacagcaacatttggacagataaatttggcacagaacatgtggtactgctaaaataccgctttatgaagtactttctggtactatttccaccaggatagtcaaagataatgtaagggagccactgtctgggcaggaatcaaaacagaaaaggggataaaaaataaggcactgggttagataagggcttcgtggaccatgtcctgtagcaagtgatcaatagttctttctggaacagtctctgaggcaaaccgtgggttaaatgatgctaataatgccaacgtgaacttggccctcccaaaggaggaaagggtagtcaggttttccaacctaattggccgtcaatcactttttcacctagaggctcagtgaccttccaatgaaacacacatttaagaaatgctgggttagataatcttatagcttcaaaaaattatatcaacagaagatacttaaatgcatattactaagcaaaagacgcttatcttaaaagactacatatcacatgattttaactatatgacattctggaaaaggcaaatctatggagacagtaaaaagatcaacagttgccaggggttagggatggagagatggagggaagagcacagaggattctagggacggcgaaactactccacatgataccataatggtggacacgtccatttgtccagacccatagaatgtacgtcaagagggaaccctaatgtaaactatgggcttgggtgataatgacatgtcaatgtagctccactgactgtgacacatgtgccactctggtgggggaagctgtgggtgcagtggggaggctgtgggtgtgtggggcagagagtatatgatactgccctaagttttctgcttaattttgctgtgaatctaaaagggctctaaaaattaaagtttttcaaaaaaaattatattacattctacatggaataactacaaaattagaggaacatcttctcactgagctgtgatcctcaaggtcccttttctatatagtaaaaacagtatttggattttgttttgttttttcagttacagccttacctgcatttttaaacacaactttcaggtatttggggactacattattaccaaatcttggctttgggagtacat
